United States Patent Application Publication US 2024/0327476 A1 - sequence listing, part 107

SEQ ID NO: 205067 - DNA, 1584 bp, synthetic construct
  misc_feature 1..1584: note = Description of Artificial Sequence: Synthetic coding sequence
  source 1..1584: mol_type = other DNA
atggccaaggagcggtgcctgaagaagagcttccaggacagcctggaggacattaagaaacgcatgaaagagaaacgtaacaagaatctggccgaaatcggaaaaaggcgttctttcatcgctgccccttgccaaattataaccaacacttccactctcctgaagaactaccaagacaacaacaagatgttggttctcgctttggaaaatgaaaagtcgaaagtcaaagaagcccaggacattatcttgcagctgcggaaggagtgttattacctcacgtgccagctgtacgccctgaagggcaagctgacgtcacagcagacggttgaacccgcccagaatcaagagatttgcagctctggtatggaccctaatagtgacgactccagtcggaacctgtttgtgaaggacctgcctcaaatcccactggaggagacagaacttccaggacaaggcgagagcttccagattgaagaccagatacctaccatccctcaggacacccttggcgtggacttcgattctggggaggccaagtcgacagacaacgtgcttccaagaacggtctccgtgcggtcaagcttgaagaagcactgtaacagtatctgccagtttgattcattggatgattttgagaccagccatctagcggggaaatccttcgaattcgagagagtgggcttcctcgatcccctggtgaatatgcacattcccgaaaacgttcagcacaatgcctgtcaatggtctaaagatcaggtgaatctgagtcctaaattgatccagcctggaacctttaccaaaactaaggaagacatcttagagagcaaatcggagcagacaaagagcaagcagcgagatacacaggaacgaaagagggaagagaagagaaaagcgaaccgtaggaaatctaagcggatgagcaagtataaggagaataagagtgaaaacaagaaaactgtgccacaaaagaaaatgcataaatccgtgtcgagcaacgacgcttacaacttcaacctcgaggagggagtgcatttgacccctttccgccagaaggtatccaacgactcaaaccgcgaagagaataacgagtccgaggtgagcctgtgcgagtcttccggtagcggggatgactccgacgacctgtacctccccacctgcaagtacatccagaatccgaccagcaattcagatcgccccgtcacccgtccccttgctaagagggcattgaaatacaccgatgagaaggaaactgaaggctcaaagccgacgaagaccccgacaaccacccctccagagacccagcagagcccacacctgtccctgaaagatatcacaaacgtgagtctataccctgtggtgaagatccgacgcttgtcactgtctccaaaaaaaaataaagcttccccggctgtggccctcccaaagcgaaggtgcacagctagcgtaaactacaaagagcccacccttgcttccaaactgagaagaggagatcccttcacagatctgtgcttcctaaactcgccgattttcaagcagaagaaggatcttcgtaggtcaaaaaaatctatgaaacagatccagtag

SEQ ID NO: 205068 - DNA, 828 bp, synthetic construct
  misc_feature 1..828: note = Description of Artificial Sequence: Synthetic coding sequence
  source 1..828: mol_type = other DNA
atggccaaggagcggtgcctgaagaagagcttccaggacagcctggaagatattaagaaacgcatgaaggagaaaaggaataaaaacctggcagagatcgggaagcggcggtcctttatcgcagcaccttgtcagataataactaacacctcgaccctgctaaagaattatcaggacaataataagatgcttgttctcgctctcgagaacgagaaatcaaaagtcaaggaggctcaggacattatcctccaactgcgaaaggagtgttactatctcacctgtcaactgtacgcactcaaaggcaaactaacctctcagcagacagttgagcccgcccagaatcaggaaatatgttcgtccgggatggaccccaactcggatgatagtagccgaaatcttttcgtgaaagatttgcctcagatccctctggaagaaacagagctgccaggccagggtgagtcttttcagatcgaggaccagatccccaccatcccacaggacacactgggcgtcgacttcgattcagcgactccccctgaaacacaacagtctccccatctttcacttaaagacatcacaaacgtgagcctctatcctgtggtcaaaatacggcggctgagcctgagccccaagaagaacaaggcgtcccccgccgtggctctgcctaagcggaggtgcaccgcctctgtgaactataaagaacccactctcgcgtctaaactgaggcgcggagatccgtttaccgacctgtgtttcctcaattctccaatcttcaagcagaagaaggacttacgacgcagtaagaagtcgatgaagcagatacagtag

SEQ ID NO: 205069 - DNA, 930 bp, synthetic construct
  misc_feature 1..930: note = Description of Artificial Sequence: Synthetic coding sequence
  source 1..930: mol_type = other DNA
atggccaaggagcggtgcctgaagaagagcttccaggacagcctggaggacattaagaagagaatgaaggagaaacgaaataagaacctggccgaaataggaaaacgccggagctttatagctgccccatgtcagatcatcactaatacttccactctgctgaaaaactaccaagacaacaacaaaatgctggtcctagctttagaaaacgagaaatctaaagtgaaggaagcacaggacatcatcctacagctcaggaaggagtgttactacctgacctgccaactttacgccctgaagggcaagcttacttctcagcaaaccgtggaaccggcccagaatcaagaaatatgttcctcaggaatggatcccaacagcgacgatagttcacgaaatctgttcgtgaaggacctgccgcaaattcccctggaagaaacagagctgcctggccagggtgagtctttccagatcgaagatcagattcccacaatcccacaggataccctgggcgtcgatttcgactccgctacaccacccgaaactcaacaaagtccacatctgtctttgaaggatatcaccaatgtgtcactgtaccccgtggtgaaaatcagaagactgtccttaagtccaaagaaaaacaaagccagcccagccgtcgccttacctaagagacgatgtaccgcgtcagtgaattataaagaaccgaccctagcaagtaaattaaggaggggggaccccttcactgacttatgttttctgaatagccctatctttaaacagaagaaagacctgagacgcagcaagaaacgcgccctggaggtatcgcctgccaaggaggctatctttatcctctactacgtgagagagttcgtgtcacgattccccgattgccgaaagtgcaagctggaaactcacatttgtctgcggtag

SEQ ID NO: 205070 - DNA, 1686 bp, synthetic construct
  misc_feature 1..1686: note = Description of Artificial Sequence: Synthetic coding sequence
  source 1..1686: mol_type = other DNA
atggccaaggagcggtgcctgaagaagagcttccaggacagcctggaagatataaagaagcggatgaaggagaagcggaacaaaaatctggctgaaataggcaagcggaggtccttcatcgccgcgccttgccagatcattaccaacaccagcacgctgctgaagaattaccaggataacaacaaaatgctcgtcctcgccttggaaaatgagaagagcaaggtaaaggaggcacaagatattatcttgcagctccgcaaagagtgctattatctcacatgccagctgtacgctttgaaaggaaagcttacttcccagcagacagtagagccggcccagaatcaagagatttgtagtagtggtatggatcccaactctgatgactcctccagaaacctgttcgtgaaggaccttccccagattcccttggaagagacggaattgccaggacagggggagtcctttcaaatcgaggatcaaatacctactatcccgcaggatacccttggagtggacttcgattcgggcgaggccaagagtacagataacgttctgccccggactgtcagtgtccgcagcagcctgaagaagcactgcaatagcatctgccaattcgactcacttgatgactttgagacgtcccacctagccggcaagagtttcgagtttgagcgggtgggcttcctcgaccctctggtgaacatgcacatccctgagaatgtgcagcacaacgcctgtcagtggagcaaggaccaggtcaatttatctccgaaactgatccaaccagggacattcaccaaaacgaaggaagacatcctagagagtaagagcgagcagaccaaatccaagcaacgtgatacccaggagcggaaaagggaggagaagcgtaaggctaacaggcggaagagcaaaagaatgtctaagtacaaggaaaataaatctgagaacaagaagactgtcccccagaaaaaaatgcacaaatcagtctcttccaacgacgcttacaacttcaatctagaagagggggtgcatctcacgccatttcgtcagaaagttagcaatgacagtaatagagaggaaaataacgaatccgaagtcagcctttgtgagtcatctgggagcggggatgatagcgatgatctgtacctgcccacatgcaaatatattcaaaaccctacttccaactccgatcgcccagtgactcgaccgcttgccaaacgggcgctgaagtacaccgacgagaaggagactgaaggatcgaagccaacaaagacacccacaactacaccccctgaaactcaacagtcaccccacctgtccctgaaggacatcaccaacgtgagcctgtacccagtcgtgaagatacgccgcttgagcctgtctcctaagaaaaataaagcctcccctgcagtcgccctgcctaaacgcagatgcaccgcctccgttaactataaagagcccaccctagcgtctaaactgaggcgaggtgatcccttcaccgacctgtgttttctgaacagcccaatattcaagcagaagaaggacctccgaagatctaaaaagagagccttggaagtatcgccagccaaagaagcaatatttatcctatattacgtgagagagtttgtaagtcggttccctgactgtcgcaagtgtaagctcgaaacccatatatgtttgcggtag

SEQ ID NO: 205071 - DNA, 930 bp, synthetic construct
  misc_feature 1..930: note = Description of Artificial Sequence: Synthetic coding sequence
  source 1..930: mol_type = other DNA
atggccaaggagcggtgcctgaagaagagcttccaggacagcctggaggacatcaagaaacggatgaaagagaagagaaataagaacctggccgaaattggtaaaaggaggtcctttatcgccgccccgtgccaaataataactaacacttcaactttactaaaaaactatcaggataataacaaaatgctggttctggccttggagaatgagaaaagcaaagtcaaggaggctcaagatattattctccagcttaggaaagaatgttactacctgacatgtcaactgtatgcacttaagggtaagctgacttcccaacaaactgtagagccagctcaaaaccaagagatttgcagcagcggaatggaccccaattcggatgactcttctcgcaatctgtttgttaaagacctgcctcaaatccccctggaggagacggagctgccagggcaaggtgaatcttttcagatcgaggaccagatccccaccatcccccaggacacgctcggtgtagactttgacagcgctacaccacctgagacacaacagagtccacacttatccttaaaggacattacaaatgtcagcctctaccctgtcgttaaaatacgccgcttgtcattatcacccaaaaagaacaaggccagtcccgctgtggctctgcccaaacgcaggtgcacggctagtgtcaactacaaagaacctactttggcatccaagctgcgccgcggcgatccgtttacagatctgtgttttctcaactccccgatcttcaagcagaagaaagacttgcgccggagtaaaaaacgcgccctcgaggtgtcaccagctaaagaggcaatcttcatcctgtattatgtacgtgaattcgtatctaggtttcctgactgccggaagtgtaaactggagactcatatatgcctgaggtag

SEQ ID NO: 205072 - DNA, 777 bp, synthetic construct
  misc_feature 1..777: note = Description of Artificial Sequence: Synthetic coding sequence
  source 1..777: mol_type = other DNA
atggccaaggagcggtgcctgaagaagagcttccaggacagcctggaggatattaagaaacgcatgaaggaaaagcggaacaagaacctggctgaaattggcaagcggcgctcgtttattgccgcaccatgtcagatcatcaccaacacctctactctgttaaaaaactaccaggataataataaaatgttagtgttggccttagagaacgagaagtccaaggtgaaggaagcgcaggatattatcctgcagttacgcaaggaatgctactatctaacttgccagctgtatgctcttaaaggcaagcttacctcacagcagacggtagagccagcccagaaccaggaaatctgcagctccggcatggaccccaacagcgatgatagctctcgtaacctgtttgttaaggatcttccccagatcccactggaggaaacagagctgccaggccagggcgaatcattccagattgaggctaccccccccgagactcagcagtcgcctcatttatccttgaaggacataactaatgtgagcctgtaccccgtagtgaagatcagaagactgtccttgagccccaaaaaaaataaagcctcaccagccgtcgcattacctaagcgtcggtgcacagcctccgttaactataaagagcctacactggcttcaaaactgaggaggggagatccgtttaccgacctctgcttcctgaacagcccgatttttaagcagaagaaagacctgaggagatcgaagaagtccatgaaacagattcagtag

SEQ ID NO: 205073 - DNA, 828 bp, synthetic construct
  misc_feature 1..828: note = Description of Artificial Sequence: Synthetic coding sequence
  source 1..828: mol_type = other DNA
atggccaaggagcggtgcctgaagaagagcttccaggacagcctggaggacatcaagaagcgaatgaaggagaagagaaacaagaacttagccgaaattggaaagagacggagcttcatcgccgctccgtgtcaaatcataaccaacactagtaccctccttaagaactaccaggacaacaacaaaatgctcgtgctcgctttagagaacgagaagtcgaaggtcaaggaggctcaggatatcatccttcagctgcggaaggagtgctattatctcacatgccagctctacgccctgaaaggcaagctgactagccagcaaaccgtggaacctgctcagaatcaagagatatgcagttctgggatggaccccaactctgacgatagctctcgcaatctgttcgtgaaagacttaccccagattcctctggaggaaacagaattgcctggccaaggagagagcttccagattgaggaccagatccctaccatccctcaggacacgttaggcgttgattttgatagcgccacaccacccgaaactcaacaatctccacacctcagcctgaaagatatcacaaatgtcagtctttacccagttgtcaaaatccggcgcctcagtttatcacctaaaaagaacaaagccagcccagcagtagcacttcctaaaaggcggtgcaccgccagcgttaattataaagagcccactctggcctccaaacttagaaggggtgacccgtttactgacctgtgcttcctcaacagcccaattttcaagcagaagaaggacttgaggcgcagcaagaagagtatgaaacagatccagtag

SEQ ID NO: 205074 - DNA, 777 bp, synthetic construct
  misc_feature 1..777: note = Description of Artificial Sequence: Synthetic coding sequence
  source 1..777: mol_type = other DNA
atggccaaggagcggtgcctgaagaagagcttccaggacagcctggaggatattaaaaagcggatgaaggagaaaagaaacaagaacctcgcagagataggcaagcgccgcagcttcatcgccgcgccatgtcagatcattactaacacatctactctcctcaagaactatcaagataataacaaaatgttggtactggccttggaaaacgagaaaagtaaggtcaaagaggcgcaggacatcatcctgcagctccggaaggagtgctactatctgacctgccagctgtacgcactgaagggaaaattaacttcacagcagacagttgaacccgcacaaaatcaggaaatctgctccagtggaatggatccaaattctgacgatagttcacgcaatctgtttgttaaggacttaccccagatacctctcgaggaaaccgaactgccaggccagggcgaatcctttcagattgaagcaacaccccctgagacacagcagagcccacacctgtctctgaaggacattactaacgtcagcctgtaccccgtggtgaaaattaggagactgtcgctgtcaccaaagaagaacaaagcttcccccgccgtggctttgcccaaaaggcgctgtacagccagcgtgaattacaaagagcccaccttagcaagtaaattgaggaggggcgatccgtttacagatctttgttttttgaatagccccatctttaaacagaaaaaggacctgaggagaagtaagaaatcaatgaaacagatccaatag

SEQ ID NO: 205075 - DNA, 879 bp, synthetic construct
  misc_feature 1..879: note = Description of Artificial Sequence: Synthetic coding sequence
  source 1..879: mol_type = other DNA
atggccaaggagcggtgcctgaagaagagcttccaggacagcctggaggacatcaagaaaagaatgaaagaaaagagaaacaagaatctggctgagatcggcaaaagaaggtccttcatcgcagctccctgtcaaatcatcacgaacacctcaacactgctgaaaaattaccaagacaataacaagatgctcgtgctggctctcgaaaatgagaagagcaaagttaaagaggcacaggacatcatccttcagttacgaaaggagtgctattacctgacctgccagctctacgcactgaagggaaagctgacctctcagcagacagtggaaccagcccaaaatcaagagatctgcagctctggtatggaccctaacagtgatgattccagcagaaacctctttgtcaaggatttgccgcagatccccctggaggagacagagttaccaggccagggagagtctttccagattgaagcaacgcctccagagacacaacagagtccacacctcagcttaaaggacataaccaatgtgagtctgtatccagtcgtgaaaataaggcgactgagtctgtcccctaagaaaaacaaagcttctccagccgttgccctgccgaagcggaggtgcactgcttctgtgaattataaagagcctaccctggctagtaaactcaggcgcggggatccctttactgacctgtgctttttaaactcaccgatatttaaacagaaaaaagatctgaggcgtagtaagaaacgggccctggaggtctcaccagccaaggaggccatcttcatcctttactatgttagagaatttgtcagtcgcttccctgactgcaggaaatgtaaactggagacacatatctgcctgagatag

SEQ ID NO: 205076 - DNA, 3798 bp, synthetic construct
  misc_feature 1..3798: note = Description of Artificial Sequence: Synthetic coding sequence
  source 1..3798: mol_type = other DNA
atggagtgccccgtgatggagaccggcagcctgttcaccagcggcattaaaaggcacttgaaggataagaggattagcaaaacgacgaaactgaatgtctcccttgctagcaaaatcaagaccaaaatattaaataacagttctattttcaaaatcagtctgaagcataataaccgggccctggcgcaggcactgtctcgggagaaagagaattcaagaaggatcactaccgaaaagatgttgctacagaaggaggtggagaagttgaactttgaaaacacctttttaagactgaagcttaacaacttaaataagaagctgatcgacatcgaagcccttatgaacaacaatttgatcaccgccatcgagatgagcagcttatcagaatttcaccaatcctctttcctgctgtccgcttcaaagaagaagcgcatctcaaagcagtgtaagctgatgagactcccttttgcccgggtccctcttacttctaatgatgacgaggatgaggataaggagaaaatgcaatgcgataacaatataaaaagcaagactctccccgatattcccagctccggctctaccacgcaaccacttagtacccaggataatagcgaggtgctgtttctcaaggagaacaaccagaatgtgtatggcctcgacgactcagagcatatctcgagtatagtggacgttccgccaagagagagccacagccattccgatcagtcttctaagacgtccctcatgtcagaaatgaggaatgcccagtctattggccgccggtgggaaaagccctcaccttctaatgttacagagcggaaaaaacgcgggtcatcctgggagagcaacaatctcagcgctgacactccatgtgccaccgtgctggacaagcagcacatctcttcacccgaactgaactgcaacaacgagatcaacggacatacgaacgagacaaacactgagatgcaacgcaataagcaagacctgcccggactgtcttccgagtccgcgcgcgaacccaatgcagagtgtatgaatcagattgaggataacgacgacttccagctccaaaagaccgtgtacgatgccgatatggacctgaccgccagtgaggttagtaaaatcgtgacagtgtccaccgggattaagaagaagtcgaacaagaagaccaacgagcacggaatgaagacttttcgaaaggtcaaagactcctcaagtgaaaagaagcgggaacggtcgaagcggcagtttaaaaactcaagcgacgtggacattggagaaaagattgaaaaccgcacggagaggagcgatgtcctggatggcaaaaggggagccgaggatccaggctttatttttaacaatgaacaactggcgcaaatgaatgagcagctggcccaggtgaacgaacttaaaaagatgactctgcagaccgggtttgaacagggcgacagggaaaatgtgctgtgcaataagaaggagaaaaggattacgaatgaacaggaggagacgtactcactcagccagtcctctgggaagtttcaccaggagagcaaattcgacaagggacagaactccctgacatgtaacaagtcaaaagcgagcagacaaacttttgttatacataaactggagaaggataaccttctcccaaatcagaaggacaaggttaccatctatgagaaccttgatgtaaccaacgagttccacactgccaacctatcaaccaaggacaatggcaacctctgtgactacggcacacacaatatactggatctaaaaaaatatgtcacggacattcagcccagtgagcagaacgaatccaatataaataagctacgcaaaaaagtgaaccgcaaaactgagatcatttctgggatgaatcacatgtacgaggacaacgacaaagatgtagtgcatgggctcaagaagggaaattttttttttaagactcaggaagacaaagagcccatttcagagaatatagaagtatccaaagaactgcaaatccccgccttatccactagggacaatgagaaccaatgcgactatcgcactcagaatgtcctggggctacagaagcagatcactaacatgtatcccgttcagcagaatgagtccaaggtgaacaagaaattacggcaaaaggtgaatcggaaaacagaaatcatttcagaggtgaaccacctggacaacgacaaaagcatcgaatatacagtgaagtcgcacagcttgttcctgactcagaaggataaggagatcatccctggaaacttagaagatccaagcgagttcgagacgcctgccctgagtactaaagattctggaaacctctatgattcggaaatacagaacgtcctgggtgtgaaacacggacacgacatgcagcccgcatgtcagaatgacagtaaaattggcaagaagccgagactgaacgtctgccagaaatccgaaatcatccctgaaactaaccaaatctatgagaatgataataaaggcgtgcatgaccttgaaaaggataactttttttcattgacccctaaagataaagaaacaatcagtgagaatttacaagtgactaacgaatttcagacagtggacctactgattaaagataacggaaacctgtgcgactacgacacccagaacattcttgagctcaagaagtatgttacagacagaaagtcagccgaacagaatgaaagcaaaattaataagctcaggaataaggtgaactggaaaacagaaattatcagcgagatgaaccaaatttacgaggacaatgacaaagatgcacatgttcaggagtcctacactaaggacctagattttaaggtgaacaaaagtaaacagaaactggaatgtcaggacatcattaacaagcattatatggaggtgaattccaacgagaaagaatcttgcgaccaaatacttgattcctacaaagttgtgaaaaaaagaaaaaaggagagctcttgcaaggccaaaaatatcctaacaaaagccaaaaataaactcgcttctcaacttaccgagtcttcccagacatcaataagtctggagtcagatctcaaacatatcacttcagaggcggattcggacccaggcaacccggtggagttgtgcaaaacccaaaaacagagcacgaccaccttaaacaaaaaagatctgccattcgtggaagagattaaagaaggtgaatgccaagtaaagaaagtcaataagatgacctcaaaaagtaagaagcgcaaaaccagcattgacccctctccagagtctcacgaagtgatggagaggatcctggattccgtgcagggcaaatccaccgtgagcgaacaggctgataaagagaacaatctggagaatgagaagatggtcaaaaacaaaccggatttttatacaaaagccttcaggtcgttatcagagatccatagccctaatatccaagactcctcgtttgattccgttcgggaggggctcgtgcccctgtccgtctctagtgggaaaaacgtcatcataaaagagaatttcgctctggaatgctcaccagcttttcaagtcagtgacgacgagcacgaaaaaatgaacaagatgaagtttaaggtcaaccgacgcacccagaagtccggtatcggcgaccgccctctgcaggacctttcgaacacgtcattcgtgtcaaataataccgcagagagcgaaaataagtctgaggacctgtcctcagagcgcacgtctagaagacggcgctgcaccccattttattttaaggagccttctcttcgggataagatgagacggtag

SEQ ID NO: 205077 - DNA, 744 bp, synthetic construct
  misc_feature 1..744: note = Description of Artificial Sequence: Synthetic coding sequence
  source 1..744: mol_type = other DNA
atggagtgccccgtgatggagaccggcagcctgttcaccagcggcattaagaggcacctgaaagacaaacggatcagcaaaactaccaaactgaatgtctcgctggcaagtaagattaaaacaaaaattctgaacaattcgtcaatatttaaaatatccctgaaacataacaatagggctctggcacaagcactgtctagagagaaagagaactcaagacgcatcaccacagaaaaaatgcttctgcagaaagaagttgaaaaactgaatttcgaaaacaccttcctgcgcctgaagctgaacaatctcaataaaaagcttattgatatcgaggctctgatgaataataacttaatcaccgctatcgagatgagctccctctcagagtttcaccagtcatcgtttctgctgtccgcctctaagaaaaagcgaatttccaaacagtgtaaactgatgaggctgccatttgcacgcgtgccactgacgagtaatgacgatgaggacgaagataaagaaaagatgcaatgcgacaacaacataaaaagtaagaccttacccgatatcccttcttctggaagcactacacagcctctcagcacacaggataactctgaggttctgtttttgaaggagaataaccagaacgtttacgggctggacgactctgagcacatctcttccattgtcgatgtgccaccccggggcgagatcgtactgaaaatccacttcgagtacctgtactag

SEQ ID NO: 205078 - DNA, 264 bp, synthetic construct
  misc_feature 1..264: note = Description of Artificial Sequence: Synthetic coding sequence
  source 1..264: mol_type = other DNA
atggagtgccccgtgatggagaccggcagcctgttcaccagcggcatcaagagacacctcaaggacaagcggatatccaaaacaaccaaattgaacgtgagcttagccagtaaaatcaaaaccaaaatacttaataatagctccatcttcaaaatttccctcaaacacaacaatagggcactggcgcaagccctgagcagagagaaggaaaactctcgcagaatcaccaccgagaagatgctgctgcagaaggaagtggaatag

SEQ ID NO: 205079 - DNA, 753 bp, synthetic construct
  misc_feature 1..753: note = Description of Artificial Sequence: Synthetic coding sequence
  source 1..753: mol_type = other DNA
atgagcatcttcacccccaccaaccagatccggctgaccaacgtggccgtggtgaggatgaagcgggcgggcaaaaggtttgagatcgcttgttacaagaataaggtcgtgggatggaggtccggcgttgagaaagacctcgatgaagtcctccagactcactccgtctttgtcaatgtgtcgaagggacaggttgcaaagaaggaggacctgatttctgcattcgggactgacgaccagacagaaatatgtaaacagattctcacaaaaggagaagtccaggtctctgacaaagagcgacacacacagctagaacagatgtttagagatattgctaccattgtggccgacaaatgcgtgaatcccgagaccaagcgcccctataccgtcatcttgattgagcgtgcaatgaaagatattcactattccgtcaaaaccaataagagcaccaagcagcaagcactggaggtgatcaagcagcttaaagagaaaatgaagattgagcgtgcccacatgagactccgattcatccttcctgtcaacgaaggaaaaaaactgaaagaaaagctcaagcccctgattaaagtcatcgaatcggaggactatgggcagcagctggagattgtctgcctgatcgatccggggtgctttagagagatagatgagcttattaagaaggaaaccaagggaaagggatccttggaggtgttaaatctgaaggatgtagaggagggcgatgagaaatttgagtag

SEQ ID NO: 205080 - DNA, 1572 bp, synthetic construct
  misc_feature 1..1572: note = Description of Artificial Sequence: Synthetic coding sequence
  source 1..1572: mol_type = other DNA
atggtggcccccggcctggtgctgggcctggtgctgcccctgatcctctgggcagacagatctgccgggatcgggttccgcttcgcatcttacattaacaatgacatggtccttcagaaagagcccgcaggggccgtgatttggggctttggaacccccggcgcgaccgttacggtcactctgaggcagggccaggagaccataatgaaaaaggtaactagcgttaaggctcacagtgacacatggatggttgtcctcgatcccatgaaaccaggcggcccttttgaagtgatggcgcagcagactctggaaaagattaacttcaccctgcgagtgcacgacgtgctgttcggcgacgtttggctctgcagcggtcaatccaatatgcaaatgacggttctgcagatcttcaacgccacccgcgaactaagtaatacggccgcttaccagagtgtccggattttgtccgtgagccccattcaggcagagcaagaactcgaagatctcgtggccgttgatctccagtggagcaaacctaccagtgaaaacctcggacatggctattttaaatatatgagcgctgtgtgctggctcttcggccgacacctatatgatacactacagtaccccataggtctgattgcaagctcatggggcgggacccctattgaggcctggtcatcaggccgttccctgaaggcgtgtggagtccccaagcagggcagcatcccgtacgactccgtcaccgggccttccaagcacagcgtgctgtggaacgctatgatccaccccctgtgcaatatgactttaaagggggtcgtgtggtaccagggtgagtcaaatattaactataacaccgacctctacaactgtacttttcccgccctgatcgaggattggcgggagacctttcacagaggctcacagggacagactgaaagatttttcccctttggacttgtgcagctgagctctgacttgtccaagaagagttccgatgatggcttcccccagatccgctggcaccagacagcagattttggctacgtgcccaatcctaagatgcctaatacgtttatggctgtggcaatggatttgtgtgaccgagactctcctttcggctcaatccatccacgcgataaacaaaccgtggcctatcgcctccacctaggcgctcgcgccctggcttacggggaaaaaaatcttacatttgaagggcctctgccagaaaagatcgaactgcttgctcataaggggctgcttaatctcacgtactaccagcagatccaagttcagaagaaagacaacaaaattttcgaaatctcatgttgctctgaccatcgctgtaaatggctacctgcctcaatgaataccgtgagcacacaatccctcactctggcaatcgatagctgccatggaactgtggttgcgctacgctatgcctggacgacatggccatgcgaatacaagcagtgccccctttatcacccttccagcgcactgcctgcccctcctttcatcgcctttatcaccgaccaagggccaggccaccagagcaacgttgcgaaatag

SEQ ID NO: 205081 - DNA, 1467 bp, synthetic construct
  misc_feature 1..1467: note = Description of Artificial Sequence: Synthetic coding sequence
  source 1..1467: mol_type = other DNA
atggtgctgcagaaggagcccgccggcgccgtgatctggggcttcgggacgccaggagctacagtgacagtaacactgcggcagggccaagagacaatcatgaagaaggtcacatcggtcaaggcacactccgatacatggatggttgtgctggacccaatgaaacccggggggccgtttgaggtgatggcccagcagacacttgaaaagattaatttcacgctgcgtgtgcacgatgtcctcttcggagacgtgtggctgtgttccggacagtcaaatatgcagatgactgtgctgcagatatttaacgcaacccgagaactgagcaataccgccgcatatcaaagcgtccggattctgtccgtctcgcccatccaagccgaacaggaattagaagatcttgtagctgtcgaccttcagtggtcaaaacccaccagcgaaaacctaggccacggatatttcaagtatatgagtgcagtctgctggctgttcggcaggcatctctacgacacactccagtacccaattggccttatcgctagctcttggggtggtacgcctatagaggcctggagctctgggaggtccttaaaggcctgtggagtacctaagcaagggagtatcccgtacgactcagtcacaggcccctccaagcactccgtgttgtggaacgcgatgattcatcccttgtgtaatatgacactgaagggcgtcgtatggtatcagggtgagagtaacattaattataacaccgatctatataattgtacctttcctgcactgatagaggattggcgggagaccttccaccggggctcccaagggcagacagagagattttttcccttcggcctggtgcagttgagttctgatctgtctaaaaagtcaagtgacgacgggtttccccagatcaggtggcatcagaccgccgattttggctacgtccccaatcctaagatgcctaatacctttatggctgtggccatggacctgtgtgacagagattctcccttcggcagcattcaccctcgggataagcagactgttgcctacagactgcatctgggagctagagcgctggcatacggggagaagaatctgaccttcgagggtcccttgccagaaaaaatcgagctactggctcacaagggccttctcaatttgacgtattatcagcaaatccaggttcagaagaaggataataagatcttcgaaatcagctgttgtagtgaccaccggtgtaaatggctgcccgctagtatgaacaccgttagcacgcaatcgctcacacttgcgattgacagctgtcatgggactgttgtggcgctccggtatgcttggactacatggccctgtgagtataagcaatgtccgctgtaccacccaagctctgcactcccagcgcctccctttattgcttttatcaccgatcaaggcccaggccatcagtccaacgtggcgaagtag

SEQ ID NO: 205082 - DNA, 2094 bp, synthetic construct
  misc_feature 1..2094: note = Description of Artificial Sequence: Synthetic coding sequence
  source 1..2094: mol_type = other DNA
atgctgctgcccctgctgctgagcagcctgctgggcggcagccaggcgatggacgggcgcttttggatccgggtgcaggaaagtgtcatggtacccgaagggttgtgtatttcagtcccctgttccttcagttaccccagacaggattggacaggctctacaccggcctatggatactggttcaaagctgttaccgagacaactaagggagcccccgttgcaaccaatcaccagtcccgggaggttgaaatgagtacgcgaggtagatttcagctgactggcgatcctgcaaagggaaactgctcccttgtgataagagacgcccagatgcaggacgagagccaatacttcttcagagtcgaaaggggctcctacgtaaggtataattttatgaatgatggctttttcttaaaggtgacagcactcactcagaagccggacgtgtacatacctgagaccctggagcctggccagcctgtaaccgttatttgtgtcttcaattgggcttttgaggagtgccctccaccttcattttcttggacaggcgccgcactgtcttcccaaggaacaaagccaaccacatcacacttctctgtgctgagcttcactccacggccacaggatcacaatactgacctgacttgtcacgtcgatttttcaaggaaaggagttagtgctcagagaactgtgcggctgcgtgtggcttatgccccaagagatttggtgatcagcatatcacgagacaatacacccgcattggaacctcagccgcaaggaaacgttccctatctcgaagctcagaaaggacagttcctgcggctgctttgtgctgccgattcccagccaccagctaccctttcgtgggttctacagaatagagtgctgagctcttcccacccctggggaccgaggccactgggccttgagctgccgggcgtcaaagctggagactcaggaagatacacatgcagggccgaaaatcggctaggatctcagcagcgggctctggatctgagcgtccaatacccgccggagaaccttcgggtgatggtgagccaagccaataggacagttttggaaaatctcggcaacggcacttccctgcctgttctagaagggcagtctctgtgtctggtttgcgtcacccattcttcaccaccagctaggctgtcgtggacccagaggggccaggttcttagtccttcgcaaccttccgatcctggcgtattggaactaccacgcgtgcaagtggaacatgagggcgagtttacatgtcacgcccgacaccccttgggatctcagcacgtgtcactgagcctatccgtgcactacagccccaagttgcttgggcccagttgctcctgggaggcagagggtcttcattgtagttgctcatcacaggctagccccgcccctagtctcaggtggtggctgggcgaagaactgttagaggggaattcctcccaagactcatttgaggtcacaccctcctcggctggcccatgggccaacagctccctcagtctacatgggggcctgagcagcggcttgcgccttcgatgtgaggcctggaacgtacacggtgctcagtctggcagtatcttgcagctacccgacaaaaagggcctgatcagcactgctttcagtaatggggcttttttgggcattgggatcactgccctcctctttctctgtctggccctgattattatgaagattttgcccaagcgccgcacccagactgagacacctcgaccacgtttttctaggcatagtacaatactagactacataaatgtggtgcccaccgcagggcccctcgcccagaagcggaatcaaaaagccacgcccaactcccccaggacaccattgcctcctggcgcccctagcccagagtcgaaaaagaatcagaagaagcagtaccaactgccgtccttccctgagcccaagtcctccactcaggctcccgaaagccaggagtcacaggaagagctgcattacgcaaccctgaattttcccggcgtgcgccccagacccgaagctcgcatgcctaagggtacccaggccgattacgccgaggtcaagttccaatag

SEQ ID NO: 205083 - DNA, 1809 bp, synthetic construct
  misc_feature 1..1809: note = Description of Artificial Sequence: Synthetic coding sequence
  source 1..1809: mol_type = other DNA
atgctgctgcccctgctgctgagcagcctgctgggcggcagccaggcaatggacggaagattttggataagagtgcaagaaagtgtcatggtgcctgagggtctctgcatctcagtcccttgctctttttcttaccccaggcaagattggactggcagcacccccgcttatggttattggttcaaagcggtgacggaaactaccaagggcgcccccgtggccacgaatcaccagagtcgcgaagtcgaaatgtccaccagaggccgctttcagctgacaggggatcctgctaaaggtaattgcagtctcgtcattcgtgatgcgcagatgcaggatgaaagccaatacttcttccgggtggaaagaggaagctatgtccgttataatttcatgaacgatgggttcttcctcaaagtgacggctttgactcagaaacccgatgtgtacatccccgaaacacttgaacccggacagccagtcacggtgatctgtgtattcaactgggccttcgaagagtgccccccgcccagtttttcatggacaggagccgccttgtcaagtcagggaacgaagccaacaactagtcactttagcgttttgagcttcacaccccggcctcaggatcataatacagacctgacttgccatgtcgactttagccgcaagggcgtgtccgctcagcgtacggtcaggttacgagtcgcatacgcccccagagatctggtcatatccatcagtcgcgataacacacctgccctggagccacagccacagggcaacgttccatacctggaggcccaaaagggccaatttctcagattgctgtgcgctgccgactcacagccaccagcgactctctcctgggtccttcaaaatagggtgttatctagcagccatccgtggggaccaagacccctaggtctcgagcttccaggggtgaaggcaggggacagcggcaggtatacatgcagggccgaaaatcgacttggcagccaacagcgcgcgttggacctctctgtacagtatcctccagaaaacttgagggtcatggtttcacaagccaaccgaaccgtcttggagaacctgggaaatggcactagcctgcccgtgctcgaggggcaaagcttatgcctggtgtgcgtgacacactccagcccgccggcgagactaagctggacacagcgcggccaggtgctgagccctagtcagccttcagatccaggcgtgctggagttgcctcgcgtgcaggttgaacatgagggcgaattcacgtgccacgcaagacaccccttggggtctcagcatgtgtcgctgtccctgagcgtgcactataagaagggcctgatctccaccgcgttttctaacggagcttttctcggcatcggcatcaccgcactcctctttctgtgtttagcgctgattatcatgaaaatacttcctaagcggagaacacaaacagagaccccacgcccacgcttttcgcgtcactccacaatcctggattatattaatgtagtgccaacggcaggacctctggcacaaaagcggaaccaaaaggcaacccccaacagtcctagaacacccctcccgccaggcgcaccatcaccagagtccaagaaaaaccagaaaaaacagtaccagctcccaagctttcctgaacctaagagctctacacaggctcctgagtcccaagaatcccaggaggagttacattacgcaacactgaattttccaggcgtgcgaccgcgccctgaagcacgtatgcccaaagggactcaagctgattatgccgaagtaaaattccagtag

SEQ ID NO: 205084 - DNA, 2094 bp, synthetic construct
  misc_feature 1..2094: note = Description of Artificial Sequence: Synthetic coding sequence
  source 1..2094: mol_type = other DNA
atgctgctgcccctgctgctgagcagcctgctgggcggcagccaggcgatggacggacgcttctggattcgtgtgcaggagagtgtgatggtaccagagggattatgcatctccgtgccttgctctttctcatatccaaggcaggattggaccgggtcaacaccagcctatggctactggtttaaggccgtaactgagaccacaaaaggcgcaccagtagccacaaaccatcagtcccgggaggtggaaatgtccacacgcggaagattccaactcaccggagatccagcgaaaggaaattgctcacttgtgatccgagatgcccagatgcaggatgagtcccagtacttttttcgggtcgagcgtgggtcgtacgttaggtataatttcatgaatgacggctttttcctgaaggtgacagccctcacacaaaagccagacgtttatatccctgagaccctggaacctggccagccagtaactgtcatttgcgtatttaattgggcatttgaagagtgtccacctcccagcttcagctggacaggggctgcacttagtagccagggaaccaaacctaccacttcacacttctcagtcctttcctttacaccccggccgcaggatcataatacagacctcacatgccacgtagacttttctcggaaaggagtttccgcacaacgcacggtccggctcagagtagcatacgccccaagagacctggtcattagcatttctagagataatacacctgctctggagccccagccccagggaaatgttccttacctggaggcccaaaagggccaatttctcagattgctgtgcgccgccgacagtcaaccacctgctaccctctcttgggtgttgcagaatcgagtcctgtcctcttcacacccatggggaccacgacccctcggcctagagctcccaggcgtgaaagcaggagatagtggccggtacacttgcagagccgaaaacagactgggttcccagcaaagagccctcgatctgagtgtgcagtaccctccggaaaacctgcgtgtcatggtgtctcaggccaacagaaccgtgttggaaaacctgggcaacgggacgagccttccagtcttggagggacaatctctctgcctcgtgtgcgtaactcactcctccccacccgcccgcttatcttggacccagaggggacaggtgctatccccctctcagcctagtgaccctggagtgcttgagctccctagagtgcaggtagaacacgagggagagttcacctgccacgcgcgccatccactgggatcgcagcatgtgagtctgtctctatccgtgcattacagccccaagctgctgggtcccagctgcagctgggaggctgaaggcctccactgtagttgctcttctcaggcctccccagctccttccctgcgttggtggctcggtgaagagctcctggaaggcaactcttcccaagacagcttcgaggtgactccttctagcgcaggaccttgggccaacagctccctgagcctgcacggcggtctgtcctcggggctacggctccgatgcgaggcttggaatgtacatggcgcccagtcaggatccatcctgcagcttccggacaagaaggggctgatctcgacagcgttcagcaacggtgcttttttaggaatcggtatcacagccctgctcttcctgtgcctggccctaattattatgaagattctgcctaagaggagaacacaaacagagaccccgcggccccgattttctaggcatagcaccatcctggattatattaacgtggttccaaccgcggggcctctggcgcagaagcggaatcagaaggctactccaaacagccctcggactcctctgcctcctggggctccctctcctgagagtaagaagaaccagaaaaaacagtaccagctgcccagttttcccgaaccgaagtcctcaacccaggcccctgaaagtcaggaatcccaggaggagctgcattacgctacactgaactttccaggggtccggcctcggccggaggctagaatgccaaaggggacacaagcggattacgccgaagtgaagttccagtag

SEQ ID NO: 205085 - DNA, 1560 bp, synthetic construct
  misc_feature 1..1560: note = Description of Artificial Sequence: Synthetic coding sequence
  source 1..1560: mol_type = other DNA
atgctgctgcccctgctgctgagcagcctgctgggcggcagccaggcaatggatggcagattctggattcgcgttcaggagtcggttatggtgcctgaaggcctctgtatctcagtgccctgctcctttagttacccccgccaggactggacggggtctacgcccgcatacgggtactggtttaaagcagtgaccgagacaactaaaggcgcaccagtggctaccaaccaccagagccgggaagtcgagatgtctacccgtgggcggttccagctgactggagatcctgccaaaggaaattgttccctcgtgattagggatgcccagatgcaggatgaatcccaatactttttcagggtggaacgcggcagctacgtacgatataatttcatgaacgacgggttctttctcaaagttacggcccttacacagaaaactgtgagactcagggtggcttacgcaccaagagacctcgtgatcagcatcagtagggacaatacaccggcgctcgagccacaaccgcaaggcaatgtaccttatttggaagcacagaagggacagttcttaagattgctttgcgccgcagactcccagccacctgctacactgtcttgggtgctccagaaccgcgtccttagctctagccatccatggggaccccggccccttggcctcgagcttcccggggtgaaagcgggagacagcggtaggtacacctgccgggccgagaacagactcggctcccaacagagggctctcgacctttcagtccaataccctcccgaaaacctgagggttatggtcagtcaggcaaaccgaaccgttctagagaacctcggcaacggaacatccctcccggtgcttgagggccagtccctgtgcttggtgtgtgtgacacactcttcacccccagcaaggctgtcctggactcaaaggggacaggtgctgtcaccttcacagccatcagaccccggtgttctggaattaccacgagtgcaagtcgaacatgaaggtgaattcacctgtcatgcgagacaccccctcggcagtcagcacgtgagtctctccttatctgtgcattacaagaaggggcttatctccactgccttcagtaacggggccttcctcggcatcggaatcacggccctacttttcctctgtctagctctaataattatgaagattcttcccaaaaggcggacccaaactgagactccaaggccccggttttcccggcattcaaccatcttggattacatcaatgtggtacctaccgcgggacccctggctcagaaaagaaaccagaaggcgaccccaaatagtcctcggaccccactccctcctggggccccttcccctgagtcaaaaaagaaccagaagaaacagtatcaactcccttcattccccgagcctaagtcctctacccaggcgcctgagagtcaggaatcacaagaggaacttcattatgcaactttgaacttccctggtgtccgcccacggccagaagcccgaatgccaaagggaactcaagcggactatgccgaagtcaaatttcagtag

SEQ ID NO: 205086 - DNA, 1920 bp, synthetic construct
  misc_feature 1..1920: note = Description of Artificial Sequence: Synthetic coding sequence
  source 1..1920: mol_type = other DNA
atgctgctgcccctgctgctgagcagcctgctgggcggcagccaggcaatggacgggagattctggattcgtgttcaggaatctgtgatggtaccagaggggctgtgcatcagtgtcccctgtagcttttcatatcctagacaggattggaccggttctactccagcttacggctactggttcaaagcagtgactgagacaaccaaaggcgcgccggtcgcgactaatcatcagtctcgcgaggtggagatgtcaacacgcggtcgtttccagctcacgggcgatccggccaagggcaattgtagcctggtaattagggatgcacagatgcaggatgagtctcagtacttttttagggtggagaggggctcttatgtcaggtataactttatgaatgatgggttctttctgaaagtgacagtcttaagtttcacaccgagaccacaggaccacaacacggacttaacctgtcatgtggacttctcacgcaagggcgtctccgcacagaggactgtaagactgagagtggcatatgctcctagagacctggtcatctcgatctcacgcgataatacccccgctttggaaccacagccccagggcaacgtaccctatttggaagcccagaaggggcaatttctgcggttgctatgcgctgccgattcacaaccaccggccactctgtcgtgggtgctgcagaacagagtcctgagttcttctcacccctggggtcctagaccattggggctggaacttccaggcgtgaaggctggcgactctgggaggtacacttgtcgggcagaaaatcgcctgggtagtcagcagcgggcactggatctctctgtgcagtatccccctgagaatctgcgagttatggtctctcaggccaacagaaccgtactggagaatctcggcaatggcacctccctcccggtcctggagggccagtcgctgtgcttggtgtgtgtcacccactcttcccctccagctcgtctatcttggacccagagggggcaggtactttccccttcccaaccctccgaccctggggtcctggaactccctcgcgttcaggtcgaacacgagggcgaatttacatgccatgctaggcatcctctaggatcacaacacgtgtctttgtctctctcggtgcattacagccccaagctgctggggccgtcatgctcttgggaagcagaagggcttcattgttcatgctcgagccaagcctcgcctgccccgtctcttagatggtggctgggggaggagctgctggagggtaacagttctcaagattcatttgaagtaactccaagttctgctggcccttgggcgaatagctctctgtctctacatggaggcttatcttcaggacttcgcctgaggtgtgaagcctggaacgtccatggtgcccagagtggctcaatcctacagctccccgacaagaagggcctcatctctacagcctttagcaacggcgccttcctgggcatagggattacagcactcctcttcttatgcttggcactgattatcatgaagatattaccgaaaagaaggacccagacggagacccctcggcctaggttctcccggcatagtacaattctggactacattaatgtcgtgcctaccgccgggcccctggctcagaaacgcaatcagaaagcgaccccaaattcgccgcggaccccactgcccccaggcgctccgtcacccgagtctaagaagaatcagaagaagcaatatcagcttccatcctttcccgagcctaagtcatccacacaggcaccagaatctcaggagtcacaagaagagttacattacgccacgctgaactttccaggcgtccgaccacgacccgaggcaaggatgccaaagggcactcaggctgactatgccgaagtcaaatttcaatag

SEQ ID NO: 205087 - DNA, 1635 bp, synthetic construct
  misc_feature 1..1635: note = Description of Artificial Sequence: Synthetic coding sequence
  source 1..1635: mol_type = other DNA
atgctgctgcccctgctgctgagcagcctgctgggcggcagccaggcgatggacggccgattttggataagggtccaggagtctgtcatggtgcctgaaggtctctgcatcagcgttccatgctcattttcttacccgcggcaggattggacagggagtactcccgcttatggctactggttcaaggctgtcaccgagaccaccaaaggggcgcctgtggctaccaaccatcaatccagagaggtggagatgagtaccagaggccgctttcaactgaccggcgatccagcgaaggggaattgctctttagtaatccgagatgcccagatgcaagatgagagtcagtatttctttcgtgtggaacgcggcagttacgtgagatataattttatgaatgatggattctttctgaaggtgaccgtcctcagtttcacacctcggccccaggatcataatacagacttgacttgccacgtggatttcagtagaaagggcgtgtcagctcagcggacagtcagactgagggtagcttatgcaccacgggacctagtgatctccatcagccgcgacaatacacctgcgttggagcctcagccccaaggcaacgtgccatatctggaagctcaaaaaggccagtttctgcgattgctctgtgctgcggattcccaacccccagccaccctctcatgggttctccagaatcgggtcctgagctcctcacacccatggggcccacgaccgttgggtctggagctgcccggagtgaaagcgggcgatagcggacggtacacctgcagagccgagaacaggttaggctctcagcagagggctcttgacctctctgtgcagtatcctccagaaaatctgagggtaatggtgagccaggccaatcggacggttctggagaatttgggcaacggaacctccctgccagtcctcgagggccagtccctgtgcctggtatgtgtgacccattcaagccctcccgctcgcctttcatggactcagcgtggccaggttctaagcccatcgcagccctcagatccaggtgtactggagctgcccagggtgcaggtggaacacgagggcgaattcacttgtcacgcaaggcaccccctgggctcccaacacgtgagtctcagcctgtcagttcactataagaaagggctgattagcactgctttctcaaatggagccttccttggtatcggcattaccgcattgctcttcttatgcctggccctgatcatcatgaagattctgccgaaaaggcggacacagaccgagacaccccgcccgcgctttagccgccattccaccatcctggactatatcaacgtagtccccaccgcagggcccttagcgcaaaaacggaatcagaaagccacacctaatagtccaaggacccctctgcctcctggagctccctccccggaatccaagaaaaatcagaagaagcaatatcaactgccaagctttccagaacccaaatcctcaactcaggcaccagaatctcaggaatcccaagaggaactacattacgccaccctcaattttcccggcgtgcgcccccgccctgaggcccgcatgcccaaggggacccaggctgattatgccgaggtgaaatttcagtag

SEQ ID NO: 205088 - DNA, 1365 bp, synthetic construct
  misc_feature 1..1365: note = Description of Artificial Sequence: Synthetic coding sequence
  source 1..1365: mol_type = other DNA
atgctgctgcccctgctgctgagcagcctgctgggcggcagccaggcaatggacggcagattttggatccgcgtccaagagagtgtgatggtgcctgaaggattgtgtataagcgtcccgtgttcgttttcctaccccaggcaggattggaccgggtcaacacctgcttatgggtactggttcaaggcagtgactgagactacgaaaggagcgcccgtggccaccaatcaccaaagcagggaagtagagatgagcacaagaggtcgcttccaacttacaggagacccagcaaagggcaattgttctctggtcattcgagacgcacaaatgcaggacgaatcccagtattttttcagggtcgagaggggctcttacgtgcggtacaacttcatgaacgacgggttcttcctcaaggttacagttctctcctttacgccacggcctcaggaccataacacagatctgacttgccatgtggatttctcgaggaaaggtgtgtcagctcagcgtaccgtgcgccttcgagtggcgtacgccccccgggatctcgtcatctccatcagccgggacaatacccccgaccctcctgagaatctgagagtcatggtgagtcaggcgaaccggacagtcttggagaacctgggcaatggcacaagtctaccagttttagagggtcagagcttgtgtctggtctgcgttacccattccagtcccccagcccgtctgtcttggactcagcgtgggcaagttctgtctccttcccagcccagcgatcccggcgtgttggaacttcctagggtccaagtggaacacgagggtgagtttacatgtcatgcacggcaccccctgggctcacaacacgtcagtctctccttgtccgtgcattacaagaagggcttaatctctaccgcttttagtaatggcgctttccttgggataggaatcactgccctgttgttcctgtgtctggcccttatcatcatgaagattctccccaaaagaaggacacagactgaaactccacgccctaggttctctagacactctacaatcctggattacatcaatgtggtccccaccgccggcccactcgcgcaaaagagaaatcagaaggccacacccaatagcccaagaactccactgcccccgggcgccccctctccagagagcaagaagaaccagaaaaagcagtaccagctgccctcctttcccgaacctaaatcctcgacacaggcacccgaatcgcaggaaagtcaggaggaacttcactatgcaactttaaactttccgggtgtcaggccgcggcctgaggccaggatgcctaagggaacccaggccgattatgctgaggtaaaattccagtag

SEQ ID NO: 205089 - DNA, 1665 bp, synthetic construct
  misc_feature 1..1665: note = Description of Artificial Sequence: Synthetic coding sequence
  source 1..1665: mol_type = other DNA
atgctgctgcccctgctgctgagcagcctgctgggcggcagccaggcaatggacggacgtttctggatccgggttcaagagtccgtgatggtgcctgaggggctttgtatttctgtaccatgttcattctcctatcccaggcaggactggacaggcagcacccccgcctatggatattggttcaaggccgtcacagagaccacgaaaggcgcacccgtcgccactaatcaccagtctagggaagtggagatgagtacccggggtaggtttcagctcactggggaccctgccaaagggaattgcagcttggtgatccgcgacgcccagatgcaggacgaatcacagtatttcttccgtgtagagagggggtcttacgtgcgctacaacttcatgaatgatggctttttcctgaaagtcactggcaccaaaccgaccacttcacacttctctgttctttcttttacaccaagacctcaggaccacaatacagacctaacctgtcatgtggatttctcccgtaagggggtgtccgcccaacggaccgtcaggctgcgagtcgcttatgcccctcgtgatttagtgatttcaatttcgagagataatacaccagcgctggagcctcaacctcagggcaacgtgccatacctagaggcccagaaaggccagttcctccgactgttgtgcgcagctgattctcagcccccagctaccctgtcctgggtattgcagaatcgcgtgctctcgagtagtcacccttggggacctaggccccttggcctggaactgccgggtgtcaaggcaggggattccggcaggtacacctgtcgtgccgaaaacaggttgggatcccagcaaagggccttagacctctcagtgcaataccctccagagaatctgcgggtaatggtttcccaagcgaatagaactgtgctggaaaatttggggaatgggacctcattaccagtcctggaaggtcaaagcctgtgtctggtttgtgtaacccacagctcaccccctgccagactgagctggacccaaaggggacaggtgctctcccctagccagcctagtgatccaggggtgctagaacttcctagggtgcaggttgagcatgagggcgaattcacttgccatgcacgtcatccactcggcagccagcatgtgagcttgtccctgagcgtccactacaagaaaggactgatatccaccgcatttagtaatggggcctttctgggcatcggtatcaccgctctgctcttcctgtgtctggctctaatcatcatgaaaatcctgccgaaacggcggactcagacggagaccccaagaccacgattcagtaggcactctaccattctggattacataaatgtggtgcccactgcagggccactcgcccagaagcgcaaccagaaagccacacccaactccccgcgaacccccctgcctccgggtgccccatcccccgaatctaagaagaatcaaaaaaaacaatatcagcttccatcctttccggagccgaagtctagtactcaagcccccgaatcacaggagtctcaggaggagctgcactatgcgacattaaactttcccggcgtgaggccaaggcctgaagcacgcatgcccaaggggacccaagcagattacgctgaggtcaagttccagtag

SEQ ID NO: 205090 - DNA, 2097 bp, synthetic construct
  misc_feature 1..2097: note = Description of Artificial Sequence: Synthetic coding sequence
  source 1..2097: mol_type = other DNA
atggtgcccggccaggcccagccccagagccccgagatgctgctgctacctctcctcctcccggtgctaggtgcaggaagcctgaacaaggacccttcatactcacttcaagtccaacggcaggtcccggtaccggaaggcctttgtgtgatagtttcttgtaatctgagctacccccgcgatggatgggacgagagtacagctgcgtatggatactggttcaaggggcgcacatcccccaaaacaggggcccccgttgctacaaataatcagtctcgcgaggtggagatgtcaacacgggaccggtttcagcttacgggagacccaggaaagggaagttgcagtttggtgattcgcgatgcccagcgggaggacgaagcgtggtatttcttcagggtggagcggggttcaagggtcagacactcgtttttgagcaatgccttcttccttaaggtgactgcactcacaaagaaacctgatgtgtatatcccagagacactggagcctggccaaccggtcaccgtgatttgtgtgttcaactgggcttttaagaagtgtcccgcaccatcattcagttggaccggcgccgcactcagtccaaggagaacaagaccttctacttcccacttcagcgtcctgtccttcacaccctctccccaggatcatgatactgacctcacttgccacgtcgactttagcaggaagggggtgagcgcacagcgcacagtcaggctccgcgttgcatacgctccaaaggatctgattatttctatttcccacgataacacctccgcgttggaactccagggcaatgtgatctacctcgaagtgcaaaagggtcagttcctacggctgctgtgtgccgcagattcccaacctccggctacactatcctgggttctgcaggacagggttttatctagcagtcatccatggggtccacggactttgggcctcgagctccgcggtgtgagggcaggagatagcggtcgctacacttgccgggctgagaacaggctgggaagtcagcagcaagcgctggatttatccgttcagtacccccccgagaacctccgggttatggtatcacaagccaatcggaccgtgctggagaacttgggaaacggcacatctcttccggtcctggaaggacaaagcttacggctcgtttgcgtaacccactctagcccccctgctaggctcagctggacccgctgggggcagacagtcggtccgtcccagcctagtgatcctggagtgctggagcttcctccaatacaaatggagcacgagggggagtttacttgtcacgcgcagcatccgctggggagtcaacacgtctcactatcgctgtccgtgcattatccacctcagctgctcgggcccagttgcagctgggaagccgagggcctgcactgtagctgttcctcccaagctagccctgcccctagtttaaggtggtggttgggagaggagttgctggaaggaaattcatctcaggggtcctttgaagtcacgccgtctagcgccggaccctgggccaacagcagcttgagtcttcacggcggactgagttccggcctccggctcaggtgcaaggcctggaacgtgcatggcgctcagagcggatctgtgttccagctgctgccagggaagcttgagcacggtggaggcttgggactaggggccgctctcggagccggcgtggcagcactgttggccttttgttcatgcctggtggtcttcagggtcaagatttgcaggaaagaggcaagaaagcgtgctgcagccgagcaggacgtgccatccaccctgggacctatcagccagggacatcagcacgaatgctctgccgggagttcccaagatcaccccccacccggagcggctacctatacaccaggaaaaggcgaagaacaggaattgcactatgcaagcctctcattccagggacttagactctgggagcctgccgaccaagaggccccatctacaacggaatattctgaaatcaaaattcacacaggccaacccctcagggggccaggctttggactgcagctggaaagagagatgagcgggatggtgcctaagtag

SEQ ID NO: 205091 - DNA, 1809 bp, synthetic construct
  misc_feature 1..1809: note = Description of Artificial Sequence: Synthetic coding sequence
  source 1..1809: mol_type = other DNA
atggtgcccggccaggcccagccccagagccccgagatgctgctgctgcccctgctgttgccagtgctgggcgccggaagcctcaacaaggacccatcatattccctccaggtacagcgccaagttccagtgccagaagggttgtgtgtgattgtcagctgtaacttaagttaccctagagatggttgggacgagtctactgccgcctacggatactggttcaaaggacgcacttcgccgaaaactggagcacctgtcgcaactaacaatcagagccgcgaggtcgagatgagtactagggacaggttccagctgaccggcgaccccggaaagggttcttgttcacttgtcatacgggacgcgcagcgggaagacgaagcttggtatttctttagggtcgagagggggagcagggtgagacatagctttctgagcaacgctttcttccttaaagtcacggcgctgacgaagaagccagacgtttacattccagagactctcgagcctggccagccagtgaccgtgatctgcgtgtttaactgggccttcaagaaatgccccgccccttccttttcatggacgggcgccgccttgagtcctcggcgtactcgtccttctacaagccatttcagtgtgttgagcttcactccttctcctcaggatcatgatacggatctgacatgccacgtcgacttctcccggaagggagtcagcgctcagcggaccgtcaggttgcgcgtggcttacgccccgaaggacctgataatttccatctcccacgataataccagcgcactggaactgcaaggaaatgtgatttacctggaagtgcagaaaggtcagtttctgcggcttctttgtgccgccgactcacagcccccagccactctgtcatgggtgctgcaagatagggtgcttagcagtagccacccatggggccccagaaccctgggcctggaattgcgaggcgtccgagcgggtgactccggcaggtatacgtgtagagccgagaatcggctggggtcgcagcagcaagcactagatctctctgtccaataccccccagagaatctgcgcgtgatggtgtcacaagccaaccggactgttctcgagaaccttggaaacggaacgtctcttcctgtgttggaaggccaatccctgcggttagtatgtgtgacacatagttcacctcccgctcgcctctcctggacaagatgggggcagacagtgggtccaagccagccatcagaccccggagtgctcgaacttccacccatccagatggaacatgaaggtgaattcacttgccacgcacagcacccattagggtctcagcatgtgtccctttctctgagtgtccactggaaactggagcatggaggaggcttgggcttaggcgccgctttgggtgcaggggtagctgcactgctggccttctgcagttgcttagtggtgtttcgcgtcaaaatttgtcgcaaggaggcgcgaaagcgggccgccgccgaacaggatgtacccagcactctcggacccatttcccaaggacaccagcatgaatgtagtgccggcagtagtcaagatcacccccctccgggcgctgcgacttacacaccaggcaaaggtgaggaacaggaactccattatgcctcattgagctttcagggactgagactgtgggagccggcagaccaggaagcgccttcgacgaccgagtacagcgagattaaaatccacaccgggcagcccctgagagggcccggctttggcctgcagctggagagagagatgtcggggatggtcccaaaatag

SEQ ID NO: 205092 - DNA, 1809 bp, synthetic construct
  misc_feature 1..1809: note = Description of Artificial Sequence: Synthetic coding sequence
  source 1..1809: mol_type = other DNA
atggtgcccggccaggcccagccccagagccccgagatgctgctgttgcctctactactgcccgtgctcggagcaggctctctgaacaaagatccaagttattctctccaggtacagcgtcaggtgcctgtacccgaagggctgtgtgttattgtctcctgcaacctctcctacccacgtgatggctgggacgagagcaccgccgcctatggctactggtttaaaggccggacctcacctaagaccggcgctcctgtggccaccaataaccagtccagggaggttgagatgtcgactcgggacaggtttcaactgaccggcgacccagggaagggctcttgtagtctggtgatccgtgacgcccagagggaggacgaggcatggtatttcttcagggtagaacgaggctcacgagtcagacactcttttctatccaacgctttctttttaaaggtgacagctttaaccaagaaaccagatgtgtacatcccagaaacactggagcctgggcaacctgtcaccgtgatatgcgtctttaactgggctttcaagaaatgccctgccccatctttttcctggaccggtgccgcgttaagtccacggagaacccgcccaagtacctctcacttctctgttctgagttttactcccagtccccaggaccatgatacagacctgacctgccacgtggacttttcccgcaaaggcgtaagcgcgcagcgcacagtgagactgagagtcgcatatgctcccaaggacctgatcattagcattagccacgacaacacatcagccttggaactccagggcaatgttatctatcttgaggttcagaagggccagttccttaggctcctctgcgctgctgactcccagcctcccgccacgctgtcctgggtgctccaggatagagtgctttcatcaagccacccatggggaccccgtacattgggactggaactgaggggcgtgcgcgctggggattcagggagatacacatgcagagccgaaaatcgattaggatcccaacaacaggcactcgacctatccgttcagtatccgccagaaaacctgcgtgtcatggtctcacaagccaatcggactgtcctggaaaatctggggaacggcaccagcctcccagtcctggagggacagagcctccgactcgtgtgcgtgacacattcctctccaccggcccggctgagttggaccaggtggggccagacagtggggcccagccagccctctgaccccggagttctggaactgcctccgatacagatggagcacgagggcgagttcacctgccacgcacaacaccccctgggatcccaacacgtcagtctgtcactgagcgtgcactggaagctggaacacggaggaggcctgggcctgggggccgccttgggggcaggcgtcgcagccctattagccttttgtagctgcctcgtagtctttcgagtcaagatctgcaggaaagaagcccgtaagcgtgcggcagcggaacaggacgtgccatctaccctgggtccaatctcacaaggacaccagcacgaatgttcagcaggctcatcccaggaccacccaccacccggcgctgccacttacacccccggcaagggggaagagcaggaacttcactacgccagtttgagctttcagggcctgcggctctgggagccagctgatcaggaggcccccagcactaccgagtattctgaaatcaagatccatacaggacagcccctgagaggccctggtttcgggctacagcttgagcgcgaaatgtctgggatggtccccaaatag

SEQ ID NO: 205093 - DNA, 1788 bp, synthetic construct
  misc_feature 1..1788: note = Description of Artificial Sequence: Synthetic coding sequence
  source 1..1788: mol_type = other DNA
atgctgctgctgctgctgctgctgccccccctgctgtgcggccgggtcggtgctaaggaacagaaagactacctcttgacaatgcagaaatctgtgactgtacaagaggggttgtgcgtcagcgtattgtgtagcttttcatacccccaaaacggatggactgccagcgatccagtgcacgggtactggttccgtgcaggcgatcatgtttccagaaatatcccagtagccacaaataatcccgccagagccgttcaggaggaaacccgggatagatttcacctgttgggcgacccccagaacaaggactgcacactgtcaatcagggacacacgtgaatcagacgccggcacatacgtgttttgcgtggagcgcggtaatatgaaatggaattataagtacgatcagctgtctgtcaatgtgaccgcgtctcaagatctgttaagccggtataggctggaagtgcccgaatccgtcaccgtccaggagggactatgcgtctctgtgccttgttcagtcctgtatccgcactataactggaccgccagtagtcccgtgtacggaagttggttcaaggagggcgccgacattccttgggatataccagtcgcaactaatacaccaagcggaaaagtccaggaagacactcacgggcggtttctgctgcttggggacccccagaccaacaactgcagtttgtctatccgggatgctagaaagggggatagcggcaaatactattttcaggtggagcgtggcagccggaagtggaactacatatacgacaagctctcagtgcatgtgaccgcactgactcacatgcctacattcagcatacccgggacactggagtcaggacaccctagaaatctgacgtgcagcgtcccttgggcctgtgagcaggggacccctcccaccattacctggatgggcgcttcagtttctagtttagaccccaccatcaccaggagcagtatgctgtctctgattccacaacctcaggaccatggcacaagtctcacttgccaggtgacactaccgggcgctggcgtaacgatgactcgggctgtgagactgaacatctcttaccctccccagaacctgacgatgaccgttttccagggggacggcactgcaagtaccacacttcggaacggtagtgcgctgagcgtgctagagggccagtccctccatctcgtttgtgcggtggacagcaaccctccagcgagactctcctggacctgggggtctctgaccctgagcccaagccagagctctaatctcggggtcctggagctcccccgtgtccatgttaaagacgaaggggaattcacatgcagagctcagaacccgttggggtcacagcacattagcttgtccctgtcactgcagaacgagtataccggcaaaatgagacccatttccggggtgaccttgggtgcattcgggggagccggggcgaccgcattggtgtttttatacttctgcatcattttcgttgttgtgagatcttgtcgcaagaaatctgctcgacccgcagttggggtcggcgatactggcatggaggacgctaatgccgtccgcggcagcgcaagccaaggcccgttaatagaatcgcccgcggatgactcacccccacatcatgccccgcccgccctcgccactccaagccctgaggaaggtgaaatccagtacgcttctctgtcatttcataaggccagaccccaatatccacaggagcaggaggcgatcggctacgagtatagcgagattaacattcctaagtag

SEQ ID NO: 205094 - DNA, 1290 bp, synthetic construct
  misc_feature 1..1290: note = Description of Artificial Sequence: Synthetic coding sequence
  source 1..1290: mol_type = other DNA
atgcccctgtgccggcccgagcacctgatgccccgggccagccgggtccccgtcgctgcaagcctaccactctcccacgccgtcatcccgacccaactgcccagccgacctggtcaccgcccacccggtagaccaagacgttgcccgaaggcctcttgcctgcccccgcctgtggggccctcctccactcagacagctaagcgcgttactatgggatggcccagaccaggaagagcattggtggcagtgaaggcactcctggtgctctctctgctgcaggtgccagcgcaggcggtggtcagagcggtactggaggataatagctccagcgtggactttgcagacctacccgccctgtttggagtgcctttggcaccggaggggatccgaggttaccttatggaggtcaaacctgcgaacgcttgtcatccaatagaagcccccagattaggaaatcgaagcctcggagccatcgtcctgatccgccgatacgactgtacttttgacctgaaagtactgaacgcacagagggctggctttgaagctgcaattgtgcacaatgtacactctgatgatcttgtctcaatgactcatgtgtacgaggatcttagagggcaaatagcaatcccatccgtctttgtttcagaagccgcatcacaggaccttcgggttatcctgggatgcaataagagtgcacacgctctgctgctgccggacgaccctccttgtcatgatctgggctgtcatcctgttctgacagtctcatgggtgctcggatgtacacttgctttggttgtaagcgccttctttgtgctgaatcacctgtggctgtgggcacaggcatgctgttctcaccgaagacccgtcaaaaccagcacttgtcagaaagcccaggtgagaactttcacatggcacaatgatctgtgtgctatttgcctggatgaatacgaggagggagatcagcttaagatcctgccctgttctcacacttaccactgtaaatgtatagacccatggttttctcaggcccctcggagaagttgccccgtgtgcaagcagagtgtggctgcaacagaggacagtttcgactccactacgtactcctttcgtgacgaggatccaagcttgcctggccataggcctccgatttgggcaatacaagtacagctaaggtccaggcgtcttgaactgttagggcgggcgagcccccattgtcactgctcaaccacctctctcgaggctgagtacaccacggtcagctcagctccccctgaggctcctgggcagtag

SEQ ID NO: 205095 - DNA, 1656 bp, synthetic construct
  misc_feature 1..1656: note = Description of Artificial Sequence: Synthetic coding sequence
  source 1..1656: mol_type = other DNA
atgctgcccctgctgctgctgcccctgctgtggggcggcagcctgcaggaaaaaccagtgtacgagctgcaggtgcaaaaaagtgttaccgtacaggagggcttatgtgttcttgtgccgtgttccttctcttacccatggcggagttggtactcatcccctcctctgtatgtctattggttccgcgatggggagattccatactatgcagaagtcgtcgccacaaacaacccggacaggagggtgaaaccagagactcaggggcgattcagactactcggcgacgtgcaaaaaaagaattgtagtttatcaattggcgacgccaggatggaagacactgggtcttactttttcagagtggagcgaggaagagacgtcaagtactcctatcagcagaataagctgaacctggaggtaacagctctgattgaaaagcccgatattcatttcctcgaacctctcgagagcggaaggcccacacggttaagttgtagcctccccggttcttgtgaagccgggccgccattgaccttttcttggaccggcaatgctctcagccctctcgacccggagactactcgaagtagtgaattaactctaacaccacggcccgaggaccacggaaccaatctgacttgtcagatgaaaaggcagggagctcaggttaccaccgagcgtaccgttcaacttaacgtatcctatgccccacagaccataactatatttcggaatggtatagcgcttgagattctccagaacactagctacttgcccgttctcgagggccaagctttaagactgctctgtgatgcgccatccaatcctccagcccacctgtcatggttccaaggttcacccgcccttaatgcaacccctatctctaacaccgggattctcgaactgcggcgagtacgttccgctgaggagggtggctttacctgtcgcgcacagcatcccctagggtttctgcagatctttctgaacctgagcgtgtacagcctgccacagttgcttggaccaagctgtagttgggaagctgaggggttacattgcagatgttcctttagggcccgcccggcaccatcactgtgttggaggctagaggaaaagccactagagggcaatagctcgcaggggtcttttaaggtgaattccagcagcgccggaccatgggcgaactcgagtctcattctgcatggaggtctgtcaagcgacctaaaagtgagttgtaaggcttggaacatctacgggtcacagtcgggttcagtcctgctgctgcaggggcgctcaaatttaggtactggggtggtgccagccgctctcggcggtgctggcgtgatggccttgctgtgcatttgtctatgtctgattttcttccttatcgttaaggctagacgaaagcaggcggcaggcaggccggaaaagatggatgatgaagatcctatcatgggtaccatcactagcggtagccggaagaagccctggcccgattcacccggcgaccaggcttctccacctggcgatgcgccaccgctggaggagcaaaaggaactgcactacgcaagtctctctttttctgagatgaaaagtcgggaacccaaggatcaagaggcccccagtacaactgaatattctgaaatcaaaactagcaaatag

SEQ ID NO: 205096 - DNA, 1062 bp, synthetic construct
  misc_feature 1..1062: note = Description of Artificial Sequence: Synthetic coding sequence
  source 1..1062: mol_type = other DNA
atgcagggcgcccaggaggccagcgccagcgagatgctgcccctgttgctcccactgctctgggccggcgctttggctcaggagagacggttccaactggaaggccctgaatctctcaccgtgcaagaaggcctgtgcgtgttggtgccctgcaggcttccaactacgttacctgcaagctattacgggtatgggtactggttcctggagggcgctgatgtgccggtcgcaactaatgatcctgatgaggaggttcaggaggaaactagaggaagatttcacttgttgtgggacccacgacgtaagaactgtagtctctcgattcgtgacgctcggcggcgtgataatgctgcatacttttttcggctaaagagcaaatggatgaaatatggctacacaagtagtaagctatctgtcagggttatggccctcacccaccggcctaacattagtattccaggcacacttgagagcggacatccctccaatctcacctgctcagttccttgggtgtgcgagcaagggacgccccctatatttagctggatgagcgctgccccgacctccctagggcctcgcacaactcagtctagtgtcctgacgattactccacgcccccaggaccattctaccaacctcacttgtcaggtcacatttcctggagctggagtaacaatggagcggacaatccagcttaacgtttcttatgcccctcagaaggtcgcgatttcgatctttcaggggaattccgccgcttttaaaattcttcagaatacctcgagcctgcctgtcctggaaggccaggccctaagactgttatgtgatgcggacgggaatccgccagcacacctctcttggttccagggattcccagcattgaacgccactccaattagcaacacaggggtgctcgagttgccccaggtgggcagtgccgaggagggcgattttacgtgccgcgcccaacaccccctgggcagtctgcagatttcactgagtctgttcgtccattggagtagcgctcctgttcccgaccgacactctttccggccaccctgctag

SEQ ID NO: 205097 - DNA, 1281 bp, synthetic construct
  misc_feature 1..1281: note = Description of Artificial Sequence: Synthetic coding sequence
  source 1..1281: mol_type = other DNA
atgctgcccctgctgctgcccctgctgtgggccggcgccctggcccaagaaaggaggtttcagctggaggggccggagagcttgacagtccaagagggactgtgcgtgttggtgccatgtcgcctacctaccaccttaccggcctcgtactatggatacggatactggtttctggagggcgcagatgtgcctgtggctacaaatgatccagatgaggaggttcaggaagagacacgtggaaggttccacctgctctgggatccacgcaggaagaattgctccttatcaattcgggacgctagacggagagataacgcagcatattttttcagattaaaaagcaagtggatgaagtacggatacacttcttctaagctatccgtaagggtcatggctctgacacatcgacctaatatatcgattccggggaccctagagagtggccacccttcaaacttaacgtgttctgtgccttgggtgtgtgaacagggaaccccacctatcttcagttggatgtccgccgcccccacctcgctgggacccaggacaacacagtcatctgtgctgactataactcctaggccacaagatcacagcaccaatctaacctgccaggtcacttttcctggggctggggtgactatggaaagaacaattcagctgaatgtatcctcgtttaaaatccttcagaacacgtcaagcctgcccgtcctggagggtcaggcacttcgtctcctctgcgatgctgatggaaatcccccagctcatctgagctggtttcaggggttccccgcccttaatgccacccccatctccaacactggcgtgctagagctgccacaggtcggtagtgccgaggagggggatttcacttgtagagcacagcaccctttagggtctctgcaaatctctctctcattatttgttcactggaaacccgaaggccgggctggcggggtccttggggccgtctggggcgcctctatcaccaccctggtgtttctgtgcgtgtgctttatttttagagtcaaaacaaggcgtaagaaagcggctcagcctgtacagaacactgatgatgtaaatccagtcatggtttccggtagtcgaggacatcaacatcaatttcagaccggcatcgtttcagaccacccagctgaggccggccctatctctgaagatgaacaggaattacactacgccgttctgcacttccataaggtacagccgcaggaacctaaggtcactgataccgagtacagtgaaatcaaaatccacaagtag

SEQ ID NO: 205098 - DNA, 1314 bp, synthetic construct
  misc_feature 1..1314: note = Description of Artificial Sequence: Synthetic coding sequence
  source 1..1314: mol_type = other DNA
atgcagggcgcccaggaggccagcgccagcgagatgctgcccctgcttctaccacttctgtgggcgggcgcattggcccaggagcgcagattccagctagagggccctgaaagcttgactgtgcaggaggggctctgcgtgctcgttccatgtagattgcctacaacactcccagcgagctactacggctatgggtattggttcttggagggggccgacgtgcctgtggcaacaaatgatccagacgaggaggtgcaggaagaaacacgggggcgatttcacctgctttgggacccccgaaggaagaattgcagcctgtccattcgtgacgcaagacgacgtgacaacgccgcttattttttcagactgaagtcgaagtggatgaaatatgggtacacctcctcaaagttgagtgtcagggtcatggctctgacccatagaccaaatatatccattcccggtaccctggagagtgggcacccttccaacctcacatgcagtgttccgtgggtgtgcgaacagggaacccctcccattttttcatggatgtccgccgctcccacctccctaggcccccggaccactcagtcttctgtgctgactatcacaccgcgcccccaggaccactccactaacctgacctgtcaagtaacatttcctggtgcaggagtgacaatggagaggaccatccagcttaacgtgagtagctttaaaattcttcagaacacgagctctctgccagttcttgagggccaggcactgcgcctgctctgtgacgctgatggtaacccgcctgcccatttgagttggtttcagggcttcccagcgctgaacgctacacccatttcgaacactggggttttagagttaccccaggtcgggagtgccgaggaaggtgacttcacatgtcgcgcgcagcacccactgggatctttacagatatctctgtcgctgtttgtgcattggaagccagagggcagggcaggaggcgtgttgggcgcagtgtggggggccagcatcaccaccctggtgttcttatgcgtgtgcttcatcttcagagtgaaaacccgcaggaagaaggcggcacagcccgttcagaatacggatgatgtgaaccctgttatggtgagcggctcacgcgggcaccaacaccagttccagaccggcattgtgagcgatcaccccgccgaagccggacctatatccgaggacgaacaagagcttcattacgcagtcctgcacttccacaaggtgcagcctcaagagcctaaagtgactgatacagagtacagcgaaatcaagattcacaaatag

SEQ ID NO: 205099 - DNA, 1362 bp, synthetic construct
  misc_feature 1..1362: note = Description of Artificial Sequence: Synthetic coding sequence
  source 1..1362: mol_type = other DNA
atgcagggcgcccaggaggccagcgccagcgagatgctgcccctgctcctcccactcctctgggccggtgcgctggcacaggaaaggcgtttccagctagaggggccagaatctctgaccgtccaagagggcctctgcgtgttggtcccctgccgtctgcctacgactcttccagcgtcgtactatggctacgggtactggtttcttgaaggcgccgacgtcccagtcgccaccaacgaccccgacgaggaggtgcaggaagaaaccagggggcgatttcaccttctgtgggacccacgcagaaagaactgttcgctgtcaatccgagacgctagacggagggataacgccgcctacttcttccggctcaaatcaaaatggatgaaatatggttatacttcttcaaagctgtccgttagagtgatggctctgacacacagacctaatatatcaatacccgggacgctggaatcagggcacccatcaaatttgacgtgcagtgtgccctgggtgtgcgaacagggaactccgccaatctttagctggatgagtgcggccccaacgtcattgggcccccgcaccacccagtcctccgtgctgacaataacacctagacctcaggatcattccactaacttgacatgccaggtgacatttccgggggcaggcgtgactatggaaaggacaatccagttgaatgtctcctacgcgccccaaaaggtcgccatctcgatattccagggaaactccgctgcctttaagatcctgcaaaatacaagctccctgcccgtcctagagggtcaggcccttcggctcctatgtgacgcagacggaaacccacctgcacacctgtcgtggtttcagggattcccagcactgaatgccacccccatctccaacactggagttcttgagctcccccaggtagggtccgcagaagaaggggattttacctgtcgcgcccagcatccactcggatccctgcagatcagcctgagcctgttcgtacattggaagcccgagggcagggccggcggagtcctgggcgccgtgtggggggcctcaatcacaacgttagtctttctgtgtgtctgtttcatttttcgggtgaaaacgagacgcaaaaaagcagctcaaccagtgcagaacaccgacgacgtcaatcccgtgatggtgagtggaagcaggggacaccagcatcagttccagacgggcattgtcagcgaccaccctgcagaagcaggcccgatctcggaagatgaacaagaactgcactacgctgtgttgcacttccataaagttcaacctcaggaacctaaagtcactgatacggagtactccgaaatcaagatccataagtag

SEQ ID NO: 205100 - DNA, 1170 bp, synthetic construct
  misc_feature 1..1170: note = Description of Artificial Sequence: Synthetic coding sequence
  source 1..1170: mol_type = other DNA
atgcagggcgcccaggaggccagcgccagcgagatgctgcccctgctgttgcccctgctttgggccggcgccttagcccaggagcgaaggttccagttagaaggcccggagtcactgacggttcaggaagggctctgcgttctcgtcccatgtaggctgcccaccacattgccagctagttattatggttacgggtattggttcctcgagggagctgatgttcccgtggccaccaacgatcctgatgaagaagtacaggaagaaaccagaggacggttccacctgctgtgggacccaaggcggaaaaattgcagccttagcatcagagacgcgcggcggcgtgataacgcggcctattttttccgtctcaaatcaaaatggatgaaatatggctataccagctcaaagctgagcgttagggtcatggcactcacccatagaccaaatattagcatacctggtaccctagagagcggccatccctcaaacttgacatgttccgtcccttgggtgtgtgagcaaggaacaccaccgatttttagctggatgtcagctgccccgacctccctcggaccacggacgacgcagagtagtgtgctgaccatcacccctaggcctcaggatcactccaccaacttgacgtgtcaagtcacattccccggcgccggtgtcacgatggagagaacgatccagttgaatgtgtcatggatgctccgcagaccacccttgtccacccctgacgcaccgcagaaggtagctatttctatttttcaaggtaactccgccgcgtttaaaatattgcaaaacacgagcagcctccccgtactagaaggtcaagctctgcgcctgctgtgcgacgcggatggaaatcctccggcgcacctctcatggttccaagggtttcccgcattgaatgccacacctatttctaacaccggggtgctcgagctccctcaggtaggaagtgctgaggagggcgattttacctgtcgggctcagcacccacttggatctctgcaaatttctttgtccctgttcgttcattggaaacctgagggaagggccgggggggtattaggagccgtgtggggggccagtatcacgacacttgtctttttatgcgtgtgcttcattttccgcgtcatttcaacttctagccgccaggcttag

SEQ ID NO: 205101 - DNA, 1206 bp, synthetic construct
  misc_feature 1..1206: note = Description of Artificial Sequence: Synthetic coding sequence
  source 1..1206: mol_type = other DNA
atgcagggcgcccaggaggccagcgccagcgagatgctgcccctgctcctgcccctgctatgggctgcctcatattatggatatggttactggttcctggaaggcgccgatgtgcctgtggctacaaatgatcctgatgaagaggtccaggaggagacccggggtcgcttccaccttctctgggaccccaggcgcaaaaactgttctctgtctatcagagacgctcggcgcagggacaacgcagcttactttttcagactaaagtctaagtggatgaagtacggctacacctcctctaaactgtcagttcgggtgatggccctgactcatcgtccaaacatttctatcccaggcaccctggagtcaggccatcctagtaacttgacctgtagcgttccttgggtttgcgagcaggggacacctccaatctttagctggatgagtgccgcccctacttctctggggccacgcaccacacaatcttctgtgctgacaattaccccacggcctcaagatcattccacgaacctgacgtgtcaggtgactttcccaggggcaggtgtcacaatggagcgcacaatacagctgaacgtgtcgtcctttaagatcctgcaaaatacgagctctttgcccgtcctggagggacaggcactgaggctgttgtgcgacgccgatggcaatccccccgcccacctgtcatggttccagggtttccctgctctgaacgcaacacccattagcaataccggcgtgctggaattgcctcaggtaggctcggccgaggagggtgacttcacctgcagagcacagcaccccctcggcagtctgcagatttcactttccttattcgtgcactggaagcccgagggccgcgcaggcggagtgctgggtgcagtctggggggccagtatcaccactctggtttttctgtgcgtctgttttatattcagggtgaaaacgcgacggaaaaaagccgcgcagcccgtgcaaaacaccgacgacgtcaacccagtgatggtctccggtagtaggggtcaccagcaccaattccagaccggcattgtatctgaccaccctgcagaggctggtcccatctcagaggatgagcaggagctacattacgcagtgctgcattttcataaggtgcagccacaggagcctaaagtgacagatacagagtattccgagattaagatccacaagtag

SEQ ID NO: 205102 - DNA, 1125 bp, synthetic construct
  misc_feature 1..1125: note = Description of Artificial Sequence: Synthetic coding sequence
  source 1..1125: mol_type = other DNA
atgctgctgctgctgctgctgcccctgctgtggggccgggagcgggtggagggtcagaagtctaaccgcaaggactacagcctaacgatgcagagttcagtgacagtgcaggaaggtatgtgcgtgcatgtcagatgttctttttcctaccccgtggactcacagacagacagcgacccagtacacgggtattggtttcgcgctgggaacgacatatcctggaaagcccccgttgctacgaataacccggcttgggccgtgcaggaggaaacacgggaccgcttccatctgctgggtgacccacagaccaagaattgcaccctgtccatcagagatgcgcgcatgtccgatgctgggcgctatttcttccgtatggagaaaggtaatattaaatggaattacaaatatgatcagttgtcagtaaacgtgactgacccaccgcagaacctgaccgttaccgtcttccaaggtgagggaacagcatccaccgcactaggtaacagctcttctctgtccgtcctcgaagggcagtctctacgactggtttgcgcagtcgactccaaccctcctgcccgcttatcttggacgtggcgaagcctgacgctgtatccttcgcagcccagcaaccccctggttctggagctccaggtccacctcggcgatgagggcgaatttacttgtcgggcccagaactctctgggctcccaacacgtatctctgaatcttagtctccaacaggagtatactggcaagatgaggccagtttcaggagtcctcctcggcgccgtgggcggggccggcgcaactgctcttgtctttctgagcttctgtgtaatctttatcgtggtacgatcctgtcggaaaaaaagcgctcggcctgctgcagatgttggcgacataggcatgaaggatgctaacacaatcaggggatcagcgagccagggtaatctaaccgagagctgggcagacgataatccaaggcatcacggcctggccgcccatagttccggggaggaacgcgagatccagtacgcccccctgtcattccacaagggtgagccacaggatctatcaggtcaggaagccaccaataatgaatacagtgaaattaagattcctaagtag

SEQ ID NO: 205103 - DNA, 1404 bp, synthetic construct
  misc_feature 1..1404: note = Description of Artificial Sequence: Synthetic coding sequence
  source 1..1404: mol_type = other DNA
atgctgctgctgctgctgctgcccctgctgtggggccgggagcgggtggaaggacagaagtccaatcgcaaggattatagtctgaccatgcagtcctctgtaacggtgcaggaggggatgtgcgtgcacgtccgctgttcattctcataccccgtggatagtcagacggacagcgatcccgtacatggctactggttcagagccggaaatgatatcagctggaaagcccctgtagccacaaataatcccgcatgggccgtgcaggaagaaactagggatagatttcatctcttaggagaccctcagacgaaaaattgcacattgtccatccgcgatgccaggatgtccgacgccggccgctatttttttagaatggaaaaaggcaacatcaaatggaactataaatacgaccagcttagcgtcaacgtcactgcgttgacccaccggccaaacatactgattcctggaactctagaaagtggatgttttcagaatctgacgtgcagtgtgccgtgggcatgtgagcagggaacacctcctatgatttcatggatgggaacaagcgtcagcccactgcacccctctacaacaaggagcagtgttctgacactcatccctcagccacagcaccacggtacaagcttgacatgtcaggttacactcccgggtgcaggtgtcaccacgaacaggacaatccagctcaacgtgagttacccaccacaaaacctgactgttacagtttttcagggagaaggtacagcaagtacagccctcggtaatagctcctcgctgtctgtcctggaggggcagtccctgaggctggtgtgcgctgtggacagtaacccaccagctcggttgtcttggacatggaggagcctgacactataccccagccagcctagtaatcctttagtcctggagctgcaagtgcacctaggtgatgagggtgagtttacctgccgtgcgcagaatagcctggggtcccagcacgttagtttgaacctgtctctccagcaggaatacaccggaaagatgaggccagtctccggtgttttactgggagctgttgggggcgcgggagctaccgcactggtctttctgagcttttgtgtgattttcatcgtagttagatcatgccggaagaaaagtgcgcgtcccgcagccgatgtgggcgatatcggcatgaaggacgcgaatactatccggggatctgcctcgcagggaaatcttacagagtcttgggcggacgacaatccccgccatcatgggctcgccgcccactcttctggtgaggagagggaaattcagtacgcacctctcagttttcataagggtgagccccaggacctgtccggccaggaagctaccaacaacgaatattccgaaataaagatcccgaaatag

SEQ ID NO: 205104 - DNA, 438 bp, synthetic construct
  misc_feature 1..438: note = Description of Artificial Sequence: Synthetic coding sequence
  source 1..438: mol_type = other DNA
atgctgctgctgctgctgctgcccctgctgtggggccgggagcgggttgaaggacagaagtccaacaggaaggactactccctgaccatgcagtcatctgtaactgtgcaggagggcatgtgtgtgcacgtgaggtgttccttctcgtatcctgtggacagtcagaccgactctgaccccgttcatgggtactggttccgcgcagggaacgatatctcttggaaagcccccgtcgctactaacaaccctgcctgggctgtccaggaagaaacccgggaccgcttccaccttctcggggacccccagacgaaaaattgcaccctgagcatacgcgatgctcgaatgtccgacgctggcaggtactttttcagaatggagaaagggaacatcaagtggaactataagtacgaccagttgtccgtgaacgttacagagtag

SEQ ID NO: 205105 - DNA, 1500 bp, synthetic construct
  misc_feature 1..1500: note = Description of Artificial Sequence: Synthetic coding sequence
  source 1..1500: mol_type = other DNA
atgctgctgctgctgctgctgctgcccctgctgtggggcaccaaggggatggagggcgatcggcagtacggtgatgggtatctcctacaggtgcaggaactggtgactgtgcaagaaggcctgtgtgtgcatgtgccatgctcattttcatatcctcaggacggctggaccgatagcgatcctgtacacggctattggttcagggcgggtgatcgaccctatcaggacgcgccggtggctacaaataatccagacagagaggtgcaggcggaaacacagggacggttccaattgcttggggacatttggtccaatgactgcagcctgtccataagagatgcccgcaagcgcgataagggttcttacttctttcgcctggaaagggggagcatgaaatggagctacaagtcccagctcaactataaaaccaaacaactgagtgtgttcgtgacggcattgacccaccgacccgacattttgatcctcgggaccctggaatccggtcacagccgcaatctgacatgctcagttccttgggcatgtaagcagggaaccccacccatgatttcctggataggagcctcagtcagctctcccggccctactaccgcccgcagcagcgtgctgaccctcacaccaaagccacaagaccacggtacctccctcacgtgtcaggttaccctgcctggcaccggcgttacaacaacatctactgtcaggttggatgtgtcataccctccctggaatctcacaatgaccgtgtttcaaggcgatgctactgccagcactgccctgggcaatgggtctagtctgtccgttctggaaggccaatcattgcgtcttgtatgcgcggtaaacagcaatccccccgccaggctcagttggacacgcggctctctgaccctttgtccaagtagaagtagcaatcccgggctgttggaattgccgagggtacacgtgcgtgatgagggagagttcacttgtcgggcacaaaatgcccaaggatcacagcacatctccctgagcttgtctctgcagaatgaggggactggcacttcaaggcctgtgtcccaggtgaccctcgccgctgtgggcggggccggcgcaactgctttggcatttctcagcttttgtattatcttcataatcgttcgctcctgccggaagaagtctgccaggcccgccgctggcgttggcgacacaggcatggaagacgcgaaggccatccgaggaagcgcatcgcaggggcccctcacagagtcctggaaagacggaaacccactaaagaagccacctcctgcagtggcgcccagcagcggcgaggagggcgagctgcactatgctaccctctctttccacaaagttaaaccccaggatccccaggggcaggaggctaccgactctgaatattctgaaatcaaaatccacaaacgtgaaaccgctgaaacccaggcgtgtctgaggaaccacaatccaagcagcaaggaggtcagaggctag

SEQ ID NO: 205106 - DNA, 1221 bp, synthetic construct
  misc_feature 1..1221: note = Description of Artificial Sequence: Synthetic coding sequence
  source 1..1221: mol_type = other DNA
atgctgctgctgctgctgctgctgcccctgctgtggggcaccaagggtatggagggagacaggcaatatggcgacgggtacctgcttcaggtccaggagttagtaactgttcaagaaggcctttgtgtgcatgtgccctgcagcttctcctacccacaagacggctggactgactcagatcctgtgcacggatattggtttagggcgggtgacagaccctatcaggatgcaccagtggccacaaacaaccccgatagagaggttcaggccgagacccagggaaggttccagctccttggggatatctggtccaacgattgtagtctgagcatcagagatgcccggaagcgagataaaggtagttacttcttccgtctcgagcgaggatctatgaagtggtcctataagtcacagctgaattataaaaccaaacaacttagcgtgtttgtgaccgatcccccgtggaatctgacaatgactgtttttcagggcgatgctaccgcctctaccgccttgggcaatgggtctagtctgtctgttctggagggccagagtttgcggctagtctgcgctgtcaatagtaatccgccagcacgtttgagctggacaaggggtagtttgacactgtgtccttccagaagctctaaccccgggctcttggagttgccacgcgtgcatgtgagagacgagggggaattcacatgtagagcccagaacgcgcagggctctcagcatatctccctcagtctgagcctgcagaacgagggcacaggcacctcgcgcccagtgtcacaggtgaccctcgccgccgtgggaggggccggcgccaccgctcttgcctttctctctttttgtattatattcatcattgtgcgttcatgccgaaagaagtccgcaagacctgccgccggggtaggtgatacagggatggaggacgccaaggcaattcgaggatcagcatcgcagggccccctgaccgaaagctggaaagacggcaatcctctcaagaaaccacctccggctgtcgctccgtcttccggcgaggaaggggagctgcactatgccacacttagttttcacaaggtgaaaccacaagacccccagggtcaagaggccaccgactcggaatatagcgaaatcaaaattcacaaaagagagacagctgagacacaggcctgtttacggaatcacaacccgtcctcaaaggaggttaggggctag

SEQ ID NO: 205107 - DNA, 1173 bp, synthetic construct
  misc_feature 1..1173: note = Description of Artificial Sequence: Synthetic coding sequence
  source 1..1173: mol_type = other DNA
atgctgctgctgctgctgctgctgcccctgctgtggggcaccaagggcatggaaggcgatcgccagtatggggacgggtacctgctccaggtgcaagagctggtcactgtccaggagggcctttgcgtacatgtcccctgttcatttagctacccccaggatggatggacagactccgaccctgtccacggctattggttccgcgctggcgatcgcccatatcaagacgcaccggtagccacgaacaacccggaccgcgaggtgcaggccgaaacacaaggccgattccaactcctcggcgacatttggtccaatgactgttcgctgtccattcgggatgctcgtaagagagataagggctcatattttttccgacttgagcgcgggagtatgaaatggagctacaaatcccaattgaattacaagactaaacagctcagcgtcttcgtgacagctagcacagccctgggcaacggttctagcctttccgtgcttgaaggtcagagtttgcgactggtatgcgcagttaattctaatcctcctgcgagactgtcatggaccaggggctctctcactctttgtccttctagaagcagcaatccgggcctgctggaactccctcgggtacatgtgagggacgagggagaattcacctgtcgggcacagaatgctcagggcagccaacacatctcccttagtctgagcctgcagaacgaggggactggcacatcccggcccgtctctcaggtcactctggctgcggtgggtggggctggagcaaccgcattggccttcctgtccttttgcatcattttcattatagtgcgaagttgtagaaagaagagtgctcgccccgccgccggagttggggacaccggcatggaggacgctaaggctattcggggctcagcctcccagggcccccttaccgaatcatggaaggacgggaatcctctgaagaaaccgcccccagctgtggcaccatcctccggagaggagggggaactccactacgctacccttagctttcacaaggttaaaccccaggatccccaaggccaggaggccacggattccgaatattcagaaatcaaaatccataaacgagaaaccgcggagacacaagcctgcctgagaaaccataatccctcatcgaaagaggtgaggggctag

SEQ ID NO: 205108 - DNA, 1392 bp, synthetic construct
  misc_feature 1..1392: note = Description of Artificial Sequence: Synthetic coding sequence
  source 1..1392: mol_type = other DNA
atgctgctgctgctgctgcccctgctgtggggccgggagcgggccgaaggtcagactagcaagctgctgacaatgcaaagcagcgtgacagttcaagaaggcctttgcgtgcacgtgccttgtagcttctcctaccccagccacgggtggatttatccgggccctgtggtgcacgggtactggtttcgagagggagccaatactgatcaggatgcaccggtggcaaccaacaatcctgctcgtgctgtttgggaggaaactagagaccggttccacctgctgggagacccccacactaagaactgcaccctttccatccgggatgctaggagaagcgacgcaggccgctatttttttagaatggagaagggctcgattaagtggaactataaacaccataggctctccgttaatgtcacagctctcactcacaggcctaatatcctgatccccgggacacttgagagcggttgtcctcagaatttaacgtgctctgtaccctgggcctgcgagcagggcacaccacctatgatttcttggatcggaacatcagtttccccactggaccctagcacgactagatcatcagttctgacattgataccccaaccgcaggatcacggcacttcgctgacgtgtcaggtgacctttcccggcgcctccgtgaccacaaataaaacagtccatctgaacgtgagctatccgcctcagaatctgaccatgaccgtgtttcagggcgacggcactgtgagcacagtcctgggcaatggcagcagccttagcttgcctgagggccagtcgctgagactggtttgtgccgtcgacgctgtggactcaaatcctcccgcccgcttgagtctgtcctggagaggccttactctctgtccgtcacaaccttcaaatccaggcgtattggagcttccctgggtgcacctgcgagatgctgctgagtttacttgtcgagcacaaaaccccctgggctctcagcaggtctatctgaacgtctcccttcagtccaaggccaccagtggcgttacccagggcgtggtggggggcgcaggagctacagccctggtgttcctgagtttttgcgtcatatttgtggtggtgaggtcctgtcggaagaagtctgctcggcccgcggccggggtgggcgacacggggatcgaagatgccaacgccgtgaggggatcagcctcacagggcccactgactgaaccttgggccgaagattcaccacctgatcagccgcctcctgcctccgcccggtcatcagttggagagggagagctgcagtacgcctcactgtccttccagatggtgaaaccttgggattccagaggccaagaggcgaccgacacagaatacagtgaaatcaaaattcaccgatag

SEQ ID NO: 205109 - DNA, 1440 bp, synthetic construct
  misc_feature 1..1440: note = Description of Artificial Sequence: Synthetic coding sequence
  source 1..1440: mol_type = other DNA
atgctgctgctgctgctgcccctgctgtggggccgggagcgggccgagggccaaaccagcaagctgctgaccatgcaatcttccgtgacagtgcaagaagggctgtgcgtgcatgtaccatgctctttttcatatcccagtcacggctggatttaccccggacctgtggtgcacggctactggttccgggagggcgccaacaccgaccaggatgcacctgttgctactaacaaccctgctcgggccgtgtgggaggaaacccgggaccgcttccacctcctgggcgatccccataccaaaaattgcacgctgagtattcgggacgctcgcagatccgacgctggcaggtacttcttcaggatggaaaagggcagtattaagtggaattacaagcatcaccgcctgtccgtgaacgtgaccgctttaacgcaccgacctaacatactcatccccggaacgctggagtcagggtgtccccagaatctcacatgctctgtcccttgggcatgtgagcagggcacacctcctatgatcagctggatagggacctctgtgagcccccttgacccttccacgacaagatcatctgtgctgacactgattccacaacctcaagatcacggcacgagtctcacctgtcaagtcacctttcctggggcatcggtcacaaccaacaaaactgtacatctgaatgttagctaccccccccagaatctgacgatgactgttttccagggcgatggaacggtgtcaaccgtgctggggaacggaagcagcttatccctgccagaaggccagagtctgcgacttgtctgcgccgtggatgcggtcgatagtaatccccctgcacgcctctcactgagctggagaggattgacattgtgtcccagccagcccagcaatccgggcgtgctggagctcccgtgggtgcacctgagagatgcggccgagttcacatgtagggctcagaaccccctgggatcacagcaggtctacttgaacgtatccttacagtcaaaagctacttctggtgtaacgcagggagtagtgggcggtgccggcgctactgccttggtgttcctgagcttttgcgtgatcttcgtggtggtgcggagctgtcggaaaaaatctgccaggcctgccgcgggcgtaggagatacaggcatagaggacgccaatgcagtgcgcggttcagccagtcagattctgaatcactttataggttttccgaccttcctcggattggggttcgaatttctgctgaacttaagagacctctgttgccatcctgattctgaattttacgtgtatcatttttcacatttccgtttaatcaagaatatcgcgggggaaatcgtttggtctcttgagggcaagattctgtggctgctcgatgtgtctgacttttttcactggttctttttgatttgcgttggctag

SEQ ID NO: 205110 - DNA, 735 bp, synthetic construct
  misc_feature 1..735: note = Description of Artificial Sequence: Synthetic coding sequence
  source 1..735: mol_type = other DNA
atggccgccgccgccagccccgccttcctgctgtgcctgcccctgctgcaccttttgtccggctggagtagggctggttgggtcgatacccactgcctttgttacgattttattattacgcccaaaagccgcccagagccccagtggtgtgaggttcaggggctcgttgacgaacgacctttccttcattacgactgcgtgaatcacaaggccaaagccttcgccagcctgggtaaaaaggtaaacgttactaagacatgggaggaacagactgaaacactgcgcgacgtcgttgatttcttaaagggccaactgctagatatccaggttgagaacctgattccgatcgaaccactgactttgcaagccaggatgtcttgtgaacacgaagcccatggacatggcaggggatcctggcagttcctgttcaacgggcagaaattcctcctgtttgactcgaataaccgtaaatggacggcactccatcccggcgccaaaaagatgactgagaagtgggagaagaatcgcgatgtgacaatgttcttccagaaaatttctctgggagattgtaaaatgtggctcgaggaattcctgatgtactgggaacagatgctcgaccccacgaaacctccgtcccttgccccggggactacgcagccaaaggccatggccactactctatccccctggtccctgctcatcatattcttatgtttcatactcgccgggcggtag

SEQ ID NO: 205111 - DNA, 1248 bp, synthetic construct
  misc_feature 1..1248: note = Description of Artificial Sequence: Synthetic coding sequence
  source 1..1248: mol_type = other DNA
atgaccggcgagcggcccagcaccgccctgcccgaccggcggtggggaccgaggattcttgggttttgggggggctgccgggtctgggtgttcgctgctattttcctgctgttaagtttagcagcctcctggtcaaaggccgaaaatgactttgggttagtgcaacctctagtgacaatggagcagttgctctgggtgtcaggtcgtcaaattgggtccgtggacaccttcaggatccctttgatcactgcaacccctagagggaccctgctggccttcgcagaggcccgcaaaatgtcaagcagtgatgagggagcgaaattcatcgccctgaggcggtcaatggaccaaggctccacctggtccccaacagcgttcattgtaaatgacggtgacgtgcccgatgggcttaacctcggggcagttgtctccgacgttgaaactggcgttgtctttttgttctactctctgtgtgctcataaggcgggatgtcaggtcgcctctaccatgctggtctggagtaaggatgatggcgtgtcttggtccactcctcgaaatttatcactggacatcgggacggaagtgttcgcccccggaccagggagcggcatacagaagcagagagagcctaggaaagggaggctgatagtttgtggacatggtactctcgagcgggatggtgtattctgtctgctgagcgacgatcatggagccagctggcggtatggttctggtgtaagcggcatcccgtatggccaacctaagcaggagaatgactttaaccccgatgagtgccagccttatgagctccccgacggatccgtggttattaatgcccgcaaccagaataactatcactgtcactgtcggatagtgctacgctcatatgatgcatgtgatactctccgaccccgagacgtaactttcgaccccgaactcgttgatccagttgtggcagcgggggctgtcgtcactagcagtggcatcgtcttcttcagtaacccagctcatcccgagttccgcgtgaatttgacattaagatggtccttttcaaacggtacttcatggaggaaggagactgtacagttatggccaggcccaagcggatattcttctctcgccacactggagggctcgatggacggtgaggaacaagcgccacagctgtatgtgctctacgaaaaggggagaaaccattatactgagtccatctccgtggctaagatcagcgtgtacggtaccctttag

SEQ ID NO: 205112 - DNA, 1248 bp, synthetic construct
  misc_feature 1..1248: note = Description of Artificial Sequence: Synthetic coding sequence
  source 1..1248: mol_type = other DNA
atgaccggcgagcggcccagcaccgccctgcccgaccggcggtggggaccacgcatcctggggttttggggcgggtgtcgtgtctgggttttcgcggctatctttcttctgctgtctctagccgcaagctggtcaaaggcggaaaatgactttggcctcgtgcagccattggtcacgatggagcagctactgtgggtatctgggcggcagatcggcagcgtggatacctttcgaatcccgctgataacggccactccacggggtaccttactggcttttgctgaggcccgaaagatgtcatcatccgacgagggagcaaaattcattgccctccggcgatcaatggatcagggttcaacatggtctccaaccgcattcatagttaatgacggcgacgtgccagacgggttaaacctcggtgccgtcgtcagcgatgtcgaaactggggtggtcttcctgttctactctctttgcgcgcataaggctgggtgccaggtggcctctaccatgctggtgtggtcaaaggacgacggcgtttcttggtctacaccaagaaacttgagtctggacataggcacagaggtgtttgcacctgggccagggagcggtattcagaaacaaagggaaccaagaaagggaagactgattgtgtgcggccacggcaccttggagcgcgacggtgttttttgtctactctcagatgaccacggagcaagctggcggtacgggagcggggtgagtggaatcccttatggccagccaaagcaggaaaatgacttcaaccccgacgagtgccaaccatacgagctaccagatgggagcgtggtaattaacgcacgcaaccaaaacaactaccactgtcactgccgcatagtcttaagatcttacgatgcctgcgacaccctcagaccaagagacgtcactttcgacccagaactggtcgaccccgtcgtagctgccggtgcagtcgttacaagttccggaattgtattcttctctaatcccgcacatccagagtttagggtgaatctgaccttgcgatggagtttctctaacggcacaagctggaggaaggaaaccgtgcagctgtggcccggtccctcaggctattcctcactggccacgctggaggggagcatggacggtgaggaacaggcaccgcagttatacgtgctgtatgaaaagggaagaaaccactatacagaaagtatttccgttgcaaaaatatcagtttacggtaccctctag

SEQ ID NO: 205113 - DNA, 1248 bp, synthetic construct
  misc_feature 1..1248: note = Description of Artificial Sequence: Synthetic coding sequence
  source 1..1248: mol_type = other DNA
atgaccggcgagcggcccagcaccgccctgcccgaccggcggtggggacctcgcattctaggcttctggggtgggtgtcgtgtatgggtcttcgcagccattttcctgctgcttagcctcgctgccagttggtcaaaggccgagaatgatttcgggctggtgcagcctttggttactatggagcagctcctgtgggtgagcggtcgtcagattggatccgtggatacctttcggattcctctgattactgcaacacccagggggaccctgctcgcttttgccgaagcacgcaaaatgtcatcttccgatgaaggcgccaagtttattgctctgaggagatcgatggaccaggggagcacctggtccccgactgcttttatcgttaatgatggggacgtgcccgatggcctgaacttgggcgcagtcgttagtgatgtggagacaggagtcgtcttccttttttattccctgtgcgctcacaaagccggctgccaggtggccagcaccatgctggtgtggagcaaagatgacggagtcagttggtcaactccccgaaatctgagcctggacatcgggacagaggtcttcgcgccaggacctggttcgggcattcaaaaacagcgtgagcctagaaagggccggctgattgtgtgcggccacggcacactggagcgggatggtgtgttttgtttacttagtgacgatcatggggcatcttggcgctacgggtccggcgtgagcgggattccttatggccagccgaaacaagaaaatgacttcaatcccgacgagtgtcagccttatgagctgcctgacggctctgtggttatcaatgcacgcaatcaaaataattatcattgccactgccgtatagtgcttcggtcttacgatgcgtgcgacaccctccgtcccagagatgtgacttttgaccccgaactcgtggaccccgtggttgctgcaggcgctgttgtgacaagctcaggcatagtcttcttctctaacccggctcaccctgagtttagagtcaatctgacactgagatggtcgttttcaaatggaacatcctggcgaaaggagactgttcaattatggcccggcccaagcggatacagtagcctcgcgacactggagggttcgatggacggagaggagcaggcacctcaactctatgttctgtacgaaaaaggccgcaaccactacacagaaagtatatcagtagctaaaatttcagtatatggtactctttag

SEQ ID NO: 205114 - DNA, 1248 bp, synthetic construct
  misc_feature 1..1248: note = Description of Artificial Sequence: Synthetic coding sequence
  source 1..1248: mol_type = other DNA
atgaccggcgagcggcccagcaccgccctgcccgaccggcggtggggcccccggatcctcggcttctgggggggttgtcgtgtgtgggtgttcgcagcgatttttctgctgctgtccctggccgccagctggtctaaagcagagaacgattttggcctggttcagccactcgtgactatggagcagctgctctgggtgtccggtagacagatcgggtcggttgatacctttcgcattccactgataacagcgactcccaggggcaccctgcttgcattcgctgaggctcgtaaaatgtcctccagcgacgaaggggcaaagtttatcgcactacgccgctcaatggatcagggctccacctggtctccgactgccttcatcgtgaacgacggggacgttcccgatgggctcaacctcggtgctgtcgtgagtgacgtcgaaaccggcgtggtcttcctcttttattctctttgtgctcataaggcagggtgccaggtggctagcacaatgcttgtctggagcaaggatgatggtgtgtcatggagcacccctcggaacctttccctcgacataggcaccgaagtatttgctcctgggcctgggtctggtatacagaagcaacgggagccgcgcaagggacggctgattgtgtgcggccacggaaccctggagcgcgatggagtgttttgcctattgagcgatgaccacggcgcgagttggagatacggctctggggttagtggtataccatatggccagcctaagcaggaaaacgactttaatccagacgaatgccagccgtatgagctgcctgacggtagcgtggtcataaatgctcgcaatcagaataactaccactgccactgcaggatcgtcctgcggtcttatgacgcgtgtgacacactccgcccccgggacgtgacgttcgacccagaactcgtggatcccgtggtggcagccggggctgttgttacgagcagtggtatcgttttcttctctaatcccgctcacccagagtttcgagttaacttgacacttcgatggtccttctcgaacggaacctcctggagaaaggaaactgtgcagttatggccaggcccttccggctacagctccctggccacacttgagggatccatggacggagaggaacaggcaccccagttgtacgtgctgtatgagaaaggccggaaccattacacagagtctatctcagtcgccaaaatctcagtctatggtactctgtag

SEQ ID NO: 205115 - DNA, 1248 bp, synthetic construct
  misc_feature 1..1248: note = Description of Artificial Sequence: Synthetic coding sequence
  source 1..1248: mol_type = other DNA
atgaccggcgagcggcccagcaccgccctgcccgaccggcggtgggggcctcggatcctaggtttttggggcggttgccgcgtgtgggtgtttgcagccattttcctgctgctatcgctggctgcgtcctggagcaaggcggaaaatgacttcgggctcgtacagcctctggtgaccatggaacagcttctgtgggtgagcgggcgtcagatcgggtctgtggacacctttcgtattccattgattaccgccactcctcggggaaccttgcttgccttcgcggaagccaggaaaatgtctagcagtgatgagggcgcgaagtttattgcactgaggcggagtatggaccaggggtctacatggtcccctaccgcgtttatcgttaacgacggagacgtgccagatggcttgaacctgggagcagtcgtgtcagatgtagaaactggagtggtcttcctattttacagcctctgcgcccataaggcaggttgtcaagtcgcatccacaatgctggtctggtccaaggatgacggggtgagctggtccacaccaaggaacctcagcttagatatcggaactgaagttttcgccccaggtcccggctcaggcatccagaagcagagggagccccgcaaaggtagattgattgtgtgcgggcatggaactctagagagggacggtgtcttttgtttattgtccgatgaccatggcgcgtcctggaggtatggttccggcgtgtccggtataccatatgggcagccgaaacaggaaaatgattttaaccctgatgaatgtcaaccttacgagctccctgacggatcagtcgtaattaatgcacgcaaccagaataattaccattgccattgccgcatcgtgctgagaagctacgacgcctgcgataccctgcggcccagggacgttactttcgaccccgaactggtcgacccagttgttgccgccggcgcagtcgtgacatctagtggaattgtgtttttctccaatccagcccatccagaattccgcgttaatctcactcttagatggagcttcagcaatgggacctcatggcggaaggagacagtgcaactgtggccaggaccctctggctactctagtctagccacgctggaaggaagtatggatggggaagagcaggcaccacagctatacgtcctttacgaaaaaggacgaaaccattatactgaaagtatcagtgtggctaagatctccgtatacgggaccctgtag

SEQ ID NO: 205116 - DNA, 1248 bp, synthetic construct
  misc_feature 1..1248: note = Description of Artificial Sequence: Synthetic coding sequence
  source 1..1248: mol_type = other DNA
atgaccggcgagcggcccagcaccgccctgcccgaccggcggtgggggccccggatcttaggattttggggagggtgtcgggtatgggtgttcgctgccattttcctccttttatcgttagccgctagctggtccaaagcagaaaatgactttggacttgtgcaacctctcgttactatggagcagctgctgtgggtatctgggcgccagatcggatcagttgacactttcagaattccattaatcaccgccacgcccagaggtacactgttggcgtttgctgaggcacggaaaatgagctcaagcgatgaaggggctaagtttattgcactgaggcgctccatggatcagggtagtacttggtcacccactgcctttattgtgaatgatggtgacgtcccagatgggttgaacttgggggcagtagtgagtgatgttgaaaccggcgtcgtcttcctgttttactccctgtgtgcccataaggctggatgtcaggtcgcctcgactatgctggtgtggagtaaagatgatggggtgtcttggagtacacctcggaatctaagtttagatattggaacggaggtgttcgcccccggccccggatccggcatacaaaagcagcgtgaaccgagaaaggggagattaattgtgtgtggccacggcacactggagcgcgatggcgttttttgtttgctatcagacgaccacggagcttcttggagatatggttctggggtcagcggtattccctatggccagcccaaacaggagaacgattttaaccctgacgagtgccagccatatgagctgccggatgggtctgtggtcatcaacgctcgaaaccagaacaattatcattgccactgcagaatcgttctccggtcttacgatgcgtgtgacaccctgcgtcctcgtgacgtcacattcgatcccgagcttgtggatcctgttgtggccgctggagctgttgttacttcatctgggatcgtatttttttctaaccccgctcaccctgaatttagggtgaatctgaccttaaggtggtcctttagcaacggtacatcctggcggaaagaaaccgtgcagctatggccgggcccaagtgggtattcgtccctcgctaccttagaaggtagtatggacggcgaggagcaggcacctcaattgtatgtattgtatgagaagggccgtaatcactacacggagagcatcagcgtggccaaaatctcagtctacggaacgctatag

SEQ ID NO: 205117 - DNA, 1248 bp, synthetic construct
  misc_feature 1..1248: note = Description of Artificial Sequence: Synthetic coding sequence
  source 1..1248: mol_type = other DNA
atgaccggcgagcggcccagcaccgccctgcccgaccggcggtggggccctcgcattttgggcttttgggggggctgcagagtttgggtgttcgcagcaattttcctgctactgtctcttgctgccagctggtctaaggccgagaacgatttcggccttgtgcaacctctggtgaccatggagcagcttctctgggtctccgggaggcagatcggaagcgtcgatacgtttaggatccccctcatcacagccacccccaggggcacactgctggcctttgcagaagcgaggaaaatgtctagctctgatgagggcgctaaatttatcgccttaagaagatcaatggaccaggggtctacttggagtcctaccgcttttattgtcaacgatggagacgtgcccgacggcctaaacctgggagctgtggtctcagatgtggagaccggagtcgtctttctgttctattctctgtgcgcacacaaagctggttgtcaggtagcgtctactatgctcgtgtggtccaaagacgatggggttagctggtccacccctagaaatctcagcctggatatcggcaccgaagtgtttgcccctggcccaggtagtggaatccagaaacagcgggaaccacgcaaaggccgactgattgtttgtggtcacggcacactagagcgcgacggtgtgttctgcttgctatcagacgatcatggcgcaagttggaggtacggttccggggtgagcggcatcccatatggccaacctaagcaagagaacgattttaatccagacgaatgtcagccttacgaattgcccgacggctcagttgtgattaatgccaggaaccagaacaattaccactgccactgtcggatagttctacggagctatgacgcatgcgatacactgaggccacgggatgttacatttgatcccgaacttgttgacccagtggtggcggccggtgccgtagtgaccagcagcggcatcgtgtttttctctaacccggcccatccagaatttagggtgaaccttactctcagatggtcattcagtaatggtacaagttggcgcaaagagaccgtgcagctgtggcccggccccagtggttactcttcactcgctacgctggaaggaagcatggatggtgaagagcaggcccctcaactgtacgttttgtacgaaaagggcagaaatcattatactgaaagtatttcagtcgcaaagatcagcgtatacggaactctgtag

SEQ ID NO: 205118 - DNA, 2277 bp, synthetic construct
  misc_feature 1..2277: note = Description of Artificial Sequence: Synthetic coding sequence
  source 1..2277: mol_type = other DNA
atggccgtgagcgccggcagcgcccggaccagccccagcagcgacaaagtgcagaaggacaaggccgagcttatttccgggcctagacaggactctcgtatcggaaagctcctgggcttcgagtggactgatcttagcagttggaggcggctggtaacacttttaaatcggcccacagatccagctagcctcgccgtcttccgttttctgttcggatttctgatggtcctggatatcccacaggagaggggattaagttccctcgaccgtaagtatttggacggcctagatgtatgtaggttccccctacttgacgctctcaggccactccctttggactggatgtatctcgtctacacgattatgtttctgggagccctgggaatgatgctaggcttatgctataggatcagctgcgttctatttcttctgccttattggtacgtgtttctgctcgataaaacctcctggaataaccactcttatctgtatggcctcctcgccttccagctcaccttcatggacgcaaatcactactggtcagtggatggtctactcaacgcccaccgacgcaacgcccatgtgccgttgtggaactacgctgtgcttcgtggccagattttcattgtgtactttatagctggagtcaagaagctagacgctgactgggttgaagggtactcaatggagtacctctcgcgacactggctattttctccatttaaactgttgcttagtgaggagttgaccagcctactggtggtgcactggggggggctcctgttagacctttctgctggttttctgctgttcttcgacgtctccagaagcataggccttttctttgtgtcctacttccactgtatgaatagtcaactgttttccatcggcatgttttcctacgtgatgttggcgagttctcctctgttttgttctcccgaatggcctcggaagttggttagttactgtcctaggagacttcagcagctgcttcctttgaaggcagcgccacagccttccgtaagctgtgtgtacaaaagatcacggggcaaatcaggccagaagcccggtttacgacatcagttaggcgctgctttcaccctgctctacctgcttgagcagctctttctcccatactctcatttccttactcagggctacaataattggacaaatggcctgtacggttactcctgggatatgatggtgcacagccgcagccatcaacacgtgaaaattacttaccgcgatgggcggactggagagctgggctacttgaaccccggcgtgttcacccagtctcgccgctggaaagaccacgccgacatgctcaagcagtatgctacgtgcctgtctcgcctcctacctaaatataatgtcaccgagcctcagatatatttcgacatttgggtgtctatcaatgatagattccaacaaaggattttcgatccacgcgtggacattgtccaggctgcatggtccccctttcagcgcacatcatgggtccagccgctgttaatggatttaagtccatggcgggcaaaactacaggagatcaagtcttcccttgacaatcacactgaagtagtgttcatcgctgatttccccgggctgcacctggaaaactttgtaagtgaggacctcggaaatacgagcattcagctgttacaaggggaagtaacagtcgagctcgtcgctgagcagaagaatcaaaccctgcgggagggggagaaaatgcagctgcccgccggagaatatcacaaagtgtacacaacatcgccgagtccctcgtgctatatgtacgtgtatgtcaacactaccgaactggcccttgaacaggatctggcttacctgcaggaactcaaagagaaagtggagaatggaagcgaaaccggcccgcttccccccgaacttcagcccctgctggagggggaggttaaggggggccctgaacctacgcctctcgttcagacgttcttacgcaggcagcagcgcctgcaagagatcgaaagaagacggaacactcccttccacgagcgatttttcagatttctgctgcggaagctgtatgtgttcaggcggagcttcctgatgacttgcatcagcttacggaatctgatattggggaggccctccttggagcagctcgcccaagaggttacctatgccaatctccgacccttcgaggctgtaggcgaacttaatccgtctaacactgactcctctcactctaacccaccagaaagcaaccctgaccctgtgcacagtgagttctag

SEQ ID NO: 205119 - DNA, 1386 bp, synthetic construct
  misc_feature 1..1386: note = Description of Artificial Sequence: Synthetic coding sequence
  source 1..1386: mol_type = other DNA
atgcggcccgccgacctgcccccccggcccatggaggagagccccgcctcatcttctgccccgacagagaccgaggagcccgggtcaagtgccgaagtaatggaggaagttacaacatgttcctttaacagtcctctgtttcgacaggaagacgatagaggaatcacctataggataccagcgctgctctacatcccccccacccacactttcctcgcatttgccgaaaagagaagtaccaggagggatgaagacgcactccatcttgtgctcaggcgaggtctgcggattggacagttagtgcaatgggggcctctcaagccattgatggaggccaccttgcctggtcatcgcaccatgaacccttgccccgtctgggaacagaaatccggatgcgtatttttgttctttatctgtgtcaggggtcacgtgactgagagacagcagatcgtctcaggtaggaacgcagcgcggctctgtttcatatatagtcaggatgccgggtgcagctggtctgaagtgagggacttgactgaagaagtcattggatcagaactcaagcactgggccacctttgcagtcggccccggacacggaatacagctgcaatccgggaggctagtgataccggcatacacctattacatcccgtcgtggttcttttgcttccagctgccatgcaagaccaggccacatagtctaatgatctactctgacgacctgggggtcacttggcatcacggaagacttatccgacccatggtgacagtggagtgcgaagtagccgaggtgaccggtagagccggccacccagtgctgtactgctccgctaggacgccgaatagatgtcgagcagaagctctctcaactgaccacggggagggtttccagaggttggccttgagtcgacagctgtgtgagcccccgcatggatgtcagggcagcgtggtctcgtttaggccgctggaaattccacaccgatgccaggactcttcatctaaagacgcccccaccatccagcagtcgagccccgggtcgtctctcagattagaggaagaggcaggcacaccttcggagtcttggctcctgtattctcatccgacgtcgaggaagcaaagggttgatcttggtatttacctgaaccagacacccttggaggctgcgtgctggagccggccttggatcttgcattgtggcccatgtgggtatagtgatctagccgctctggaagaggagggcctcttcggctgcctcttcgagtgcgggaccaagcaggaatgtgagcagatcgccttcaggctcttcacccacagagaaattctctctcatctgcagggtgactgcacctccccaggaagaaaccctagccagttcaaaagcaactag

SEQ ID NO: 205120 - DNA, 1386 bp, synthetic construct
  misc_feature 1..1386: note = Description of Artificial Sequence: Synthetic coding sequence
  source 1..1386: mol_type = other DNA
atgcggcccgccgacctgcccccccggcccatggaggagagccccgctagctctagtgcgcccacagagaccgaagaacccggatcgtcagcggaagtcatggaggaagttaccacctgttccttcaactctcccctgttcaggcaagaggacgatcgtgggataacctacagaatacctgcactgttgtacattcctccgacgcacactttcttagcgttcgcagaaaaacgctctacccggcgagatgaagatgccctacatctggtgctcagacgcggccttcggattggccagcttgtacagtggggccccctgaagccactcatggaagctacgctgcctggccaccgcacgatgaatccatgcccagtgtgggagcagaaatcagggtgcgtattcctgttctttatctgtgttcgaggacacgtgaccgaacgacagcagattgtatcagggaggaacgctgcccgtctgtgcttcatctatagccaggacgctgggtgctcttggtcagaggtgcgggacctgaccgaggaagtcatcggctcggagctgaagcactgggccactttcgctgttggccccggacatggcattcagcttcagagtgggcggctagttatacctgcctacacttattacatcccttcctggtttttttgtttccagctcccatgtaagaccaggccccactcactcatgatctatagtgacgacctcggtgtcacttggcatcatggtaggctgattaggcccatggtcactgtggagtgtgaggtcgccgaagtaaccggaagagccggccacccagtcttgtattgtagcgcgcggactcctaacaggtgccgagccgaagcactgagcacagaccacggcgagggatttcaacggcttgccctcagtcggcaactctgtgagcccccccatggctgccagggatcagtcgtgtctttccgccctctcgagatcccccacaggtgccaggattcgtcctctaaggacgcacctacaatccaacagagctcccccggtagtagcctgcggctggaagaagaggcaggaactccatccgaaagctggctcctgtacagccaccccacatccagaaagcagagagtggacctgggaatctacctgaatcagactcccttggaagcagcttgttggtctagaccttggatcctgcactgtgggccttgcggatactctgatctagccgcgttagaggaggaaggattgttcgggtgtctcttcgaatgcggcacaaagcaggagtgcgaacagattgcctttcgcctcttcactcacagggaaatcctcagccatctccagggcgactgcacctcgcccgggcgcaacccgtcgcaatttaaatctaactag

SEQ ID NO: 205121 - DNA, 1287 bp, synthetic construct
  misc_feature 1..1287: note = Description of Artificial Sequence: Synthetic coding sequence
  source 1..1287: mol_type = other DNA
atggaggaggtgaccacctgcagcttcaacagccccctgttccggcaggaagacgacagaggaatcacgtaccgcatacctgcgttactctacatacctccaacccatacttttctggcattcgcagagaaacgctcaactaggagggacgaggatgccctgcacctggtattgagaagaggcctccgaattggacagctcgtgcagtggggccctctgaagccactgatggaggcaacactaccaggacacaggaccatgaacccgtgcccagtgtgggagcagaaaagtggctgcgtctttctgttcttcatctgtgtgcgaggacatgtgaccgaacgacagcagatcgttagtgggcggaacgcggctcgactgtgctttatttattctcaggacgctggatgctcttggtccgaagtcagggatcttacggaagaggtcatcggttccgagctgaaacattgggcgactttcgccgtgggcccaggccacggaatccagttacagagcggacgtctcgttattcccgcctatacatactatatcccaagttggtttttctgctttcagctcccatgcaaaaccaggccacacagcctcatgatttatagcgatgatctgggggtgacatggcatcatgggcgattgatcagacccatggttactgtcgaatgcgaggtagcagaagtaacaggacgggctggccaccccgtgctctattgctctgcccgtacccccaacaggtgcagggcagaggcactgagtaccgaccacggagaagggtttcagcgactggctttgagtcgccaactgtgtgaaccaccccatggatgccagggctctgtcgtgtcattccgacctttagagatcccacatagatgtcaggattctagtagcaaggatgcgccgactattcagcagtcatccccgggctcctctctgcggttagaggaagaggccggcacccccagcgaatcatggctgctgtacagccaccctacaagtcggaaacagcgtgttgacctcggtatctacctcaatcagacacctctcgaggccgcctgctggtcaaggccttggatattgcattgtgggccctgcggttattcagatctagccgccttggaggaagaaggtctcttcggatgtctctttgagtgtgggactaaacaagaatgtgaacagatagcatttaggctattcactcaccgggaaatactctctcacttgcagggtgattgtactagccccggacgaaaccctagccaattcaaaagcaactag

SEQ ID NO: 205122 - DNA, 1059 bp, synthetic construct
  misc_feature 1..1059: note = Description of Artificial Sequence: Synthetic coding sequence
  source 1..1059: mol_type = other DNA
atggaggccaccctgcccggccaccggaccatgaacccctgccccgtctgggaacagaagtctggatgcgtatttctgttcttcatctgtgtgcggggacatgtcacagagcgacagcagatcgtgagcggcagaaatgccgctagactatgctttatatattcacaggacgctggctgctcctggtccgaggtgcgggacctcaccgaggaagtgattggtagtgaattaaagcattgggccaccttcgccgtagggccaggccatggcatccagctccaaagcggtagactggtcatccctgcgtatacctactatatcccttcctggttcttctgcttccagctgccctgtaagactcgcccccacagtttgatgatctactccgacgacctcggggtgacttggcaccacggcaggctgatccgtccgatggttacagtcgaatgtgaagtggccgaggtgacaggacgtgccggccaccctgttctttactgcagtgccaggaccccaaatcggtgtagagctgaagcgttatctacggaccacggggaggggtttcagagactcgcgctctctaggcagctgtgcgaaccacctcacggatgtcagggctctgtggtgtcctttcggcctcttgaaatcccacacaggtgccaggactccagcagtaaggacgcaccgactatacagcaatcgtcccccggaagtagcctgcggctcgaggaagaggccggcaccccctccgaatcatggttgttgtactcccaccccacctctaggaagcagcgggtggaccttggaatctatctgaatcagacacccctcgaagccgcctgctggagcaggccttggatcctgcactgcggaccctgtggatatagcgatcttgccgctctggaggaagagggcctctttggctgtctgtttgagtgtggaactaaacaggagtgcgagcagatagcgttccgcctgttcacacatcgagagattctgtcgcacttgcagggagattgtaccagccccggaagaaatccaagtcagtttaaatccaattag

SEQ ID NO: 205123 - DNA, 1203 bp, synthetic construct
  misc_feature 1..1203: note = Description of Artificial Sequence: Synthetic coding sequence
  source 1..1203: mol_type = other DNA
atggccaccctgctgctgctgctgggcgtgctggtggtgagccccgacgcgctaggatcaaccaccgctgttcagacccccacaagtggagagcctctcgtaagtacctccgaacccctgtcaagtaagatgtataccacctctattactagcgacccaaaggctgacagtacaggggaccagacgtcagctcttcccccctctacaagcataaacgagggatccccgctctggacatctatcggcgcatctaccggttcaccacttcctgagcctactacctaccaagaagtatctatcaagatgagctccgtgccacaggaaacacctcatgccactagccacccagcagtccctatcaccgccaactccctagggtcacacaccgtgacggggggaacaatcactactaactctccagagactagtagccgcacctccggcgctccggtcacaaccgccgcgtcatcacttgaaacctccaggggcacctcggggccaccactgacaatggcgaccgtctcgttggaaacctctaagggaaccagtgggcctcccgttacaatggccactgattcactggaaactagcacaggcacaactgggccacctgtcacaatgacaaccggaagcctggagccctcatctggagcatccggcccacaagtgtccagtgtgaaactgtccactatgatgtcacccaccacaagcacaaatgcaagcacagtgccatttcggaatcctgatgaaaactcacgggggatgctgcctgtagcggttctcgtagccctcctcgctgtcattgttcttgtcgcactgctgttgctgtggaggcgccgacagaagcgacggaccggagccctcgtgttatcccgcggaggtaaaagaaacggcgtcgtggacgcttgggccggcccggcccaggtgcctgaagaaggcgctgtaaccgtcaccgtggggggatctggcggggataagggatccggattcccagacggcgagggtagtagtcggagaccaaccctaaccacttttttcggccgccgcaaaagtagacagggtagtctggcaatggaagaactgaagagtggttctggcccctcactgaagggagaagaagagccactcgttgctagcgaggacggcgcagtggatgctcctgcgcctgatgagccagaaggcggtgatggtgccgctccttag

SEQ ID NO: 205124 - DNA, 1203 bp, synthetic construct
  misc_feature 1..1203: note = Description of Artificial Sequence: Synthetic coding sequence
  source 1..1203: mol_type = other DNA
atggccaccctgctgctgctgctgggcgtgctggtggtgagccccgacgccctgggctcgacgacagcggtccagacaccaactagtggtgaaccgctcgtgagcacaagtgaacccctatcttccaaaatgtataccaccagtatcacatcagatccaaaagccgactccacaggggaccaaacatccgcgcttcccccctcaacatctattaatgagggctcccccttatggacctccattggcgcatccacgggctctccccttcccgagcctactacataccaggaagtctccattaagatgtcatctgttccccaggagactccacacgctacaagccatccagctgttcctataaccgctaactcgctcgggtcccataccgtcacaggtgggactatcactactaacagcccagagacatcctcccgcacctctggggcccccgtgacaaccgccgcttcttcgctcgaaacttcaaggggaacatctggtccacctctcactatggccactgtcagcctggagacgtccaaaggcacgagtgggccaccagtgaccatggccacagattctctggagacaagcacagggactactggcccgccagtgacaatgacaaccggcagtttggagcccagtagcggtgccagcgggccccaggtgtcctccgtaaaactcagcaccatgatgagccctaccacaagtacaaatgcgtcaaccgtcccgttccgtaaccctgatgagaacagcaggggaatgctcccggtcgcagtgttagtcgccctgctggccgtgatagtcctcgtcgccctgctactgctgtggcgccgcagacaaaagagaaggaccggggcactggtgttgtcacgcggcggaaagagaaatggtgtggtggacgcctgggccggccctgcccaggtcccagaggagggtgcggttacagtgactgttggaggctcgggcggcgataaagggtccgggtttcccgacggggaggggtccagccgacgcccaacccttacaacattctttggtcgacgcaagagccgccagggttctctcgccatggaagaactgaaaagcggaagcgggccatccctaaaaggtgaggaggagcccctagttgccagcgaagacggggccgtggacgcaccagcgcccgacgaacctgaaggcggagacggcgcggcaccttag

SEQ ID NO: 205125 - DNA, 1068 bp, synthetic construct
  misc_feature 1..1068: note = Description of Artificial Sequence: Synthetic coding sequence
  source 1..1068: mol_type = other DNA
atggccaccctgctgctgctgctgggcgtgctggtggtgagccccgacgctcttggttctaccaccgctgtccagacgccaactagcggagaaccacttgtcagcacatcagaaccactgtcatcgaaaatgtataccacctccatcacaagtgaccctaaagcagatagcaccggagatcagacgtcagccctccccccttcaacaagtatcaacgaagggtccccactctggacatcaattggcgccagcaccgggtctcctctgccagaaccaactacgtaccaggaagtgagcattaagatgagcagtgtccctcaggagacccctcacgccacttcccacccagctgtaccaataaccgcaaattcacttgggagccacaccgtgaccggcggaaccatcaccactaacagtcccgagaccagtagtaggaccagcggagcccctgtcacgaccgctgctagttctctagagactagccgcgggaccagcggcccaccgctcacaatggctacagtttcattggagacgagtaaagggacatctggccctcctgttaccatggccacagattcattagagaccagtaccgggacgactggaccacccgtcaccatgacaacgggaagcctggaaccctcctccggtgcatccggtccgcaagtcagttccgtcaaactcagtaccatgatgagtcccacaacctccaccaatgcatctaccgtgcctttcaggaacccagatgagaactctagaggtatgctgccagtggccgtgctggtcgccttattggcagtaatagtgctggtggcgctgcttctcttgtggaggcgtcgccagaagagacgaactggggcgttggtcctgtcaagaggtgggaaacgcaatggggtggtagacgcttgggcagggcctgctcaagtgcccgaggaaggcgccgtgaccgtcacagtcggcgggtctgggggtgataagggaagcggatttcctgatggggaagggtccagtagacggccaactctcacaacattcttcggtaggcgtaagagtcggcaagggagctag

SEQ ID NO: 205126 - DNA, 672 bp, synthetic construct
  misc_feature 1..672: note = Description of Artificial Sequence: Synthetic coding sequence
  source 1..672: mol_type = other DNA
atgcagtgggccgtgggccggcggtgggcctgggccgccctgctgttggccgtggccgcagtgttaacacaggtggtgtggttatggctgggaactcaatcctttgtgttccaacgtgaggagatcgctcagctggccaggcagtacgcgggactcgatcacgaacttgcattttcacgtctgatcgtcgagcttaggcggctccacccaggccacgtccttccagacgaagaactacaatgggtgtttgtgaatgcgggcggttggatgggggcaatgtgcttacttcacgcctcactctcggagtatgtcctcctgttcgggacagctctggggtcccggggtcactcaggcagatattgggcagaaatctcagataccattatatcggggaccttccatcagtggcgggagggcacaaccaagtccgaggtgttttaccctggtgaaaccgtggtgcacggacccggggaagctaccgccgtggaatgggggcccaacacatggatggtggagtacggcaggggcgtgatccctagtacactggctttcgccttggcggatactgtcttttcgacgcaggattttctgactctcttctacacactaagaagctacgctagaggcctaaggttagagctgaccacatatctgttcggccaagatccctag

SEQ ID NO: 205127 - DNA, 570 bp, synthetic construct
  misc_feature 1..570: note = Description of Artificial Sequence: Synthetic coding sequence
  source 1..570: mol_type = other DNA
atgcagtgggccgtgggccggcggtgggcctgggccgccctgctgttggcggtggctgcggtgctcacccaggtggtctggttgtggttgggcttggaccacgagcttgccttcagtcggctgatcgaggagcttcagtgggtcttcgtcaatgcgggaggatggatgggggccatgtgtttgctccacgcctcccttagcgaatacgttctgctatttggcacagcattgggaagcagaggccatagtggccggtactgggcagaaattagtgacacgataatttctggtaccttccatcaatggagagagggaactaccaaaagcgaggtgttctaccctggagagacagtggttcatgggcctggagaggccacagccgtggagtggggccctaatacatggatggtggaatatggtcggggggtgataccttctacgctcgcatttgccctggcagacacagttttttctacacaagactttctgaccctgttctacactctccggtcatatgctcgaggtctgaggctggaactcaccacctacctgtttggccaggacccctag

SEQ ID NO: 205128 - DNA, 405 bp, synthetic construct
  misc_feature 1..405: note = Description of Artificial Sequence: Synthetic coding sequence
  source 1..405: mol_type = other DNA
atgggcgccatgtgcctgctgcacgccagcctgagcgagtacgtgctactctttggcaccgccctcggatctcgaggtcatagtggaaggtattgggctgagatatctgatacaattatatctggcactttccaccagtggcgggaaggtaccactaaatctgaggtattctaccctggcgagacagtggtccacggtcccggtgaagctacagctgtggagtggggccctaatacctggatggttgaatacggacgtggtgtgatcccttcaacactggccttcgcactggccgatacagttttttctacccaagacttcctgacgcttttctatacgctgcgttcctatgcacggggactacgcctcgaactgacaacctacctgtttggtcaagatccctag

SEQ ID NO: 205129 - DNA, 579 bp, synthetic construct
  misc_feature 1..579: note = Description of Artificial Sequence: Synthetic coding sequence
  source 1..579: mol_type = other DNA
atgcagtgggccgtgggccggcggtgggcctgggccgccctgctgttagccgtggcagcagtgctgacccaggtagtttggctgtggctcggcacacaatctttcgttttccagcgggaggaaattgcacagctggcgagacagtatgctggtttggaccatgaattggccttcagccggctcattgtggaacttagacgtctacacccaggacatgtcctgcccgacgaagagctccagtgggtgttcgtcaacgccgggggctggatgggggcaatgtgtcttcttcacgcatctctgtcagaatacgtgcttttattcggcactgctttgggatcacgggggcactctggcgagaccgtggtgcatggccccggcgaggctacagctgtggaatggggcccaaatacctggatggtcgaatatggcaggggtgttatcccatctactctggccttcgccctggcagacactgtatttagtactcaggacttcctcaccctgttctatactctgaggtcctatgccagaggactccgcctcgaactgactacttaccttttcgggcaggatccatag

SEQ ID NO: 205130 - DNA, 2916 bp, synthetic construct
  misc_feature 1..2916: note = Description of Artificial Sequence: Synthetic coding sequence
  source 1..2916: mol_type = other DNA
atgggcgtggccggccggaaccggcccggcgccgcctgggccgtgctgctgcttctcctgctccttccaccgcttctcctgctggcaggcgccgtcccccctggaaggggccgagctgccggcccacaggaagatgtggacgaatgcgcacagggacttgacgactgtcacgctgacgcactgtgccaaaatacacccacatcttataaatgttcatgtaagcctggctaccagggggagggaagacagtgtgaggatatcgatgagtgcggtaacgagctcaacggtggatgtgttcacgattgtctcaacatacccggcaattatcgatgtacgtgcttcgatggtttcatgttggcccatgatggacataactgcctggacgttgatgagtgtctcgaaaacaacggggggtgccaacacacctgcgtgaatgtgatggggtcatatgagtgctgttgcaaggaggggtttttcctgtctgataaccagcacacctgtatccatagaagcgaggaaggcctctcttgtatgaataaagatcatggatgctcccacatctgcaaggaggcccccaggggaagtgtggcctgcgagtgccgacctgggttcgaactcgctaagaatcagagggactgtatacttacttgtaaccacggcaacggcggttgccagcatagctgcgatgacacagctgatggccctgagtgtagttgtcatccccagtacaaaatgcacactgacgggcggtcgtgtctcgaaagagaagacactgtgctggaagtaaccgagtcaaacactacctctgtagtggacggagataaaagggttaagcggagactactgatggaaacctgtgctgtaaacaatggtggttgtgaccggacttgcaaggacactagcaccggcgtgcactgttcttgccctgtgggtttcacacttcagctggatggcaagacatgcaaggacatcgacgaatgtcaaactcgtaacgggggatgcgatcatttctgtaagaacattgtaggatcctttgactgcgggtgtaaaaaggggtttaaactgctgacggatgagaaaagctgccaggatgttgacgagtgtagcctcgatcgcacatgtgaccatagctgtataaaccatcccggcacgttcgcctgcgcctgcaacagagggtacacactgtatggattcacacattgcggggacaccaacgaatgtagcattaacaatgggggctgtcagcaggtgtgcgtgaacaccgttggtagctatgagtgtcaatgccaccctgggtataagctgcactggaataagaaggactgcgtggaggtgaaaggcctgctgcctacttcagtctcgcccagagtgtcacttcattgcggaaagtctggggggggagatggctgctttctacggtgccatagtggcatccacttatcctctggtctgcaaggcgcctatagcgtgacatgcgggtcctcatctcccctccgtaacaagcaacagaagagtaatgattcagccttcggtgacgtgacaaccattcgcacaagtgtcacctttaaactaaatgaaggaaagtgttcgctaaagaatgcggaattgtttccagaagggctgcgacccgcgcttcccgagaaacattcaagtgtgaaggagagcttccgttacgtcaacctcacatgtagtagtgggaaacaggtgcccggagctccgggtagacctagtactccaaaagaaatgtttattaccgtcgagttcgaactggagaccaaccagaaagaagttaccgctagctgcgatctgagctgcatcgtgaaacgcacggagaaacgtctgagaaaggccatcaggaccttgcgcaaggctgtccaccgggaacagtttcaccttcagctctcaggaatgaaccttgatgtggctaagaaaccaccacggaccagcgagagacaggcagagtcatgtggtgtgggccagggacatgccgagaaccaatgcgggctctgccagcccggcgagtacagcgcggacgggtttgctccctgtcatctatgcgccctgggcacgttccagcccgaagccggacggactagttgcttcccatgcggcgggggcctggccaccaagcaccagggcgccaccagtttccaggactgtgagacacgcgtccagtgttctcccgggcacttttacaacaccaccacacaccgctgtatcagatgtcccgtgggaacctatcagcccgagtttgggaagaacaattgtgtcagctgccctggcaatactaccaccgatttcgacggctccaccaacatcacccagtgtaaaaaccggagatgtggaggcgaacttggggacttcactggctacatcgaatctcctaattatccaggcaattatcccgctaacactgaatgcacctggacaataaatccgccgcctaagagacggatcctcatcgtggtgcctgagatcttcctccccatcgaagacgattgcggtgactacctcgtgatgcgcaaaacctcctcaagtaactcagtgaccacctatgaaacatgccagacatacgagcgccccatcgcattcacaagcaggtcaaagaagctgtggatacagttcaagtctaatgagggcaatagtgccaggggatttcaagtgccatacgtcacctacgatgaggattaccaagaactgattgaagatattgttcgggatggcagactttacgcctcagagaaccaccaggagatcttaaaggacaaaaagctgatcaaagccctgtttgatgtcctggcacaccctcagaactatttcaagtacacggcccaggaaagtcgcgagatgtttcctaggagctttattcgcctgcttagatctaaggtttcacgatttctgcggccatataagtag

SEQ ID NO: 205131 - DNA, 1044 bp, synthetic construct
  misc_feature 1..1044: note = Description of Artificial Sequence: Synthetic coding sequence
  source 1..1044: mol_type = other DNA
atgggcgccgccgccgtgcggtggcacctgtgcgtgctgctggccctgggcaccaggggccggctggctggcggatcgggacttcctggcagtgtggatgtggacgaatgttctgaaggtacagacgattgtcatatcgacgccatctgtcaaaacacgccaaagtcatataaatgcttgtgtaagcccggctacaaaggggaaggaaaacaatgtgaagatatcgacgagtgcgaaaacgattactataacggcggatgcgtccatgagtgcataaacatcccaggcaactaccgctgcacctgtttcgacggctttatgttggctcacgatgggcataattgcctcgacgtggatgagtgccaggataataatggcggctgtcagcagatttgcgtcaacgccatgggctcctacgagtgccagtgtcactctggattctttctgagcgacaatcagcatacctgcattcaccgctcaaacgaaggaatgaactgtatgaataaagatcacggttgtgcgcacatttgtcgtgaaactcccaaaggcggagtggcctgcgattgccgccccgggtttgacttagctcagaaccagaaggattgcaccctcacctgtaattacggcaatgggggatgtcagcatagctgcgaagacactgacactgggcccacgtgtggctgccatcagaagtatgccctccactctgacggacgcacttgcatcgagaaagatgaggctgcaatcgagaggtcccagtttaatgctacgtccgtagccgatgtggacaaacgggtcaaaaggcgtctactgatggaaacctgcgctgtgaataatggcgggtgcgacaggacgtgtaaagacaccgccacgggcgtgcgctgttcctgtcccgtcgggtttaccctgcagcccgacggtaaaacttgtaaaggacagcacgtcgagctctgcggctgtccatgtctgtactggcccggccaggaacccccctgcgcgtgtattgctggcccgcgcgctggactgaatggaggacatgtttag

SEQ ID NO: 205132 - DNA, 2967 bp, synthetic construct
  misc_feature 1..2967: note = Description of Artificial Sequence: Synthetic coding sequence
  source 1..2967: mol_type = other DNA
atgggcgccgccgccgtgcggtggcacctgtgcgtgctgctggccctgggcacacgtggacgcctagctggtgggagtgggttgcctggctcggtggatgtcgacgagtgtagcgaagggaccgatgactgccatatcgacgcaatatgccagaacactcctaaatcatacaaatgcctgtgcaaacctgggtacaaaggtgaaggaaaacagtgcgaagatatcgatgaatgcgagaatgattactacaacggcggctgtgtgcatgaatgtataaacatccccgggaattatagatgcacttgcttcgatggctttatgctcgctcatgacggacataactgccttgatgtggatgagtgtcaggacaacaacggtggatgccagcaaatctgcgtgaacgcaatgggcagttatgaatgccagtgtcatagtggatttttcctaagtgataaccagcatacctgcatccatcgaagtaacgagggtatgaactgcatgaacaaagatcatggctgcgctcacatctgccgcgagactcctaaaggtggggtggcctgcgattgccggcccgggttcgatctggctcaaaatcaaaaagactgcacactcacctgtaattatggcaatggcggttgtcagcactcttgcgaagacaccgataccggtccaacttgcggatgccatcagaagtatgcactccattcagacggcaggacctgcatcgaaacctgcgccgtgaataacggcggctgtgatcgcacatgcaaggataccgccaccggtgttagatgttcctgcccagtgggcttcacactgcagccagatgggaagacctgtaaagatattaacgaatgtctcgtgaacaatggagggtgcgaccacttctgtcgcaatacagtgggtagttttgagtgtggctgtaggaagggctacaaacttctgacagatgaacgaacttgccaggacattgatgagtgctccttcgagcgcacatgcgaccatatctgtatcaacagccctggctcatttcaatgcctgtgtcaccgcggctacatcttgtatggtactacccactgtggcgacgtagatgaatgtagcatgtcaaacgggtcttgcgatcaaggctgtgtgaatacgaaagggagctacgaatgcgtctgtccaccgggtaggcgcttgcattggaacggtaaagattgtgtggagactgggaagtgcctgtcgagagccaagacaagccctcgcgcgcagttgtcctgcagcaaggccggtggcgtagaatcatgttttctgtcctgcccagcgcacaccctgtttgtacctgactcagagaattcctacgtgctgtcctgtggagtgcccggaccgcagggtaaagctctgcagaagagaaacggcacatcttccggcttgggaccctcttgttcagatgctccgaccaccccgattaaacaaaaagcaaggtttaagatcagggacgccaaatgccatttgcgccctcactctcaagcacgggccaaagagacagcaagacagcccttgttagaccactgccatgtcacatttgtgactctgaagtgtgacagctcaaagaaaagacgccgggggcgaaaatctcctagcaaagaggtctctcacattacagcggaattcgagattgagacaaaaatggaagaagcttcagatacctgcgaggccgactgccttcgaaagcgagctgaacagtccctccaagctgcaattaaaacactgaggaaatccatcggaaggcagcagttttatgtgcaggtttccggcacagaatacgaagtcgcccagcgtcctgctaaggccttggagggtcagggagcttgcggggccggccaggtgttacaggattcaaagtgcgttgcatgcgggcccggcactcatttcgggggcgagctggggcaatgcgtgtcttgcatgcctggtacttaccaggacatggaggggcagctgtcttgcactccttgtccttccagcgatggactgggactcccaggagcccggaacgtgtcagaatgcggaggacaatgttctccagggttcttttcggcggacggttttaagccgtgccaggcctgtcctgtgggcacctatcaacccgagcctggtagaacagggtgcttcccgtgtgggggcggtctgctaaccaaacacgagggaaccacctctttccaggattgtgaggctaaggtccattgcagccctggccatcactacaataccactactcatcgttgtattaggtgccctgtgggtacctatcagccagagtttggacagaatcactgtattacctgccccggaaacacatctacagacttcgacggctctaccaatgtcacacactgtaaaaaccagcattgcgggggcgagttaggggactataccggctacattgagtcccccaattaccccggagactatccagcaaatgctgaatgcgtctggcatatcgccccacccccaaagaggcggatcttgattgtcgtccccgaaatcttccttccaatcgaggatgagtgcggcgacgttctagtgatgcgcaagtccgccagccctactagcatcacgacctacgaaacctgtcaaacctacgagaggccaattgcctttacctctcggagcaggaaactgtggatccagtttaagagcaacgaaggcaattctggaaaaggatttcaagttccctatgtcacctatgatgaggactatcagcagttgatcgaagacatcgtgagggacggccgattgtatgccagcgaaaaccaccaagaaattttgaaggacaaaaaattgatcaaagccctctttgacgtgctggcgcatccccagaactactttaagtatacggcgcaagaaagtaaggaaatgttcccgagatcttttatcaagctcttgcggtctaaggtgtcgcggttcctgaggccctataaatag

SEQ ID NO: 205133 - DNA, 1857 bp, synthetic construct
  misc_feature 1..1857: note = Description of Artificial Sequence: Synthetic coding sequence
  source 1..1857: mol_type = other DNA
atggagaccgaggccgccagcaccgccgtgcggacccagacccaggctcctagagtcgtagccacacgtagcactccgagcacccagaccgtggctcgggcttcgcggagagctcagagcattaccgaggcggccaccggtcacgctcggactcaaccacttgcttgcgacgccgcggccccgcttgattcacactgcagcagaactggacgccacgctaaaacctctacatccgcttggtctacaacagaggccgcaacaacctctgcagcaacaccgtgggccgcatcctccgccgccgccggaagggctacgtcttgttcccctacatctgcccccgcccgtacgagcacttccgcaccttcttccggacccgtgactactagcgcctccactccacaggcgcgggcaaaagaaaccgccagacagcccctgctggaccactgtcatgtgactttcgtgacattgaagtgcgactctagcaagaagcgcaggcggggacgcaaatcgccgtctaaggaggttagtcatatcacagcagagttcgagatcgaaaccaagatggaagaggccagcgatacttgtgaagctgattgtcttaggaagcgcgctgaacagagcctgcaggctgccattaaaactctgcgaaaaagtatcggccggcaacagttttacgtgcaggtaagcggcactgagtacgaggtagcccagcgaccggcaaaggcactggaggggcaaggggcatgtggggccgggcaggtgttgcaggatagcaaatgtgtggcttgtggccctggaactcacttcggcggggagctcgggcaatgtgtgagttgcatgcctgggacataccaggatatggaaggacaactgtcgtgcaccccttgtccatctagtgacggactcggcctgccaggggcccgcaatgtaagcgagtgcggcgggcagtgcagccctggattctttagtgcggacggttttaagccgtgccaagcctgcccagttggaacgtaccaacctgaaccaggcagaaccgggtgctttccatgcggaggcggcctgctgacaaagcacgaagggaccacatcattccaggattgtgaagctaaggtgcattgctccccaggacaccactataacacgaccactcaccgttgcatacgttgccccgtaggcacataccagccagagtttggccagaatcattgtattacctgtccaggtaacaccagtactgatttcgatgggtctacaaacgtgacacactgtaaaaatcagcattgtggcggagaattgggtgactacaccgggtacatcgagagcccaaattaccctggcgattaccccgcaaatgctgaatgtgtttggcacatagctcccccacccaaacgacgcatcctgatcgtcgtccccgaaattttcctgcccatcgaggatgaatgtggagatgtgttggtcatgaggaagtcagccagccctaccagcattacaacctacgagacctgccagacttatgagagacccattgcttttacctcccgctctcgaaaactctggatccaattcaagagtaatgaaggaaacagcggaaagggcttccaggtgccctacgtcacatatgacgaagactaccagcagttgatcgaagacatcgtgagggatgggagactctacgcatctgaaaatcatcaggagattcttaaggacaagaagcttatcaaggccctgttcgatgtgttagcgcaccctcagaactattttaaatacactgcccaggagtccaaggagatgttcccgcgcagctttataaagctgttgaggtctaaggtgagtcgatttttaagaccttataaatag

SEQ ID NO: 205134 - DNA, 1092 bp, synthetic construct
  misc_feature 1..1092: note = Description of Artificial Sequence: Synthetic coding sequence
  source 1..1092: mol_type = other DNA
atgggcgccgccgccgtgcggtggcacctgtgcgtgctgctggccctcgggaccaggggccgcctggccgggggtagcggactgcctggctcagttgacgtggacgagtgcagcgaaggtactgatgactgtcatatcgatgcgatctgtcaaaacacccctaaatcctataagtgtctctgcaagccgggatacaagggagagggaaagcaatgcgaagacatcgatgaatgcgagaatgattactataacggcgggtgcgtccatgagtgtatcaatatcccaggcaactaccgctgtacttgctttgacggttttatgctggcacacgatggccataattgtctcgatgtagatgagtgtcaggacaacaacggcggttgccagcagatatgtgtgaacgccatgggctcctatgaatgccagtgtcacagtgggtttttcttatcggacaaccagcacacctgtatacatcggagcaacgaagggatgaactgcatgaacaaggaccacggatgcgcacacatctgcagagaaaccccgaagggtggagtggcttgcgattgtaggcccggctttgacttggctcagaaccaaaaagactgcactcttacctgcaactatggtaatggcgggtgccagcattcttgcgaggataccgatactggccctacgtgcggatgccatcagaagtatgctctccactccgacgggcgcacctgcatcgagacctgcgccgtcaacaacggtggctgcgatcgtacctgcaaggataccgcaaccggcgtgagatgcagttgccccgttggttttacactgcagccagatggtaagacgtgtaaagatattaacgaatgtttggttaataatggaggttgcgatcacttctgtcggaatacagtcggcagcttcgagtgcggttgcagaaaaggctataaacttctgaccgacgagcggacctgccaggatatagacgagtgctcctttgaacgcacctgcgatcatatctgtatcaattcgcccgggtctttccagtgtctgataaagttgctcaggagtaaagtgagtcggtttctgcgcccttacaagtag

SEQ ID NO: 205135 - DNA, 528 bp, synthetic construct
  misc_feature 1..528: note = Description of Artificial Sequence: Synthetic coding sequence
  source 1..528: mol_type = other DNA
tgacgggagacccccaagggcggcgtggcctgcgactgccggcccgggttcgacctggcccaaaatcaaaaagactgcaccctgacatgtaactacggtaacggcggatgtcagcatagttgcgaagatacagacaccggtcctacttgcggatgtcatcagaagtacgccctgcatagcgacggtcgcacctgtattgagaaagacgaggctgcaatagaacggtcccaattcaatgccaccagcgtcgccgacgtggataaaagggtcaagcgaaggctactgatggaaacatgtgctgtgaacaacggtggctgcgaccggacctgtaaggatactgcgaccggtgttcgttgctcttgtcccgtcgggttcaccttacagcccgacggtaagacatgtaaagacattaatgaatgtctggtgaacaacgggggatgcgaccatttctgtaggaatactgtgggttctttcgaatgtgggtgcaggaaagggtacaaattgctcaccgacgagcgtacatgttag

SEQ ID NO: 205136 - DNA, 3000 bp, synthetic construct
  misc_feature 1..3000: note = Description of Artificial Sequence: Synthetic coding sequence
  source 1..3000: mol_type = other DNA
atgggcgtggccggccggaaccggcccggcgccgcctgggccgtgctgctgttgctgcttctgctgccaccactactgctactagctggcgcggtcccgcccgggaggggcagagctgcaggtcctcaggaggatgtcgatgagtgcgcccaggggctggatgattgccatgcggacgccctgtgtcaaaatacccctacatcgtacaaatgttcatgcaaaccaggttatcaaggagagggacgccagtgcgaggatatcgacgagtgcggtaacgagctgaatggcgggtgtgtgcacgactgcctcaatataccggggaattatagatgcacttgctttgacgggttcatgctggcccatgatggtcataactgcctagacgtggatgaatgcctggagaataacggcggctgccagcacacatgtgtcaatgttatgggcagctatgaatgctgttgtaaagaaggcttctttctttcggataaccaacacacatgtattcacaggtctgaagaggggctttcctgtatgaacaaagatcacggatgttctcacatttgcaaagaagctcctaggggatctgttgcatgcgagtgtcgacccgggtttgaactcgctaaaaaccagcgagactgcatattaacgtgcaaccacggcaatggcgggtgtcagcactcttgtgatgacactgccgacggaccggaatgttcctgtcaccctcagtacaaaatgcatacagatgggcggtcatgcctcgagcgcgaggacaccgtcttagaggtgaccgagtctaacacgacgagcgtggtagacggcgacaagcgagtcaaaagacgcctcctgatggaaacctgtgctgtgaacaacgggggatgcgatcgtacctgcaaggacaccagcaccggggtgcattgctcctgcccagtaggctttactttgcagctggatggaaaaacgtgcaaagacatcgatgagtgccaaacacggaacggaggatgcgaccatttttgtaaaaatatcgtcggtagcttcgactgcgggtgtaagaaaggatttaagctgctgaccgatgagaagagttgtcaggatgtcgacgagtgttcactggacaggacatgcgatcacagctgcatcaatcaccccggtacgtttgcatgtgcctgtaatagaggatacactttgtatgggtttacacattgcggggatactaacgagtgtagtataaacaacggtggctgtcaacaggtgtgcgtgaacacggtgggaagctatgaatgccagtgccaccctggatacaaactacattggaacaaaaaggactgtgttgaggtaaaggggcttctgcctacttcggttagcccgcgagtgtctctccactgtggtaagagcggcggaggcgatggctgcttcctccggtgtcatagcggaattcacctgtcctcggacgtcaccactattcggacaagcgtgacgttcaaacttaatgagggcaaatgctccctgaaaaatgcagaacttttccccgagggcttaaggccggctctgccagagaagcacagtagtgtcaaggaaagttttagatatgttaacctcacttgttctagtggaaagcaggtaccaggagcacccggccggccaagcactccgaaagagatgtttatcaccgtggagttcgaactggagacaaaccagaaggaggtcactgcatcctgcgatctctcttgcatcgtgaagagaactgagaaaaggcttcgaaaagccattaggacactcagaaaagcggtgcaccgcgaacaattccacctccagctcagtggcatgaaccttgatgtggccaaaaagcctccacggacctcagagaggcaggctgagagctgtggcgtgggccagggtcacgccgagaatcagtgtgtgtcatgtagagccgggacttactatgacggcgctcgagagagatgcatactctgccccaatggcactttccagaacgaggagggacaaatgacatgcgagccctgtcctcgacctggaaacagtggggcactgaagacgcctgaagcatggaatatgagcgagtgcggcggcctgtgccagccaggcgaatacagtgcagacggattcgcgccctgccatttatgcgccctcggaacgtttcagcccgaggcggggaggaccagctgcttcccctgcgggggagggttagctaccaaacatcagggagcaacctccttccaggactgcgagacccgcgtgcagtgctcgccgggtcacttttataacacgacaacacacagatgcattcgatgcccggtgggcacataccagcccgagttcgggaagaacaattgcgtgagttgtccgggaaataccactaccgacttcgacgggagcacgaatatcacccagtgtaagaaccgacgttgtggtggtgagctgggagacttcaccggttacattgagagtcctaactaccctggtaattaccccgcgaacactgaatgtacatggaccatcaatccgccacccaaacggcggatcctgattgtggttccggaaatctttttgccaatcgaagatgactgtggtgactacctggtgatgagaaaaacgagctccagtaatagtgtgactacatatgaaacttgtcaaacatatgagcggcctattgctttcacaagccggagtaagaagttatggatccagtttaagtccaatgagggtaacagcgcccgcggtttccaggtcccctacgtgacctacgatgaggactaccaagagctgattgaagacatcgtgagagatggacgactttacgctagtgaaaaccatcaagagattcttaaggataagaagctgatcaaagccctttttgatgtcctggcccacccacagaactacttcaagtataccgcccaggagtcacgcgaaatgtttccaaggtcgttcatcaggttactgcgtagcaaggtgagccggtttttgcggccttacaaatag

SEQ ID NO: 205137 - DNA, 2424 bp, synthetic construct
  misc_feature 1..2424: note = Description of Artificial Sequence: Synthetic coding sequence
  source 1..2424: mol_type = other DNA
atgggcgtggccggccggaaccggcccggcgccgcctgggccgtgttgctcttgctgctcttactccctcctctactgctcctggcaggcgccgtaccacctggaagaggtcgggccgctggaccccaagaagacgtggatgaatgcgcacagggtttggacgattgccacgcggacgcattgtgtcaaaacactcctacttcctacaaatgttcctgtaagccgggatatcagggcgagggtaggcagtgtgaggatatagatgagtgtggaaatgagctcaacgggggctgcgtgcatgactgtctgaatatccccggcaattataggtgtacctgtttcgacggctttatgctggcgcatgatggccataactgtcttgacgtagacgagtgtttagaaaataatggcggctgccagcatacatgcgtaaacgtcatgggcagctatgagtgttgctgtaaggagggatttttcctgtccgataatcagcacacgtgtatacatcgctctgaagagggtcttagttgcatgaacaaagatcatgggtgttcacatatctgcaaggaggcacctaggggtagcgtggcctgcgagtgtaggcctgggtttgagctagcaaagaatcagcgcgactgcatcctgacctgcaatcatgggaacggcggatgccagcatagctgtgacgataccgcagacggccctgaatgctcctgtcacccacaatataagatgcacactgatggacgatcctgtctggagcgggaagacaccgtcttagaggtgactgagtcaaatactacatctgtcgtggacggtgacaagcgtgtcaaacgtcgccttctgatggaaacctgcgccgtgaacaacggcgggtgtgaccgcacatgcaaagatacatccaccggggttcattgctcatgtcctgttggcttcacactgcagctagatggcaaaacttgtaaagacattgacgagtgccagacaaggaatggtggatgcgaccatttctgcaagaatattgtggggagctttgactgcggctgcaagaaggggttcaagttactgacagacgaaaaaagttgtcaagatgtagatgagtgctcccttgacagaacttgtgaccatagctgcatcaatcatccaggaacctttgcctgcgcatgcaaccgggggtatacactgtacggtttcacccattgtggggacactaatgaatgtagtattaataacggcggatgccagcaggtatgcgtgaataccgtagggagctatgagtgccagtgccatccaggatacaagttacattggaacaaaaaagattgtgtggcctcatgcgatctgagttgcattgttaaaaggacggaaaagcgactgaggaaagcaataaggactctgcggaaggccgttcaccgggagcagtttcacctgcagctctcaggcatgaatttagacgtcgccaagaagccaccaaggacatccgagcgccaggccgagtcctgtggggtgggccagggacacgccgagaatcagtgtgtaagctgtagagctggcacctattatgacggagcgagggagcgctgtatactgtgccccaacggcacatttcagaatgaggagggtcagatgacttgtgagccatgcccaaggccggggaactcaggtgccctcaaaactcctgaagcctggaacatgtccgaatgcggggggctatgccagcctggtgaatacagcgccgacggattcgctccctgccatctgtgtgccctgggcacttttcagccagaggctggcagaaccagctgttttccctgcggcggtggactcgctaccaaacatcagggggctactagcttccaggattgtgaaaccagggtgcaatgttcgcctggccacttctacaatacaaccactcaccgttgtattagatgtccagtgggtacataccagccagaatttggcaagaacaattgtgtatcttgccccggaaacactactacagacttcgacggatcaaccaatatcacgcaatgcaaaacatccagcaatagcgtaacgacatacgaaacctgtcagacctacgagaggccgatagcttttacgtctcggagcaaaaagctgtggatccagttcaagtcaaacgaaggaaatagtgcaagaggatttcaggtcccatacgtgacttacgatgaagactatcaagaattaatcgaggatattgtcagagacggaagactttacgcttctgagaatcaccaggagattctaaaggataagaaattgatcaaagcactcttcgatgttctcgcccacccccagaattatttcaaatacaccgcccaggagtcccgtgagatgtttcctaggagctttattaggttgctgaggagcaaggtctctcgattcctcagaccttacaagtag

SEQ ID NO: 205138 - DNA, 3087 bp, synthetic construct
  misc_feature 1..3087: note = Description of Artificial Sequence: Synthetic coding sequence
  source 1..3087: mol_type = other DNA
atgggcgtggccggccggaaccggcccggcgccgcctgggccgtgctactgttgttgctactgctcccccctctgctcttactggctggggcggttccccccggacggggacgggccgcaggtccccaggaggatgttgacgagtgcgcacagggactggatgactgccacgccgacgccctttgtcagaacacacccacatcctacaagtgctcgtgcaaaccaggctatcagggggaaggaagacagtgtgaggacatcgacgagtgtgggaacgagctcaacggcgggtgcgtgcatgattgtctgaatattcccggtaattacagatgcacatgcttcgacggcttcatgctcgcccacgatgggcacaattgcctcgacgtcgacgagtgcctagaaaataacggagggtgtcaacatacgtgcgttaatgtgatggggtcttacgagtgctgttgcaaagaagggtttttcctttcggacaaccagcatacatgcattcatcgatccgaagaggggctgtcctgtatgaataaggaccacggttgtagccatatctgcaaagaagctcctcggggttcagtggcctgcgaatgcaggcccggctttgaactagccaaaaaccagagagactgtatactgacttgtaaccacggcaacggggggtgccagcatagttgcgatgataccgctgacggccccgaatgctcttgccaccctcaatacaagatgcacactgacgggagatcttgcctcgaaagggaagatacagtcttagaagtcacagagtccaacaccacatccgtggtagatggggacaaacgtgtgaaacggaggctcctcatggaaacgtgcgccgttaacaatggcggatgtgaccggacgtgtaaagatacttctactggagtccattgctcttgccccgtcggatttacactgcagctcgatggaaagacctgcaaggacattgacgagtgccagacgcggaatggagggtgcgatcacttttgtaagaatatcgtaggcagcttcgattgcggatgcaaaaaggggtttaagctcttaaccgacgaaaagagttgtcaagacgtggacgaatgctccctagatagaacatgcgatcattcatgcatcaaccaccctgggacttttgcctgtgcttgtaaccgtggctatactctgtatggctttacccactgtggcgatacaaacgagtgttctatcaataatgggggttgccagcaggtttgtgtcaacacagttggctcgtacgaatgccaatgccatccaggctacaaattgcactggaacaagaaggactgtgtcgaggtaaagggactcctgccaacgtctgtatcgccgcgtgtgtcactccactgcggcaagtccggggggggagatgggtgctttctgaggtgtcacagcgggatacacctctccagcggtttacagggcgcgtactcagtgacgtgcggttcatcttctccactgcgaaacaagcagcagaagagcaacgatagtgcttttggagatgtgaccacaatccgaacttccgtgacattcaagttgaacgaagggaaatgctctcttaagaacgcagagctatttccggaaggcctgcgccccgccctgcctgaaaagcacagtagtgtcaaagagagctttagatatgtgaatctcacctgctccagtggaaagcaagtgcccggcgcccctgggagaccctctacgcctaaagagatgttcattactgtggagtttgaattggaaaccaaccagaaggaggtgacagcttcctgtgacttgagttgcattgtcaaacgtactgaaaagcggctgcgaaaagctattcgaaccctgcggaaagctgttcaccgagaacagttccacctccaactgtccggcatgaatctagacgtggcgaagaagcctccccgcacaagcgaacgacaagcagagtcttgtggggtgggtcaggggcacgcggagaatcagtgtgtctcttgccgcgctggaacctattatgatggcgccagggagaggtgcattctctgccctaacggcacctttcagaatgaggagggccagatgacgtgtgaaccttgtccgcggcccggcaattcaggagccctgaaaacccctgaggcctggaatatgagtgagtgcgggggcctctgtcagcccggagagtattccgcggatgggtttgctccctgtcacttatgtgccctgggaacgttccagcctgaagccgggcggacatcatgctttccttgcggagggggcctcgccactaaacatcagggtgccacatcatttcaggattgcgagacccgcgtacagtgttccccgggccatttttacaataccacaactcatagatgtattcggtgcccagtggggacctaccagccagagtttggtaagaataattgcgttagctgcccaggcaataccaccacggattttgacggcagcacaaatatcacacaatgcaagaaccggcgttgcggtggcgagcttggcgactttactggttatatcgagtcccccaattatcctgggaattatcctgcaaatactgaatgcacgtggacaataaatccacctccgaaaagacgcatcctcatcgttgtgcctgagattttccttcccatcgaggacgattgcggagattaccttgtcatgcggaagacctcctccagtaactcagtgaccacctacgagacctgccagacatatgagcgccctattgcgtttactagcagaagtaagaaactgtggattcagtttaaatcaaacgagggtaacagtgcccgcgggttccaagtgccatacgtgacctatgacgaggattaccaagagctgatcgaagacattgtccgtgacggcagactttatgcatccgagaaccatcaagaaatactgaaagacaagaaactcattaaagcattatttgacgtcctcgcccacccccagaattactttaagtacactgctcaggaatctagggagatgttccctagaagcttcatcagattgctcaggagtaaggtgagccgattcctccggccatacaagtag

SEQ ID NO: 205139 - DNA, 411 bp, synthetic construct
  misc_feature 1..411: note = Description of Artificial Sequence: Synthetic coding sequence
  source 1..411: mol_type = other DNA
atggtgctgctggagagcgagcagttcctgaccgagctgacccggcttttccagaagtgccggacaagcggcagtgtatacataacactcaaaaagtacgacggaagaactaagcccattccgaaaaagggcacagttgaggggttcgagccggcagacaacaaatgcctcctgagggcgaccgatggcaaaaaaaaaatcagtactgtcgtttcctccaaggaggtgaacaagttccaaatggcttattctaacctgttaagagcgaatatggatgggctcaaaaaaagagataaaaagaacaaaactaaaaagactaaggcagcagctgccgcagccgccgcagctccggccgctgccgccactgccccaacaaccgctgctacaactgcagcgaccgccgcacagtag

SEQ ID NO: 205140 - DNA, 333 bp, synthetic construct
  misc_feature 1..333: note = Description of Artificial Sequence: Synthetic coding sequence
  source 1..333: mol_type = other DNA
atggcctgcgccgccgcccggagccccgccgaccaggaccggttcatttgcatctaccccgcctacctgaataataagaaaacaattgcggagggtagacggattcccatctcaaaagccgtggaaaatccgaccgctactgaaatacaggatgtctgcagtgccgtcggactgaatgtatttctggagaagaataagatgtacagcagagagtggaaccgagacgttcagtacagaggcagagtgagggtgcaactgaaacaggaagacggcagcctgtgcctcgtgcagtttccatcccattatactttaagcctgacctccggatcttag

SEQ ID NO: 205141 - DNA, 435 bp, synthetic construct
  misc_feature 1..435: note = Description of Artificial Sequence: Synthetic coding sequence
  source 1..435: mol_type = other DNA
atggcctgcgccgccgcccggagccccgccgaccaggaccggttcatctgcatatatccagcctacctcaataacaaaaaaactattgcagagggtcgccgaatccctatctcaaaggcagtcgagaaccccaccgccaccgaaatccaggacgtatgttctgctgtcggactgaacgtctttttggaaaaaaacaaaatgtacagccgcgagtggaaccgggacgtccagtaccggggtagggtcagggtgcagctgaagcaggaggatggcagtctatgccttgtacagtttccctcaagaaaaagtgtcatgttatatgccgccgaaatgatcccgaagctgaagacgaggactcagaagactggcggcgccgaccaatcactccaacaaggagagggttctaagaaaggcaagggtaaaaagaagaagtag

SEQ ID NO: 205142 - DNA, 237 bp, synthetic construct
  misc_feature 1..237: note = Description of Artificial Sequence: Synthetic coding sequence
  source 1..237: mol_type = other DNA
atggcctgcgccgccgcccggagccccgccgaccaggaccggctgctcaagattttgcaactgcagcggtttaaaatgtacgtgcagcagctcgatttaacctatttcctgcgtaaaatcaagtgtactctggagaatgggatcgtgatgtctaatactgaggccgaatcaggtagctcttccaatagaaagatgggggcatctgccctgtatagtagtcatcatgtcagccagtag

SEQ ID NO: 205143 - DNA, 639 bp, synthetic construct
  misc_feature 1..639: note = Description of Artificial Sequence: Synthetic coding sequence
  source 1..639: mol_type = other DNA
atggaggccaagaccctgggcaccgtgaccccccggaagcccgtgctgagcgtaagcgcacgaaaaatcaaggacaacgccgctgactggcacaatctgatcctgaaatgggagaccctcaatgacgcaggatttacgacagctaataatatcgcaaacctgaaaattagccttcttaacaaggacaaaattgagctggattcctcatccccagcaagtaaggagaacgaagagaaggtctgcctggagtacaacgaggaactcgagaagttgtgtgaggaattacaggccaccttggatggactgactaaaatccaggtgaaaatggaaaagctctcatccacgaccaaaggaatatgtgagctcgagaactatcactacggagaggagagtaagagacctccactatttcacacatggcctacgacccacttctacgaggtttctcataagttgttagaaatgtaccgcaaggagttgctgttgaaaagaacggtggccaaggaactcgcccacactggcgacccagatttgacccttagctacctgtctatgtggcttcaccaaccgtatgtcgagtcagatagcaggctgcacttggagagtatgctgctcgaaacaggtcacagggccctgtag

SEQ ID NO: 205144 - DNA, 1368 bp, synthetic construct
  misc_feature 1..1368: note = Description of Artificial Sequence: Synthetic coding sequence
  source 1..1368: mol_type = other DNA
atgccccccctgagcatgaagcggagcgccatcgacctggaggagatggcttcaggcctgaataagaggaagatgatccagcatgcggtgttcaaggaattagtgaagctagtagacccaggtgtaaaagcttggactcccacaaagggcaagcaaaacgtcataatgttcgtcggcctgcagggatctggcaaaacaactacctgttcaaaactcgcctactattatcagcggaagggttggaaaacctgcctgatttgtgctgatacattccgggcaggggccttcgatcagttgaagcaaaacgccactaaggcaaggatccctttctacgggtcttataccgagatggatcccgttattatagccagtgaaggggtggagaagttcaagaacgaaaacttcgaaattatcatcgtggatacttcgggaagacacaagcaggaagactcattattcgaggaaatgcttcaggtagcaaatgcaatccagcccgataacatcgtgtacgtcatggatgccagcatcgggcaggcctgtgaggctcaggccaaagcctttaaggacaaggtggatgtggcgtcggtgatcgtaacgaagcttgacggacatgcaaaaggcggaggagctctgtctgccgtagccgcaacaaaaagccccatcatttttatcgggactggtgagcatatcgatgatttcgagccatttaaaacacaaccctttatctccaaactgcttgggatgggtgatatcgagggtcttatcgataaggtgaatgagttgaagttggacgataatgaggcattgatagaaaaactaaaacacggtcagttcacgctgcgggatatgtacgagcagtttcaaaatattatgaagatgggcccctttagccagatcttgggcatgattccaggcttcggaacagattttatgagcaaaggcaatgaacaggaatctatggctcgcctaaagaaattgatgacaattatggactccatgaatgatcaggaacttgatagcaccgatggcgctaaggtcttctctaaacagcccggtcgcatacaacgagtggcccgtggctccggcgtgtcaactagggatgtgcaggaactcctgacacaatacacaaaattcgcccagatggttaagaagatggggggcataaaaggactgttcaaaggaggtgacatgagtaaaaacgtgtcccagagccagatggcaaaactgaaccagcagatggctaagatgatggacccaagggtcctgcatcacatgggtggaatggcaggcctgcaaagcatgatgagacagttccagcaaggcgccgctggaaacatgaagggaatgatgggctttaacaatatgtag

SEQ ID NO: 205145 - DNA, 135 bp, synthetic construct
  misc_feature 1..135: note = Description of Artificial Sequence: Synthetic coding sequence
  source 1..135: mol_type = other DNA
atggtgctggccgacctgggccggaagatcaccagcgccctgcggagcctgagcaacgcaacaataatcaacgaagaagtgctgaatgctatgctgaaagaggtgtgcacagccttgctcgaggccgacgtctag

SEQ ID NO: 205146 - DNA, 225 bp, synthetic construct
  misc_feature 1..225: note = Description of Artificial Sequence: Synthetic coding sequence
  source 1..225: mol_type = other DNA
atggtgctggccgacctgggccggaagatcaccagcgccctgcggagcctgagcaacgctaccattattaatgaggaggtccttaacgccatgttaaaagaggtgtgcactgctctgctggaggccgatgtgaacattaagcttgtgaaacagttgcgagaaaacgtgaagagtgccattgatcttgaggaaatggcttcgggcctaaataaacggaagatgtag

SEQ ID NO: 205147 - DNA, 1515 bp, synthetic construct
  misc_feature 1..1515: note = Description of Artificial Sequence: Synthetic coding sequence
  source 1..1515: mol_type = other DNA
atggtgctggccgacctgggccggaagatcaccagcgccctgcggtctctaagcaatgccaccataataaatgaggaagtcctgaacgccatgcttaaggaggtgtgtactgcactcttagaagccgacgtcaatatcaagcttgttaaacaactccgcgagaacgtaaaaagcgccattgatctcgaagagatggcctcagggcttaataagcggaagatgatccaacatgctgtattcaaggagctagtaaaactggtcgatcctggtgtcaaagcttggacgcctactaagggcaaacagaacgtgattatgtttgtgggcctgcagggcagtggaaagaccaccacctgttcaaaattggcttactattaccagaggaagggttggaaaacctgtctcatatgcgctgatactttccgggctggcgcattcgatcaactaaagcagaacgccactaaggcccggatccctttttatgggagctacaccgaaatggacccagtaatcattgcctctgagggagtggaaaaatttaagaacgagaacttcgagatcatcatcgtagacacgagcggcaggcacaaacaagaggatagtctcttcgaggagatgctgcaggtggcaaacgcgatacagcctgacaatatcgtgtacgtcatggacgcgagtatcggccaggcgtgtgaggctcaggctaaagcttttaaggataaagtggacgtggcgtccgtgatagtgactaaattagatgggcacgccaagggaggcggcgccctgagcgctgtcgccgctaccaagagtcctatcatcttcataggcacgggtgagcatattgacgatttcgagccttttaagacacagccattcatctctaaactcctcggcatgggagacatagagggcctcatcgataaggtgaacgagctcaagctggatgataacgaagccctgatcgagaaactgaaacatggccagtttacactcagggacatgtacgaacagtttcagaacattatgaagatgggtcctttctcacaaatactgggcatgatacccggattcggtaccgacttcatgtccaagggaaacgaacaggagagcatggcccgtctgaagaaactgatgacgataatggacagtatgaacgatcaggagctggacagcactgacggagccaaagtgttcagcaagcagccaggccgtattcagagagtggctcgcgggtctggagtgtctacacgggacgtccaggagctgctgacacagtatactaagtttgctcaaatggtgaaaaagatgggtgggattaagggactgttcaagggcggagacatgtctaagaatgtctcgcaatcccagatggctaaactgaatcagcagatggcaaaaatgatggatccccgggtccttcatcatatgggcgggatggcaggtctgcaatcgatgatgcggcagtttcagcagggagcagcaggcaatatgaagggaatgatgggcttcaacaacatgtag

SEQ ID NO: 205148 - DNA, 1791 bp, synthetic construct
  misc_feature 1..1791: note = Description of Artificial Sequence: Synthetic coding sequence
  source 1..1791: mol_type = other DNA
atggccgccgagaagcaggtgcccggcggcggcggcggcggcggcagcggaggagggggaggatctgggggtggtggatccggagggggtagaggggcgggaggggaggagaacaaggaaaatgagcgccctagcgccggtagcaaggcaaacaaagaatttggcgactctttatccctggagatcttgcaaattataaaggaaagccaacaacagcacggcctgaggcacggggactttcagcgctacaggggatattgcagtcgcaggcagcggcgcctacggaagactctaaattttaaaatgggtaaccgtcacaagttcacaggcaaaaaggtaactgaggagctgctgaccgacaacagatatcttctgctggtgctgatggacgccgaacgcgcatggtcctacgctatgcagctgaagcaggaagccaacaccgaaccacgcaagcggttccacctactgagccggttacggaaggccgtaaaacatgcagaagagctcgagaggttgtgtgagagcaaccgagtagatgccaagactaaattggaggctcaggcctataccgcatatctgtctggcatgctcagattcgaacaccaagaatggaaagccgctatcgaggcgtttaataagtgcaagaccatatatgagaagctagcctccgctttcacagaagaacaagctgtgctttataatcagagagtggaggaaataagccctaatatccggtattgtgcctacaacattggcgagacccgcgcgaagcaggcagccaccatgagcgaggttgaatggcgtggaagaacagtccccgtgaagatagataaagttaggatctttttgctcggtttggcggataacgaagcagccatcgtgcaggccgaatcagaggagactaaggagcgactgtttgagtccatgctgtctgaatgtcgcgacgcaattcaggttgtgcgagaagagctcaagcctgaccagaagcagcgcgactatatcctggagggtgaacctggtaaggtatcaaacttgcagtatctgcattcgtacctgacttacatcaaactttccactgcaattaagagaaacgaaaacatggcaaaagggctgcagagagccttgttgcaacaacagccagaggatgattcaaagcgctctccccggccccaggatctgatcagactgtatgatatcattctgcagaacttagtggagctgttgcaactccctggtttggaggaggacaaagctttccagaaagaaatcggactgaagacgctcgtcttcaaagcatacagatgcttcttcatagctcagtcatacgtgctagtgaagaagtggagcgaggcccttgtcctctatgacagagtgctcaaatatgccaatgaagtcaacagtgatgcgggcgctttcaaaaatagcctcaaagaccttcccgacgtccaagaactgatcactcaggtgcgctcagaaaaatgcagcctgcaggccgcagccatccttgatgcgaatgatgcacaccagacggagacgtcaagcagccaagtgaaggacaataaacccctggtggaaagatttgagactttctgtttggatcccagcctggtaaccaaacaggcaaacttagtacacttcccacccgggtttcagcccatcccttgcaaacctctcttttttgatttggccctgaaccatgtagcctttccccctctggaggataagttagaacagaagacaaaatccgggctcaccggatacattaagggcatatttggcttccgctcttag

SEQ ID NO: 205149 - DNA, 1884 bp, synthetic construct
  misc_feature 1..1884: note = Description of Artificial Sequence: Synthetic coding sequence
  source 1..1884: mol_type = other DNA
atggccgccgagaagcaggtgcccggcggcggcggcggcggcggctccggtggggggggaggtagcggcggtgggggcagcggtggtggtcgcggagctgggggtgaggagaataaagagaacgagcgcccaagtgctggctccaaagctaacaaggaattcggagatagtctttctctcgagatcctacaaatcataaaggagagtcagcagcagcatgggttaagacacggagactttcagaggtacaggggatactgttcccgtagacagcggcgccttcggaagacactgaacttcaagatgggaaatcggcataaattcaccggcaaaaaagtgaccgaggaactgttgaccgacaatcggtatctgctgctagtacttatggacgcagaaagagcgtggagttacgcaatgcagctgaagcaggaggcgaataccgagcccaggaagagattccacctcttgtcaagactcagaaaagcagtgaaacacgcagaggagctggagcgcctatgcgagagtaacagagtcgatgctaaaactaaactggaggcccaggcatacaccgcatatctctccggaatgctccggttcgaacaccaggaatggaaggctgctatcgaggcctttaacaaatgcaaaactatatatgaaaaactggcatcagctttcacggaggagcaggcagtgctctacaatcagcgcgtagaagaaatctcccctaatatccgttactgcgcatataatattggggatcaaagcgccattaatgaactgatgcagatgcggctgcgctccggcggcacagagggcctgttagctgagaaacttgaggctttaatcactcagactcgcgctaagcaggccgctacaatgtctgaagtggagtggcgcggcaggaccgtgcccgtgaagatcgacaaggtgcggatattcctgctgggactcgctgacaacgaggccgcgatagtgcaggccgagtcggaggaaacaaaggagcgtctttttgagtcaatgctctccgaatgtcgcgacgcaatccaggtcgtaagagaggagcttaaacctgaccagaagcaacgggactatattctggaaggtgagccagggaaagtgtccaacctccagtacctccatagctatctgacttacatcaaacttagcaccgcaattaagcgcaacgagaatatggctaagggactgcagcgcgcccttctccagcagcagcctgaagatgattcaaagaggtcgccacgccctcaggacctgattcgcctctatgatattattttacaaaacctggtggaactcctgcagcttcctggactggaagaggacaaggcctttcaaaaagagatcgggctcaagaccctggtctttaaggcttatcgctgttttttcatagctcagtcttacgttctcgtgaagaagtggtccgaagcactggtgctttatgatcgagtgctgaagtatgcaaacgaggttaatagcgacgctggcgcttttaaaaatagcctaaaagatctcccggacgtccaggaactgattacccaggtgagaagtgagaaatgctctctacaggctgccgctatcctcgatgccaatgatgcccaccagacggaaactagctcatcccaggtgaaggataacaagcccctggttgagagattcgaaacgttctgcctagaccctagcttagttactaagcaagcaaatttagtccatttccctcccggctttcagccaatcccttgcaagccactcttctttgacttggcccttaaccatgtggcctttccccccttagaagacaagctcgagcagaaaacaaagagtgggctgactgggtatatcaagggcatctttgggttccggtcgtag

SEQ ID NO: 205150 - DNA, 1581 bp, synthetic construct
  misc_feature 1..1581: note = Description of Artificial Sequence: Synthetic coding sequence
  source 1..1581: mol_type = other DNA
atgggcaaccggcacaagttcaccggcaagaaggtgaccgaggagctgctgaccgataatcgatacttgttgctggtgctaatggatgctgaaagagcatggtcttacgccatgcagctaaaacaggaggccaacacagaacctcggaagcggttccatctactctccaggctgcgcaaggcagtgaagcacgcagaagagttagaacgcctctgcgaatctaacagagtggatgccaagaccaagctggaggcccaggcttacacagcttacctttccgggatgctaaggttcgagcatcaggaatggaaggcagccatcgaggcctttaacaaatgcaaaacaatctatgagaagttggccagcgcttttaccgaggagcaggccgttctatataaccagcgcgttgaagaaatatctccaaatatccggtattgcgcctacaacatcggggatcagagtgctatcaacgaattgatgcagatgaggctgcggtccgggggcactgagggattgctggccgagaaattggaggccttgatcactcagacccgcgctaagcaggcagcaaccatgtctgaggtcgaatggagaggtagaaccgttccggtcaaaattgataaggtgaggatcttccttctggggctggcagacaacgaagccgcaatagtccaggccgagagcgaggaaaccaaggaaaggcttttcgagtcaatgttgtcggaatgccgagacgcgattcaagtggtcagggaggagctgaaacccgaccagaaacagagggactatatcctcgaaggagaacctggaaaagtgagcaacctccaatatcttcattcgtacctgacatacatcaagctcagcacggccatcaagcgtaacgagaatatggcaaaagggctgcagagggcgctgctacagcagcagcccgaagatgattcaaagaggtctccccggcctcaggatctaattcggctatatgacataattctgcagaacttggtcgagctcttacagctccccggactcgaagaagataaggcttttcagaaagagatcggtctcaagactctggttttcaaggcctatagatgtttcttcatagcccaaagctacgtgcttgttaaaaagtggagtgaagcgctggtgctgtacgaccgcgtgctgaagtacgctaatgaggtgaatagcgacgcaggcgcctttaaaaatagcctgaaggatctccctgacgtgcaggagctgataacacaagttcggtccgagaaatgttcgctccaggccgcagccatactcgacgccaacgacgcccaccagacagagaccagctcctcacaagtgaaggacaataaacctctcgtggagcggtttgagactttctgcctcgacccttccctcgtgacaaagcaggctaaccttgtacatttcccccctggttttcagccaatcccctgcaaacctctatttttcgatcttgctttgaatcacgtcgcatttcctcccctggaggataagctggagcaaaaaacaaaaagtggcctcaccggctatatcaaaggcatattcggctttaggagttag

SEQ ID NO: 205151 - DNA, 984 bp, synthetic construct
  misc_feature 1..984: note = Description of Artificial Sequence: Synthetic coding sequence
  source 1..984: mol_type = other DNA
atgcagatgcggctgcggagcggcggcaccgagggcctgctggccgagaaactggaagcccttattactcaaacacgagccaagcaggccgcaaccatgtccgaagtagagtggcgtggcagaacagtccctgttaaaattgataaggtgagaatattcctgctgggattggccgataacgaggccgcgattgttcaggctgaaagcgaggagaccaaggagcgattatttgaatctatgctttccgaatgcagagacgccattcaggtggttcgcgaagagctgaaacccgatcagaaacaacgtgactacatcctggagggcgagcctgggaaggtgtctaacctccagtacctgcacagctacttaacctacatcaagcttagcaccgcaatcaagagaaatgaaaacatggccaagggcctgcagcgtgccctcttgcagcagcagccagaagatgactccaagaggagtccacgaccgcaggacctcatccgcctctatgatattatccttcagaaccttgtggaactgctgcaactacccggattagaggaagacaaagcctttcagaaagagataggactgaaaactctagtgtttaaagcttaccggtgcttcttcatagcccagagttacgtactcgtgaagaaatggagcgaagctctggtactttatgatcgcgtgcttaagtacgccaatgaagttaattccgatgccggagctttcaaaaactctcttaaagatctgcccgacgtccaggagctcattactcaagtccggtccgaaaaatgcagcctccaggccgccgccatactcgacgccaatgacgcacatcagaccgagaccagtagctcccaggttaaagacaacaagcctctggtggagcgtttcgagtctacgccaggtactgatggcgcccttaagcgtttcgtgatgctcctccaataccacggatttgagatgaactcctccttgctgtag

SEQ ID NO: 205152 - DNA, 1770 bp, synthetic construct
  misc_feature 1..1770: note = Description of Artificial Sequence: Synthetic coding sequence
  source 1..1770: mol_type = other DNA
atggccgccgagaagcaggtgcccggcggcggcggcggcggcggctctggtgggggaggaggcagcggcgggggcggcagcggtggcggaaggggtgcagggggcgaggaaaataaagaaaatgagagaccctctgcagggtccaaggccaacaaggagttcggagattctctgagcctcgagatactgcaaataatcaaggagagccagcagcagcacggcctcaggcacggcgacttccaacgctatcgttacctactgctcgtgctcatggacgccgaaagggcttggtcatatgccatgcagctcaagcaggaggccaataccgaacccaggaagcgcttccatctgctatccagattacgcaaggccgtcaagcacgcagaagaacttgagcggctatgtgagtcaaacagggtggatgctaagaccaaactggaggcccaggcctataccgcttatttgtccggcatgcttcgcttcgagcatcaggagtggaaagcagctatagaagcttttaacaagtgtaaaactatttacgaaaagcttgcctcagctttcacagaggagcaggctgttctctacaaccagcgcgtggaagagataagtccaaatataagatactgtgcatacaacatcggagaccagagtgccatcaacgagcttatgcagatgcgcctgaggtccggaggaactgagggcctcctggcagagaagctcgaagcattgataacccagaccagagcgaagcaggctgctacaatgtccgaagtggaatggagaggtcgaaccgtgcccgtgaaaattgacaaggtccgtattttcttattaggcttagccgacaacgaggctgctatcgtacaggccgaaagtgaagagaccaaggaacgactctttgaatcaatgctgtctgagtgtcgggacgcaatccaagttgtgcgggaagagctgaaacccgaccaaaaacagcgggattacatacttgaaggtgagcctggaaaagttagcaacctgcagtatctccattcctatctgacgtacatcaagctgagtaccgctatcaagaggaacgagaatatggccaaggggttacagagagcgttactgcagcaacagccagaagatgattccaagcgaagcccacgacctcaagatttaatccgactctatgacatcatcttacagaacttggtggagctgctgcaactccccgggctcgaagaggacaaagctttccagaaagagattggcttgaaaactttggtgtttaaagcttatagatgttttttcatcgcgcaaagttacgtcctggtaaaaaaatggtccgaggccctggtgctttacgatcgagtgctgaagtatgccaacgaagtgaacagcgacgcgggcgcattcaagaacagcctgaaggatctgcctgacgtccaagagctgatcacccaggtgcgaagcgagaaatgttctctccaggcagccgccatactggatgctaacgacgctcaccagactgaaacctcttcctcccaggtcaaagacaacaaacctttagtggaaaggttcgagactttctgtctcgacccttccctggtgactaagcaggctaacctcgttcactttccaccaggctttcagcccattccatgcaagcccctgtttttcgacctggctttaaatcacgtggcattcccccctttagaggataaattagagcagaaaacgaagtctggactcaccgggtacattaaaggcatcttcggcttccgcagttag

SEQ ID NO: 205153 - DNA, 1110 bp, synthetic construct
  misc_feature 1..1110: note = Description of Artificial Sequence: Synthetic coding sequence
  source 1..1110: mol_type = other DNA
atggccgccgagaagcaggtgcccggcggcggcggcggcggcggctctggaggaggaggcgggtccggtggcgggggcagtgggggaggccggggagccggcggcgaagagaataaagagaacgaacgtccttccgccggatcaaaggcaaacaaagaattcggagattccctcagcctggagatcttacaaatcatcaaagaaagtcagcaacagcatggactgcggcacggagactttcagaggtacaggggttactgcagcagacgccagcggagactaagaaagacactgaatttcaaaatggggaacaggcacaagttcaccggaaagaaggtcactgaagagctgctcacagataatcggtatctgctgctcgtactgatggacgccgaaagagcctggtcctacgcgatgcaattgaagcaggaggcaaacacagagccacgtaagagattccatctgctcagtcgcctgagaaaggcggtgaagcatgccgaagaactggaacgactgtgtgaaagcaatcgggttgacgcaaaaacaaagcttgaggctcaggcgtacacagcttacttgagcggcatgctgagattcgagcatcaggagtggaaggcagctatagaggcatttaacaagtgtaagactatctacgagaagttggcctctgcgtttacggaagaacaggctgttctatacaaccagagagtggaggaaatctctcccaacatccgttattgtgcatacaatattggggaccagagtgcaattaatgaactcatgcagatgcgtctgagaagcggtggaaccgaggggctcttggccgagaagcttgaagccttgataacccaaacgcgcgctaagcaggcggccacaatgagcgaggtggaatggaggggtcgcactgttccagtaaaaattgacaaagtgcgaattttcctgttaggcctcgcggacaacgaggccgcaattgtccaggctgagtccgaggaaacaaaggagcgtttgttcgagtcaatgctttctgaatgccgggatgctatccaagtggtccgggaagagcttaagccagatcaacgggacctgctcctgcccagccagggccagtag

SEQ ID NO: 205154 - DNA, 867 bp, synthetic construct
  misc_feature 1..867: note = Description of Artificial Sequence: Synthetic coding sequence
  source 1..867: mol_type = other DNA
atgctgagcgagtgccgggacgccatccaggtggtgcgggaggagctgaaacctgaccagaagcaacgcgactatattttggagggagagcctggaaaagtgtccaacctgcaataccttcattcctatttaacctatattaagctgtcaaccgccattaaaaggaatgagaacatggcaaaaggacttcagagggcactgctccaacaacagcctgaagacgactccaagagatcgccacgtccccaggacttaattcggctatacgatatcatattgcaaaatctcgtggagttattgcaacttcccggcctcgaggaggataaagccttccagaaggagattggactgaagacactcgtattcaaagcctaccgctgctttttcattgctcagtcatacgtgcttgtaaaaaagtggtccgaggcgttagttctatatgaccgagttttaaaatacgccaatgaagtgaacagtgatgccggggcctttaagaattccttgaaagatcttcccgatgtgcaggaactaattacacaggtaaggtcagagaaatgttcccttcaggccgccgcgatactggatgctaatgacgcacaccaaaccgaaacaagctcttctcaagtgaaagacaataagcccctagtggagcgattcgagacattctgtctcgaccctagcctggtgactaagcaggcaaacctggttcactttccaccagggttccagccaatcccatgcaaaccgcttttcttcgaccttgccctcaatcatgtagcctttcccccattggaggataaactcgagcagaaaacaaaatcaggcctcacagggtatataaaaggaatttttgggtttcggagctag

SEQ ID NO: 205155 - DNA, 2016 bp, synthetic construct
  misc_feature 1..2016: note = Description of Artificial Sequence: Synthetic coding sequence
  source 1..2016: mol_type = other DNA
atggccagcggcggcagcggcggcgtgagcgtgcccgccctgtggtccgaggtaaatagatatggtcagaatggcgacttcacacgcgctttaaagactgtgaataagattctgcagatcaacaaggacgacgtcaccgccctgcactgcaaagtcgtctgtctgatccagaatggttccttcaaggaagcgctgaacgtcataaatacacacactaaagtgttggccaataactcactgtcttttgaaaaggcctactgtgagtacagactgaatcgtattgaaaacgcactgaagactattgagagcgccaaccagcagacagacaagctcaaggaactctacggtcaggttctgtaccgcctggaacgatacgatgagtgcctggccgtttaccgggatttggtcagaaattcccaggatgattatgacgaggaaagaaaaacaaacttatcagccgtcgtagctgcccagtccaattgggaaaaggtcgtcccggaaaatctgggactgcaggaaggaacccacgaactttgttacaacaccgcatgcgcccttataggacaaggacagctgaatcaggcaatgaagatcttacaaaaggccgaagacctctgtcgcaggagtctttctgaagatactgatggcaccgaagaggacccacaggccgagctggcgatcattcatgggcagatggcgtatatccttcagcttcaggggcgcaccgaggaagctctgcagctttataaccagatcattaagctcaagcccacagacgtggggctgttagcggtgatagctaacaatattattacaataaataaagatcaaaacgtatttgactccaaaaagaaagtcaaactcaccaatgcagaaggcgtggaattcaaactgagtaagaagcaactccaggcaatcgaatttaacaaggcccttctcgccatgtatacaaatcaagctgaacagtgcagaaagatctccgcatctctacagtcccagtcacctgaacacttgttgcccgttctaatccaagccgcacagctttgccgcgaaaagcagcacaccaaggcaatagagctgctgcaagaattttccgatcagcaccccgaaaacgccgctgagatcaagcttaccatggcacaactgaagatcagtcaaggcaacatttccaaagcgtgtcttatactgaggagcattgaagagctgaaacataaacctgggatggtaagcgcactagttaccatgtatagtcatgaagaggacattgacagcgcgatcgaggtgttcacccaggccatacagtggtaccagaatcatcagcccaagtctccagcacacctctcactgatccgcgaagcagctaacttcaagcttaaatacggacggaaaaaagaggccataagtgacctgcagcagctgtggaaacagaacccaaaagacatccacaccttggcccaacttatctctgcctactcactggtagaccctgagaaagctaaggcattgtctaagcaccttccttcaagcgatagtatgtccttgaaagtcgacgtagaggcactcgagaatagtgcaggtgccacgtatattaggaaaaagggtggcaaggtgactggagactcccagccaaaagaacaaggccagggcgatctgaaaaagaaaaagaagaaaaagaaaggcaagctcccaaagaactacgatcctaaggttacacctgaccccgaacgttggctcccaatgagggagagatcatactatcgcgggcgcaaaaaagggaaaaaaaaagaccagattgggaagggaactcagggagctaccgctggggcctcctcagagttagatgcatctaagaccgtatcatccccccctaccagtccaagacccggcagcgctgccacagtatcagctagcacctcaaatatcatcccacccaggcaccagaagccagccggagcgcccgccaccaaaaaaaagcagcagcaaaagaagaaaaagggcgggaaaggaggctggtag

SEQ ID NO: 205156 - DNA, 1878 bp, synthetic construct
  misc_feature 1..1878: note = Description of Artificial Sequence: Synthetic coding sequence
  source 1..1878: mol_type = other DNA
cccctggtgagcagcaagatggccagcggcggcagcggcggcgtgtcagttccagccctgtggagcgaagtaaacaggtacggacagaatggcgactttacaagagccctgaaaaccgttaataagatcttacagattaacaaggatgatgtgaccgctctgcactgcaaagttgtctgcctcatccagaatggcagcttcaaggaggccctgaacgtgattaatacacataccaaggtgctggccaataactccttgtccttcgaaaaggcatattgcgaatatcgtctgaacaggatagagaacgcactgaagacaattgaatctgctaatcagcagaccgacaaactgaaagagttatatggacaagtgctgtataggctcgagcgctatgacgagtgcctagccgtgtacagggatttggttcggaacagccaagacgactatgacgaggagagaaagactaacctctctgctgtggttgccgcgcagtctaactgggagaaggtggttcctgagaacctcggtctgcaggaggggacgcatgagttgtgctataataccgcttgtgctctgatcggtcagggtcagctgaaccaggccatgaagattttacagaaggccgaagacctctgtagaagatccctgtcagaggatacggaccagaacgtctttgatagcaaaaagaaggtcaaactaacgaatgcagaaggagtcgagttcaaactgtcgaagaagcagctgcaggctattgaattcaacaaagccctgctggccatgtatactaaccaggcagaacagtgccggaaaatcagcgcatctctgcagtctcagtcccctgagcaccttttgcccgtgctgattcaggccgcccagctctgtcgggaaaaacagcataccaaggctatcgagttactccaagaattttccgaccaacatccagagaatgccgccgagataaaactgacaatggctcagctgaagatcagccaaggcaacattagtaaagcctgcttaatcctccgttcaattgaagagttgaaacataaaccaggaatggtgtcggccctggttactatgtactctcacgaggaagatattgattctgccattgaagtgtttacacaagccatacagtggtatcaaaaccaccagccaaagagccccgcccatcttagcctgatcagggaggccgcgaatttcaaactgaagtacggtcggaagaaggaggcgatcagcgatctgcaacagctgtggaaacaaaatccaaaggatatccacaccctcgctcagctcatttccgcatactctctcgtggaccctgaaaaagccaaggcgctgtctaagcatctcccttcaagtgactcaatgtcgctgaaggtggatgtggaggctctggagaattccgccggcgcaacctacattaggaaaaagggtgggaaggtgaccggcgattctcagccgaaggaacagggccaaggcgatctgaagaagaagaaaaaaaagaagaaagggaagctcccaaagaattacgatcctaaggtgacaccagatcctgaacgttggctcccaatgcgcgagcgctcatattatcggggccgcaaaaaggggaagaaaaaggaccagataggaaagggaacacagggcgcaacggctggtgccagcagcgaactcgacgcatccaaaaccgtcagctcaccacctacacaggatctggcggttctgcagcagtatctgcccctccaagttacgagttatccccaggatacacggaacttgcagggcctgcagcagcaaaagagaaactctaatcgcaagagaagaaaagtggaaaaggttgctggcgacgaaaatattcttgtggccgggtgtttttag

SEQ ID NO: 205157 - DNA, 1833 bp, synthetic construct
  misc_feature 1..1833: note = Description of Artificial Sequence: Synthetic coding sequence
  source 1..1833: mol_type = other DNA
atggccagcggcggcagcggcggcgtgagcgtgcccgccctgtggtctgaggtgaaccgctatggacagaacggcgacttcacacgggctctgaaaaccgtgaataagatactccaaattaacaaagatgatgttacagcgttgcattgcaaggtggtttgcctaatccagaacggtagtttcaaggaggctctgaatgtaatcaacacccacaccaaagtgctggcgaacaattctctcagttttgagaaggcctactgcgagtataggctcaacaggatcgagaatgctctgaaaacaatcgagagcgccaaccagcagaccgataagttaaaggaattgtacggccaagtgctgtaccgcctggagcgttatgacgagtgcttagctgtgtacagagacctggtgcggaactctcaagatgactacgacgaggagcgtaagactaacctgtctgcagtggtggctgcacaaagcaactgggagaaggtcgtgccagagaacctgggcttgcaggaaggcacccatgaactatgttacaatacggcctgcgccctgatcggtcaggggcagctgaatcaggccatgaaaatcctgcaaaaggccgaagatctttgtcgtcgatccctgagcgaagataccgaccagaatgtttttgactctaagaagaaggtgaagctgacaaacgcagagggagtggaattcaagctatctaagaagcagctgcaagctattgaatttaataaagctctgctggccatgtataccaatcaggccgaacagtgtagaaagatcagcgcaagtctccaaagtcagagccctgaacacttgctaccagttttgattcaggccgctcagttatgtagggaaaaacagcataccaaggccatcgagctgctgcaggagtttagtgatcagcaccctgaaaatgcagctgaaattaagcttacaatggcgcagcttaaaatctcccaggggaatatctccaaggcatgccttatcctgagatccatagaggagctaaagcataaaccaggaatggtcagcgccctggtgacaatgtacagtcacgaggaggacatcgattctgcaattgaagtgtttacacaggccatccagtggtaccagaatcatcagcccaaatcaccagcccacctgagtctgattagggaggccgccaacttcaagctgaaatacggtagaaaaaaagaggcaatctccgatctccagcagctatggaagcagaatccaaaggatatccataccctagcccaactgatatccgcctattccctggtggatccagagaaagctaaagcgttatccaagcacctgccctcatcggattccatgagtctgaaagtggatgtagaagccctcgaaaactcggccggagctacatacattcgaaaaaagggcggaaaagtgacaggcgattctcagccaaaagagcaaggccagggggatctgaaaaagaaaaaaaagaaaaagaagggcaaactccctaaaaactatgatcctaaagttacccctgaccccgagcgctggttacctatgcgggagcggtcgtattaccggggcagaaaaaaaggcaaaaaaaaggaccagattgggaagggcacacaaggtgccacggccggggccagctcggagctggatgcctcaaagaccgtgagttcacctcccacttcccctcggccgggctcagccgcgaccgtgtccgcgtccaccagtaatattattcctcctagacatcagaaaccggccggagccccggcaacaaagaagaagcagcagcagaaaaagaagaaaggaggtaagggcggctggtag

SEQ ID NO: 205158 - DNA, 1917 bp, synthetic construct
  misc_feature 1..1917: note = Description of Artificial Sequence: Synthetic coding sequence
  source 1..1917: mol_type = other DNA
atgctggacttcttcaccatcttcagcaagggcggcctggtgctgtggtgctttcaaggcgtgtcggatagctgcacagggccagtgaacgccctgatcagatcagtgctgctgcaagagcgagggggaaataattcctttacccatgaggcacttacgctcaaatataagctagacaatcagtttgagcttgtcttcgttgtgggatttcagaaaattctgactttaacctacgtagacaagctgatcgatgacgttcaccggctgttcagagacaagtacagaaccgagatccagcagcaatcggctctcagcctgctcaacggcacctttgacttccagaatgacttcctgaggctcttgagagaagcagaggagtcctccaagatcagggcccctacaaccatgaaaaagtttgaggacagtgagaaagctaaaaagccagtgcgcagtatgatcgagactcggggggagaaaccaaaagaaaaagcaaaaaactccaagaagaagggtgccaaaaaagaggggagcgacggccccttggcaaccagcaaacccgtgccagccgagaagtccgggcttccggtcggccctgaaaatggagtggagctttcgaaggaggaactgatcagaagaaagcgcgaagagttcattcaaaagcacggaagaggcatggagaagagtaataagtctaccaaatctgatgcccctaaggagaagggcaaaaaggctcccagggtatgggagctgggaggttgcgctaataaggaggtcttggactatagcacacccaccacgaatggaacgccagaggctgcactgagcgaggacatcaatctcatccgggggaccggatccggcggacagctgcaggacttggattgctcatcatctgatgatgagggagctgcacaaaatagtaccaagccttcagcgacaaaagggaccctaggcggaatgtttgggatgttaaaaggtctcgtgggtagtaagtccttgagtcgggaagacatggagagcgtgctggacaaaatgcgggatcatcttatcgccaaaaatgttgcagctgacatcgctgtccagttgtgtgagtcggtggcaaataaactggaaggcaaggtaatgggaacattttcgactgtcacgagcaccgtcaaacaggcgctgcaggaaagcttggttcagatccttcagccacagagacgggtcgacatgttacgggatatcatggatgcccaacggcgccaaagaccatacgtggttacattttgcggtgtaaatggggtggggaagagcacaaatctcgccaagattagcttttggctccttgagaatgggtttagcgtgcttatcgctgcctgtgataccttccgggctggcgccgtcgaacagctgcgaacccatacccggaggctgtccgctctgcatccccctgagaagcatggaggacggacgatggtacagctgtttgagaaaggatatgggaaagatgcagcaggaattgctatggaggccatagccttcgctaggaaccaggggtttgacgtggttctggtggatacagctgggcgcatgcaggataatgctcccctcatgacagcactggctaagctcatcacggtgaatactcccgacctcgtcctgtttgttggggaggctctcgtgggcaatgaggctgtggaccagttggtgaagttcaacagagcactcgccgatcatagcatggcgcagacccccagactgatcgacggcatcgtactgaccaagtttgacactatcgacgataaggtaggcgccgcaattagcatgacctacattacaagtaaacccattgtgttcgtgggcactggacaaacctactgcgacctgcggagcctgaacgctaaggctgtcgtcgccgccctcatgaaggcctag

SEQ ID NO: 205159 - DNA, 552 bp, synthetic construct
  misc_feature 1..552: note = Description of Artificial Sequence: Synthetic coding sequence
  source 1..552: mol_type = other DNA
atgcggctgctgagcttcgtggtgctggccctgttcgccgtgacccaggccgaggaaggagcaaggttgctggcaagcaagtctctgctgaaccgctatgccgtcgaaggcagagacctgacattgcagtacaacatctacaacgtagggagcagcgccgctctggacgtcgagcttagtgacgattcttttccacctgaggacttcgggattgtatcaggaatgctgaacgtaaaatgggacagaatcgcacctgccagcaacgtgtctcataccgtagtgctgagacctttgaaggcagggtactttaacttcaccagcgccactatcacctatcttgcacaggaagacggaccagtggtgatcgggagcacatcagcacccgggcagggtggaatcctcgctcagagagaattcgacaggcgctttagtccccattttctggattgggccgcatttggggtgatgaccctgccaagtatcggcatcccactgcttctttggtattcttctaaaaggaaatatgataccccaaagaccaagaagaactag

SEQ ID NO: 205160 - DNA, 552 bp, synthetic construct
  misc_feature 1..552: note = Description of Artificial Sequence: Synthetic coding sequence
  source 1..552: mol_type = other DNA
atgcggctgctgagcttcgtggtgctggccctgttcgccgtgacccaggctgaggagggggcccgtctgttggcctccaagagtctcctgaaccgatatgctgtggaaggccgagaccttaccctgcagtacaatatctacaatgtcggctcttctgctgccctggatgtagaactatcagatgatagtttccctccggaagatttcggcattgtctccggcatgctgaacgttaagtgggaccgcatcgcacctgcctcgaatgtaagccacactgtagttctccggcccctgaaggcaggatatttcaattttacctctgccacgatcacctatctggcccaagaagatgggccggttgtgatcggatcaacaagtgcacccgggcaaggaggcattctcgcccagcgtgaatttgacaggcgcttttcgccccatttccttgactgggccgcatttggcgtgatgaccctgccatctatcggaatacctttgttgctgtggtattcttcaaagagaaagtatgacactccgaagacaaaaaagaactag

SEQ ID NO: 205161 - DNA, 258 bp, synthetic construct
  misc_feature 1..258: note = Description of Artificial Sequence: Synthetic coding sequence
  source 1..258: mol_type = other DNA
atgcggctgctgagcttcgtggtgctggccctgttcgccgtgacccaggccgaggaaggagctagacttcttgcctccaaaagcctcttaaaccggtacgccgtcgaaggccgggatctaacccttcagtacaacatttataacgtgggctcatcagctgctctggacgtggaactgtccgacgactcattccctcctgaggacttcggaatagtgtccgggatgctcaatgtcaagtgggaccgtatcgccccatag

SEQ ID NO: 205162 - DNA, 444 bp, synthetic construct
  misc_feature 1..444: note = Description of Artificial Sequence: Synthetic coding sequence
  source 1..444: mol_type = other DNA
atgcggctgctgagcttcgtggtgctggccctgttcgccgtgacccaggcagaggaaggcgcaaggctattggcttctaagagtctgctgaaccgatacgctgtggagggcagagacttaacacttcagtacaatatctacaacgtggggagtagcgccgctttagatgttgagctgagcgacgacagtttccctcccgaagattttggaattgtttccggaatgttaaatgttaagtgggacaggattgcaccagctagcaacgtgagccataccgtagtcctcaggccactaaaggctgggtattttaattttacatccgcaaccatcacctaccttgcccaagaggatggccccgtcgtaattggaagtacatccgcccctgggcagggtggtattcttgcccagagagaatttgaccgccgctttagcccacacttttag

SEQ ID NO: 205163 - DNA, 522 bp, synthetic construct
  misc_feature 1..522: note = Description of Artificial Sequence: Synthetic coding sequence
  source 1..522: mol_type = other DNA
atggccgccatggccagcctgggcgccctggccctgctgctgctgagctctctatctagatgttccgctgaagcctgcctggagccacagattacccccagttactacaccacatctgacgctgtcatttctaccgagacggtgtttattgtggaaatcagtctcacatgtaaaaatagggtacagaacatggccctgtatgcagatgttggtgggaaacaatttccagttactcgcggccaggatgtaggccgatatcaggtgagctggagcctggatcataagagcgctcatgctggcacatacgaggtgcgtttctttgacgaggaaagttactctttgctgcgcaaagcccagcgcaacaatgaggatatttctatcatcccacccctgtttacagtctccgttgatcaccgcggaacttggaacggaccatgggtttccaccgaggtgctcgctgccgctatcggattggtgatctattacttggctttctctgccaagagtcatattcaagcgtag

SEQ ID NO: 205164 - DNA, 447 bp, synthetic construct
  misc_feature 1..447: note = Description of Artificial Sequence: Synthetic coding sequence
  source 1..447: mol_type = other DNA
atggccgccatggccagcctgggcgccctggccctgctgctgctgtcaagtctctcgaggtgtagtgccgaagcctgcctcgaacctcagattacgcctagctattacacaaccagcgacgccgtcatcagcactgaaacagtgtttatcgtagagattagtctgacatgtaaaaaccgggttcaagtttcatggtcactagaccataaatcagcgcacgctggaacctacgaggtgcggtttttcgacgaggagtcctacagcctcctgaggaaggcccagagaaataatgaggacatctctataatcccgcctctcttcactgtctctgtagaccatcgagggacatggaatggtccctgggtgtctaccgaggtgctggccgctgccattggtttggtgatctactacctagctttcagtgctaagtcccacatccaggcatag

SEQ ID NO: 205165 - DNA, 522 bp, synthetic construct
  misc_feature 1..522: note = Description of Artificial Sequence: Synthetic coding sequence
  source 1..522: mol_type = other DNA
atggccgccatggccagcctgggcgccctggccctgctgctgctgtcctcactctccaggtgctcggctgaggcatgcttggagccacagatcactcctagttattacaccacaagtgatgcagtcatatccaccgaaacggtgtttattgtcgagataagcctgacttgcaagaacagggtgcagaacatggccctgtatgccgatgtgggcggcaagcagtttcctgtcacgcgagggcaggatgtcggccgctaccaggtgtcctggtccctggaccacaaatcggcgcacgcgggcacttacgaagtgaggttcttcgatgaggaatcttattccttactcagaaaagcacagagaaacaacgaagacatctcaatcatcccaccgctgttcaccgtatctgtggatcaccgcggaacgtggaatgggccgtgggtatctaccgaggtgctggccgccgccatcggcctggtcatctattacctcgcttttagtgccaaaagccatatacaggcctag

SEQ ID NO: 205166 - DNA, 522 bp, synthetic construct
  misc_feature 1..522: note = Description of Artificial Sequence: Synthetic coding sequence
  source 1..522: mol_type = other DNA
atggccgccatggccagcctgggcgccctggccctgctgctgctgagtagtcttagtcgatgttccgcagaggcctgtctggagccccagatcacaccttcatactacacgacttctgatgctgtcatcagcacggagacagttttcatcgttgagatctctttgacctgtaagaaccgtgtgcagaatatggctttatacgccgatgtcggggggaagcaatttccggtgaccaggggtcaggatgtgggcagatatcaggtatcctggtccctggaccacaaatccgctcatgctggcacttatgaggtgcgcttttttgatgaagaaagctatagtctgctacggaaggctcaacgaaataacgaggatatctccattatcccccccctcttcactgtgtctgtagatcaccgtgggacatggaacggtccctgggtgagcactgaagtgctggctgccgccataggactcgtgatttattatctagccttcagcgccaaatcccacatccaagcatag

SEQ ID NO: 205167 - DNA, 363 bp, synthetic construct
  misc_feature 1..363: note = Description of Artificial Sequence: Synthetic coding sequence
  source 1..363: mol_type = other DNA
tgagtgggcagcggctgccggagcgccgccgtgagcgccctggtggtgcgagtggccccaccctgtcccctgtgtcctcatagtgctcagcatcccactcaggtgagctggagtctggatcataagtcggcacacgccggcacttatgaagtgcggttctttgacgaggagtcctactctcttctgcggaaggcccaacggaacaacgaggacatctccattattcccccattgtttacggtttcagtggatcaccgcgggacatggaacggaccttgggtgtcaactgaagtcctggccgccgcgataggcctggtgatatactacctggctttttccgccaaaagccacattcaggcttag

SEQ ID NO: 205168 - DNA, 2544 bp, synthetic construct
  misc_feature 1..2544: note = Description of Artificial Sequence: Synthetic coding sequence
  source 1..2544: mol_type = other DNA
atgagcctgtggggcctggtgagcaagatgccccccgagaaggtgcaacggttgtatgttgattttccacaacacttgcggcatctgctcggggattggctcgaaagccagccttgggagtttctagttggctcagatgctttttgctgcaacttggcctcggcattgttgtccgacactgtccagcacctgcaagcaagtgtgggcgagcaaggcgagggcagcactatactccagcatatctcgaccctggaaagtatctaccagcgcgatccgctgaagcttgtggcaaccttccggcagatcctgcagggcgaaaagaaggccgtcatggagcagttcaggcatctgccaatgccgtttcactggaagcaggaggagctgaagtttaagacaggcctgcggcggctgcagcacagggttggcgaaatccacttgctacgcgaagccctgcagaaaggagcagaggcaggccaggtgtcactccacagcctgatcgaaaccccggccaacggcacgggcccttctgaggccctggctatgctcctccaggagaccacaggtgagttagaggcggctaaagctcttgtgttgaaacgcattcagatctggaagcgacagcaacagctggctggaaatggcgcaccatttgaagagtctttggccccactgcaggagaggtgtgagtccttggtggacatttattcccaactgcaacaggaggtgggggccgcagggggggagttagaacctaagacgcgcgcaagtctgacaggcagactagacgaagtgctcagaacgctggtcacatcctgcttcctggttgagaaacaaccacctcaagtgttaaagactcagaccaagtttcaggctggtgtaaggttccttctggggctgaggtttctgggagctcctgccaagccccccttagttagggccgatatggtaactgaaaaacaggctagggagctctccgtgcctcagggtcctggcgcgggagcagagtccactggtgaaattattaacaataccgtgcctctcgagaactctattcctggaaactgctgctccgcactctttaagaatcttctgctgaagaagatcaagcgctgcgagaggaagggcaccgagagcgtgactgaggagaaatgtgccgtgctcttttcggcatcctttacactggggccgggaaagctgccaatccagctgcaggctttgtctctgcctctggtggtcattgtgcacggaaaccaggataacaacgctaaagcgactatcctctgggataatgcattttctgagatggatagggtgccctttgtggttgccgagcgtgtcccatgggaaaagatgtgtgaaactctcaaccttaaatttatggctgaggtaggcacaaataggggactcttgcccgaacattttctgttccttgcgcagaagatctttaatgataattctctgtctatggaggcctttcagcatagatccgtttcatggtcgcagttcaacaaggagattttgctggggcgtgggtttactttttggcagtggttcgatggggtcttagatctgacgaaacgatgtttgagaagctattggtcagacaggctgatcatcggatttatttcaaagcagtatgtaacctccttgctccttaacgaacccgacgggacatttctgctccgattctcagattccgaaattggagggataacaattgcccacgtgatcaggggccaggatggaagcccccaaatcgaaaacatacagccgttctccgctaaggacctctctatacggtctcttggggaccgcatcagggatctcgctcagttgaagaatctataccctaagaagccaaaagatgaagcattcaggtcacactataagcctgaacagatggggaaggacggtaggggctacgtccccgctactataaaaatgactgtggaaagggaccagcccctacctacccctgagttacagatgcccacaatggttccaagctatgacctgggcatggcccctgatagcagcatgtctatgcagttgggccctgatatggtaccccaggtctatccccctcatagtcatagtattcccccttaccagggtctatcgcccgaggagtcggtcaatgtcctgtcagctttccaagagcctcacctgcaaatgccccccagcctagggcagatgagcctgccatttgaccagccccaccctcaaggactgttgccttgccaaccacaggagcacgcagtgtcttccccagacccactgctgtgttctgacgtaacaatggtggaagactcatgtctgtctcaaccagttacagctttcccccaaggcacatggatcggagaggacattttcccccccctgctgcctcccacagagcaggacctgacaaaactgctcctggagggccagggagaaagtggcggaggcagcctgggggctcagccactgcttcagccatcacactatggccagagcggcataagtatgagccacatggacctgagggctaacccgagctggtag

SEQ ID NO: 205169 - DNA, 2544 bp, synthetic construct
  misc_feature 1..2544: note = Description of Artificial Sequence: Synthetic coding sequence
  source 1..2544: mol_type = other DNA
atgagcctgtggggcctggtgagcaagatgccccccgagaaggtgcagaggctgtacgtggatttcccccagcatctgcgccatctgcttggggattggctggaatctcagccttgggagtttctggtggggtctgacgcattctgctgcaacctggcttctgccctcctgtctgataccgtgcagcatctgcaagctagtgtcggagaacagggcgaagggtcaacgattctgcagcacatatcaacattggagagcatctaccagagagatccactgaagttggtggccacatttagacagatcctccaaggcgagaaaaaggccgtgatggaacagttccggcatctacccatgcctttccattggaaacaggaggaacttaagttcaagacgggtttgcgccgacttcaacacagggtgggcgagatccacctcctgagggaggcgttacagaagggtgccgaagctgggcaggtgtctctccactcactcatagagacacctgccaatgggaccggccccagcgaggcgcttgcaatgctacttcaggagacaacaggggaactggaagctgctaaagccctcgtcctgaagcgcatccagatttggaagcgtcagcagcagctcgctggcaacggagcacccttcgaagaaagcctggcgcctttgcaggagcgatgtgagtccctagtggatatttacagccaactgcagcaggaagttggcgccgccggcggcgagctcgagcccaagactcgggcatcgctgactggaaggctcgatgaggtcctgaggacactcgtaaccagttgctttttagtcgagaaacagccaccgcaggtgttgaagacccagaccaagtttcaggccggcgtccgtttccttcttggactgcgcttcctcggagcgcctgccaaacccccgctagtcagggccgacatggtcacggaaaagcaggcacgggagttgtccgtaccccagggtcctggggctggtgcggaaagcaccggtgagatcattaataatactgtcccgcttgaaaacagtatccccggtaactgctgctcagccctgttcaagaacctcctgctgaagaagattaagaggtgcgagcggaagggaacagaatccgtcaccgaggaaaagtgcgctgtgctctttagcgccagctttaccctgggccccggcaaattacctattcaattacaggccctgagcctgccactcgtggtaattgttcacggcaatcaggataacaacgctaaggccaccatactgtgggataacgcattctccgaaatggatcgtgtgcctttcgtagtcgcagagcgggtgccatgggagaaaatgtgtgagacgctgaatcttaagttcatggccgaggtgggtaccaacagggggttgctccccgaacacttcctcttccttgcccagaagatttttaatgataactcccttagcatggaggccttccaacacagatcagtgtcttggtctcagttcaacaaggagatattgttggggaggggcttcactttttggcagtggttcgatggagtgctggatctgacaaaaagatgcctgcgttcttactggtctgacagactaatcataggattcatatcaaagcagtacgttaccagcttgctgctgaatgagcctgatggcacttttctccttagattctcagacagcgaaatcgggggtattaccatcgcccacgtcatacggggccaagacggctcccctcagattgagaacatccagcctttttctgcaaaggatttgtctataagatccctgggcgaccgcattagagacctcgcccagcttaagaacttgtaccccaagaaaccaaaagacgaggcttttcgaagtcattataaacccgaacagatgggtaaagacggcagaggctacgtgcccgcaaccatcaagatgacggtggaacgggatcagccgctgccaacaccggagctccagatgcccaccatggtgccatcgtatgatttgggcatggcaccagactcctccatgtccatgcagctcggtccagacatggtgccccaggtgtatcccccccacagccactccattcccccctatcagggtttgagtccggaagaatcagtcaatgtattgagcgctttccaggagccacatctccagatgcctcccagcctggggcagatgtcgctcccctttgaccagccgcacccccagggccttctgccatgccagccacaggagcatgcggtgagttcaccagatcctctcctgtgtagtgacgtgacaatggtcgaagatagctgtctttcacaacctgtaactgcctttcctcaggggacatggataggtgaagatatttttcctcctttactgccccccacagagcaggacctgacaaaactactactggagggccagggtgaatccggcgggggctcactcggagcccagccacttctgcagccctcccattatggacagtccggcatttccatgtctcatatggacctacgggccaatccgtcctggtag

SEQ ID NO: 205170 - DNA, 2214 bp, synthetic construct
  misc_feature 1..2214: note = Description of Artificial Sequence: Synthetic coding sequence
  source 1..2214: mol_type = other DNA
atggagcagttccggcacctgcccatgcccttccactggaagcaggaggaactgaagtttaaaactggacttcgacgattacagcaccgggtgggagagatccatctgctgagggaggccctccagaaaggcgccgaggccggacaagtctcactgcactcccttattgagacccctgctaacggcacagggccttcagaggccttggctatgctcttgcaagaaaccacaggcgagttagaggccgcaaaagcactggttctgaaaagaattcaaatttggaaacgtcagcagcagcttgccggtaatggcgccccgttcgaggagagtctggcccccctacaggagcggtgtgagtctttggtagacatttattcccagctgcagcaagaggtcggggcagctggcggtgaactcgagcccaaaactagggcttccttgacaggaagattggacgaggtgctccggacactcgttacgtcttgttttctcgtggagaagcaacccccacaggtcttgaagacccagactaagtttcaggcgggagtgaggttcctgctcggattacgcttcctgggcgccccagcaaagccccctctcgtgcgtgccgacatggtcaccgaaaagcaagctagagagctgagcgtgccgcaaggccctggggctggggccgaatctacgggcgagattatcaacaatacagtgccactggagaactcaattcctgggaattgctgcagtgcgctgtttaaaaacctgctcttgaaaaagattaaaaggtgtgaaagaaagggtacagagtcagtaactgaggaaaagtgcgctgtgctgttttctgcctcttttaccttaggcccaggcaagctgcccattcaactgcaagccctatcactgccactggttgtcatcgtccatggaaatcaggacaataatgcaaaagctacgattctgtgggacaacgcgttctccgaaatggacagagtgcctttcgtcgttgctgagagggtaccctgggagaagatgtgcgagactctcaatctgaagttcatggccgaagttgggactaatcgcgggctgttgccagagcacttcctgtttttggcacagaagatcttcaatgataacagtctatcaatggaggcttttcagcacaggtctgtgtcttggtcccagtttaacaaggagattctgctcggaaggggtttcaccttctggcagtggtttgatggggtgctggatcttactaagcggtgtctgcggtcatattggtctgacagactgattatcggctttatttctaaacagtacgtcacctctctattgttaaatgagcccgatggcacttttcttttacgcttcagtgactccgagatcggagggatcaccatagcccatgtgattcgcggccaggacggctccccgcagatcgaaaacatacagcctttctctgcgaaagacctgtccatccgtagtctgggcgaccgaattcgcgatctagcacaactgaaaaatctgtacccaaagaagccaaaggatgaggctttccggagccactataagcccgagcagatgggaaaggacggccgcggttacgtcccagctacgattaagatgaccgtggaacgggaccagccgctgcccactccagagctccaaatgccgactatggtgcccagctatgaccttggcatggctcctgattctagtatgagcatgcaactggggcctgatatggtgccacaggtttaccccccacattcgcattcaattcctccttatcaagggttgagcccagaagaatccgtcaacgtgctgagcgcgttccaggagcctcatctgcagatgcctccatcactaggccagatgtcactcccattcgatcagccacacccacagggacttcttccctgtcagccacaagaacacgctgtctcttctcctgatcccctgctctgctctgatgtcacgatggtggaagacagctgcttatcgcagccggtaaccgcctttccacaggggacctggataggagaggatatatttccacctctgttgcctcccaccgaacaggacctaaccaagctgctgctggaggggcagggggaaagcgggggtgggtccctgggggcccagcccctcctgcagcccagtcattacggccagagcgggatttctatgtctcacatggacttgagggcaaatcccagctggtag

SEQ ID NO: 205171 - DNA, 2214 bp, synthetic construct
  misc_feature 1..2214: note = Description of Artificial Sequence: Synthetic coding sequence
  source 1..2214: mol_type = other DNA
atggagcagttccggcacctgcccatgcccttccactggaagcaggaagagctgaagtttaagaccggcctaaggcgcctccaacaccgcgtcggcgaaatccacctgctgcgcgaggctcttcaaaaaggcgcagaagccggacaggtgtctctacactcactgattgaaacccccgccaatggcacagggcctagcgaagcattagctatgctgctgcaggagacaaccggagagctcgaggcagccaaggcgcttgtgttaaagcgtatccagatttggaagcggcagcagcagctcgccggtaacggcgccccattcgaggagagcctggcaccactccaggaaaggtgtgagtctctggttgacatctatagccaattacagcaggaggtgggcgcggccggcggtgaacttgaacctaagactcgcgccagtctgactggtagactcgacgaggtcctgagaactctagtcacatcgtgttttcttgtagagaaacagccgccacaggtgttaaaaacacagacaaaattccaagctggagtgcgttttctgcttggcttgcgcttcctcggcgccccggctaaacctccgctggtgcgcgccgatatggtcaccgaaaagcaggcccgggagcttagtgtgccgcaaggtcccggagccggcgccgaatccaccggagaaattataaacaatacagtgcctctagaaaatagcatccctggaaattgttgttctgcattatttaagaatcttctattaaagaagatcaaaagatgcgagcgaaaagggaccgaatcggtcactgaagaaaagtgcgctgttctgttctccgcaagctttaccctcggacccggaaagcttccaatccaactgcaagccttgtctttgcctctagtggtgatcgttcacggtaatcaggataacaatgcaaaagctactatcttatgggacaatgctttctctgagatggaccgtgtaccttttgtggtcgccgagcgtgttccgtgggagaagatgtgcgaaaccctcaatcttaagttcatggctgaagttggcactaacaggggcctgcttcccgagcactttttgttcctggcccagaagattttcaacgataacagtctgagcatggaagctttccagcatcggagcgtttcttggtctcagtttaacaaagagattctcttgggaaggggatttacattttggcagtggtttgacggcgtcctcgacctaacaaagcggtgtctcaggtcatattggtccgatcggctgatcatcgggtttatctccaaacagtatgtgacctcactgttgctcaatgaacccgacggcacctttctcctccgcttttcggacagtgagattggcggcattaccatagcacacgtcataagaggccaggatgggagtcctcaaatcgagaacatccagccattcagcgctaaagacctatctattaggagcctgggtgacagaatcagggacctggcccaactaaagaatctttaccccaagaagcctaaggacgaagcttttcgttcccactacaagcccgagcaaatgggcaaagacggaagggggtatgttccagccacaattaagatgacagtggagagagaccaaccgctgccaacacccgagcttcagatgcctacaatggttccatcatatgatcttggcatggccccagattctagtatgtctatgcagttggggcctgatatggttccccaggtctaccccccacactctcacagtatccctccatatcagggactgtcacccgaggaatcagtcaacgtcctttccgctttccaggagccacatctccagatgccaccatcactgggccagatgagcctgcccttcgatcaaccccacccacaaggcctcctgccatgtcagcctcaagaacacgcggtgtcctcacccgacccactgctctgttcggacgtgactatggttgaagatagctgtctttcccaacctgtgaccgcgtttccgcagggtacatggattggcgaggacattttcccgcctttgctgcccccaactgagcaggacctaactaagctgttattagaaggacagggagagtctggcggcggatcactgggcgcccagcctctgctccaaccatcccattacggacagtccgggatttcaatgtcccacatggatctgcgggccaacccctcgtggtag

SEQ ID NO: 205172 - DNA, 2214 bp, synthetic construct
  misc_feature 1..2214: note = Description of Artificial Sequence: Synthetic coding sequence
  source 1..2214: mol_type = other DNA
atggagcagttccggcacctgcccatgcccttccactggaagcaggaagagctgaaatttaaaacgggcctgaggcggctccaacaccgcgttggcgagatccatctgctgcgagaagcactgcaaaagggggccgaggccggccaagtaagcctccactcactcatagaaacaccagctaacggtaccggaccatccgaagccctggctatgttacttcaggaaaccactggcgagctcgaggccgcaaaggccctcgtgttgaaaaggatccagatttggaagagacagcagcagctcgccggcaacggcgcaccatttgaagagtctctggccccccttcaagaacggtgcgagtctctggttgatatctattctcagctgcaacaggaagtaggcgccgccgggggagaactggagccgaagaccagggcttctctgaccgggcgcttggatgaagtccttcggaccctggtgaccagctgctttttagtggaaaagcagccacctcaggtcctcaagacccagacgaagttccaggcaggcgttcgatttcttttgggtttgcgtttcctgggtgcgccagccaaacccccactggttagagcagacatggtcaccgaaaagcaggcgcgggaactcagtgtgccacagggcccaggcgcgggtgctgagtccacgggggagatcataaataataccgtccctcttgaaaattcaattcccggcaattgctgttctgcactgttcaaaaacctgctcctcaagaaaattaaacgctgcgaacgcaaaggaacagagagtgtgaccgaagagaagtgtgccgtgctgttcagtgcttcctttacactgggccccgggaaactgcctatccagttacaggctttgagcctcccactggtggttatagtgcacggtaaccaggacaacaacgcaaaggccacaattctctgggacaacgcctttagcgaaatggatcgcgtgccctttgtggtcgcggaaagagtcccctgggaaaagatgtgtgaaacacttaacctcaaattcatggccgaggtgggcacaaatcgagggctgttaccagaacattttctctttttggcgcagaagatcttcaacgacaattccttatccatggaagcttttcagcaccgttccgtcagctggtctcagttcaacaaggaaattctgctcggccgggggtttacattctggcagtggttcgacggggtgttggacctcaccaaaaggtgcctgagatcctattggtcggacaggctgatcattgggtttatcagcaaacagtacgttacaagtttgctcctgaatgaaccagatggaacttttctgctgaggttcagcgactcagagatcggaggtatcacgattgctcatgtaattcgcgggcaggatggatccccacagatcgagaatatacaacctttctctgccaaagatctgagcattcggagcctcggggatcgcattagggacttggctcagcttaagaacctctatccaaagaagccaaaggacgaggcattccggagccactataagccagagcagatgggcaaggacggtagggggtatgtcccagcaacaattaagatgacagttgaacgtgatcagcctctgcctacccctgagctgcagatgcctacaatggtgccatcgtacgacctgggaatggcccccgactcttctatgagtatgcagcttggcccggacatggtgccccaggtgtatcctcctcattcccattctatccccccatatcagggactctcaccagaagagtctgtgaatgtcttatcggcattccaggagccacacctccagatgcctccctctctgggccagatgtctctgccgtttgatcagccccacccacagggactgttaccatgccaaccgcaggagcacgcagtttccagcccggatcccctgctctgttctgatgtcacaatggtggaagacagttgccttagccagccagttaccgctttcccccagggcacttggattggtgaagacatcttccctcccctgttgccacccacagagcaagacctgacaaagctgttactggaaggacagggcgagtccgggggagggtctcttggagcgcagcccctactccaaccctcacactatggacagagtgggatctctatgagtcatatggatctgagagcaaatccgtcatggtag

SEQ ID NO: 205173 - DNA, 2040 bp, synthetic construct
  misc_feature 1..2040: note = Description of Artificial Sequence: Synthetic coding sequence
  source 1..2040: mol_type = other DNA
atgagcctgtggggcctggtgagcaagatgccccccgagaaggtgcagaggttgtatgtcgatttcccccagcaccttcggcatctgctcggggactggttagagtctcagccatgggaatttctggtgggttcagacgccttctgctgcaacctcgcttccgccttgctcagcgatacagtccaacacctgcaagcgtctgtgggtgagcagggtgaaggcagcacgattctccagcacattagtaccttagagtctatctaccagcgcgatccactaaagcttgtcgcgacgtttaggcaaattctgcagggcgaaaagaaagcagttatggagcagttccgccacctgccaatgccatttcattggaagcaagaggagctcaagtttaagaccggccttagaagactgcagcacagggtgggtgagatacatctgttgcgagaagccttacaaaaaggcgccgaagccggccaggtgagtctgcattcactcattgagactcctgctaatgggactgggccttctgaagctctggctatgttactgcaagagaccacaggggagcttgaagctgccaaagccttggtactaaaacgcattcaaatttggaaacgtcaacagcagctggccggcaatggggccccattcgaggagtctcttgctccactgcaggaacgctgcgagtccctagtggacatatacagccaattgcagcaagaggtcggcgccgctggaggcgagctggagcccaagacaagagcctcgttgacgggccgccttgatgaggtgctgcgcaccctggttacatcttgctttcttgtggaaaaacagccccctcaggtactgaaaacccagacgaaattccaggcaggagtcaggtttctgcttggcctgaggtttttaggcgcacctgctaaaccccccctcgtgagagctgatatggtgactgagaagcaggccagggagttgtcagtgccccagggacccggggcaggcgccgaaagcacaggtgaaatcataaacaataccgtcccgctcgaaaactctattccaggtaactgctgcagtgccctattcaagaacctcctattaaaaaagattaagcgttgtgaaagaaaggggaccgagagcgttactgaagagaagtgcgctgtgctattcagtgcaagcttcactctcggacccggtaaacttcccatacagctgcaggccttgtcgttaccgctggttgttattgtccacgggaaccaggacaataatgctaaagccacaatcctctgggacaacgcattcagcgagatggatcgggtgcctttcgtcgtggctgagcgagtgccgtgggagaaaatgtgcgaaaccctgaatctaaagtttatggcagaggtgggcactaacaggggcctattgccagaacattttctgtttcttgcccagaaaattttcaatgacaactcactcagcatggaagccttccaacaccggtctgtgagctggtcccaatttaataaagagatcttgttgggtcgcggctttacattttggcagtggttcgacggtgtgttggatctaacaaagaggtgcctgagatcctactggtctgataggctgataataggattcatatccaagcagtacgtcacttcattactccttaatgagcctgatggcactttcctgcttcgcttttcagactctgagatcggtggtattaccatcgcgcatgtgatcagaggccaggatggctcgccgcaaatagagaacatccaacctttttccgcaaaggacctctcaattcggagcctcggcgacaggatcagggatcttgctcagctaaagaacttgtacccaaagaaaccaaaagacgaagcctttcggtcacattacaagcccgagcagatgggcaaggacgggcgggggtacgtgcctgcgacaatcaaaatgaccgtggagcgtgaccagcccctgcctacgccagaactgcagatgcctaccatggtaccatcatatgacctcggtatggccctcatccctccatag

SEQ ID NO: 205174 - DNA, 2193 bp, synthetic construct
  misc_feature 1..2193: note = Description of Artificial Sequence: Synthetic coding sequence
  source 1..2193: mol_type = other DNA
atggagcagttccggcacctgcccatgcccttccactggaagcaggaagagctgaagtttaaaacaggcttgcgaaggttgcagcaccgggtaggtgaaatccatctgctcagagaggcactccagaaaggcgccgaagccggacaggtgagcctgcactcattgatagagacacctgcaaatggaaccgggcctagcgaggcgcttgccatgttgttgcaagagaccacaggagaactagaagccgctaaggccttggttctgaaaagaatccagatctggaagcggcagcagcaactcgccggcaacggcgccccttttgaagagtcgctcgcgcctttgcaggagcgctgcgagtctttggttgatatatattcccagctacagcaggaagtcggcgcggccggcggagaactcgaacctaaaacaagagcttctttgacgggccgtctggacgaagtccttcgcaccctggtgacctcatgtttcttggttgagaagcaacctccacaggtgttgaaaactcagaccaaatttcaggcgggagtaagattcctgctggggctgcggttcctgggcgcgccggcaaagcctccactcgtgcgggctgacatggtcactgaaaagcaggcgagggaactctccgtcccccagggccccggtgctggagcagagagtacgggcgagattatcaataataccgtgccactggaaaattctatcccaggaaattgctgctcggccctcttcaaaaatctcctcctaaaaaaaataaagaggtgcgaacgcaagggcacagagagtgtgactgaagaaaagtgcgccgttctgttttctgcctcatttacactcggcccaggaaagctcccaatacagttacaggccctgagcctccccctagttgtgatcgtccatggcaaccaggacaataatgcaaaagccaccatcctctgggacaatgctttttctgaaatggatagggtgccatttgtggtggcagaacgggtcccctgggagaaaatgtgcgaaactttgaatctcaagtttatggccgaggtggggacaaaccgcggactcttgcccgaacattttctttttcttgcccagaagatctttaacgataactcattatctatggaggccttccaacatcgctcagtgtcctggagtcagttcaacaaagaaatccttctggggcggggctttaccttctggcagtggtttgacggagtgctggacctgaccaaaaggtgtctgagatcatactggagcgacagacttatcataggatttataagtaaacagtatgtgactagcctactgctcaacgaacctgatggaacttttcttttacggttctcggatagcgagattggtgggatcacgattgctcatgttatcagaggacaggatgggagccctcagatagagaatatacagcccttttcggccaaagatctgagtatcagatccctaggggacagaattagagatctcgcccagcttaagaatctgtatcctaagaagccaaaggacgaagcttttcgatcccactacaagcccgagcaaatgggaaaagacggtagaggctatgttccagccactattaagatgaccgtagaacgggaccagcctttgccaactcccgaactgcagatgccaacaatggtgcccagctacgacttggggatggcccccgattcgtcaatgtcaatgcaacttggccccgacatggttccccaggtctacccaccacattctcactctattcctccataccagggcctatccccagaagagagcgtgaatgtcctctcagcgttccaggagccccacctgcagatgccccccagtctgggacagatgagtctgccttttgatcagcctcacccccaagggcttcttccatgccaacctcaagaacacgcggtctcctcccccgatcctctgctgtgcagcgacgtgactatggttgaggacagttgtctaagccaacccgtgacagctttcccgcagggaacttggatcggtgaagatatcttcccacctttgctgcctccaaccgagcaagacctgacaaagctgctcctcgaaggccagggcgagtctggaggcgggtccttgggccacagcccaagctgctcgcctccgacaatgggcaatctagggagtcaatgtcctacatggacatag

SEQ ID NO: 205175 - DNA, 2544 bp, synthetic construct
  misc_feature 1..2544: note = Description of Artificial Sequence: Synthetic coding sequence
  source 1..2544: mol_type = other DNA
atgagcctgtggggcctggtgagcaagatgccccccgagaaggtgcaacgactttatgtagacttcccacagcatctcaggcacctcctgggggattggctcgagagccagccatgggaattcttagtaggcagcgacgccttctgctgtaacttagcatctgccttgctttccgataccgtacagcatctgcaagcatctgtgggcgagcagggtgaggggtcaaccatcctgcagcatatttccacgctggagtcaatctatcagagggaccctctcaagctcgtggccacctttcggcagatcttgcagggagagaagaaggccgtaatggagcagttccggcaccttccgatgccatttcactggaagcaggaggaactgaaatttaaaacaggccttaggcggctccaacaccgagtgggcgagatccacctgcttcgcgaagccctacagaaaggagccgaggccggacaggtgagtttgcactctcttatcgagaccccagccaatggtaccgggccatcagaagctctggccatgctgttacaggagaccacaggcgagttggaagccgcaaaagctcttgttcttaaacgtattcagatctggaagcgtcagcagcagctggcggggaacggtgcacccttcgaggaatctctggcccccctgcaggagcgctgtgagagtctcgttgacatttacagtcagctccagcaggaggtgggtgccgctggaggagaactggaaccaaaaactcgagcttcactcaccgggagacttgacgaagtgctccgcacactggtgacgagctgcttcctggtcgagaagcaaccgccccaggtacttaagactcagacaaagtttcaggccggggtgcgttttctcctcggtcttaggttcctgggcgcacccgctaaacccccactggtgcgcgctgatatggtcaccgagaagcaggctcgtgagctgagcgtgccccagggacctggtgccggcgctgaatcaaccggcgagattatcaataacaccgtcccattagagaattctatccccggcaattgctgtagcgccctcttcaagaacctcttactgaaaaagattaaacgctgcgagaggaagggaacagaatctgtcactgaagagaagtgtgctgtgctgttctccgcaagctttactctcgggcctggaaagctccctattcagttacaggctctgtccctgccattagtggtgatcgtccacgggaaccaggataacaacgccaaagcgacaatcctttgggataatgctttctctgagatggaccgcgttccatttgtagttgccgaacgcgtaccctgggagaagatgtgcgaaacactgaacctgaaattcatggctgaagtgggcactaataggggcctgctgcctgagcatttcctatttctggcccagaaaattttcaacgataactccctctccatggaggctttccagcaccgttctgtgagttggtctcagttcaataaagagattctccttgggcgcggtttcaccttctggcagtggtttgacggagtcttagacttgaccaagagatgcttaagatcctactggtccgacagattgatcatcgggttcattagcaagcagtacgtcacgtcactcctcttgaacgagccagacggtacttttcttctgcgtttcagcgactccgaaatcggcggaatcaccattgctcacgtgattcgcggacaggacggctcccctcagatcgagaacatccagcccttttccgcgaaggatctatctataagatctctgggcgatagaatcagggacctggcgcaactgaagaatctttaccctaaaaaacctaaggacgaggccttcagaagccattataagccggagcagatggggaaggatggcagaggctacgtgccagccaccatcaaaatgactgtcgaacgagatcagccactgcccactcccgaattgcaaatgcccactatggtcccaagctatgatctggggatggcccctgatagctcgatgtccatgcagctgggtccagacatggtgcctcaagtgtatccgcctcattctcattccatcccaccgtaccaagggctctccccggaagagtccgtcaatgtgctcagcgcctttcaggaaccacacttgcagatgcccccgtctctcggacagatgtcactgccatttgatcagcctcacccacaggggctgcttccttgccagccacaggaacacgcggtctctagtcctgatccgctgttatgttctgacgttacaatggtggaggactcgtgtctctcccagcccgtgaccgcttttcctcagggcacttggatcggtgaagatatatttccccctttgctacctcctaccgagcaggacctgactaagctgctcctcgaaggccagggtgagtctggaggcggatctctgggagctcagccactacttcaaccctcacactacgggcagagtgggatctccatgtcgcacatggatctaagagctaaccctagttggtag

SEQ ID NO: 205176 - DNA, 195 bp, synthetic construct
  misc_feature 1..195: note = Description of Artificial Sequence: Synthetic coding sequence
  source 1..195: mol_type = other DNA
atgagcctgtggggcctggtgagcaagatgccccccgagaaggtgcagaggctgtacgtagatttccctcagcacctacgacacctcctgggcgattggcttgaaagtcagccctgggaatttctggtgggatctgatgctttctgctgtaatttagcctctgccctgttatctgatacggttcagcatttgtag

SEQ ID NO: 205177 - DNA, 435 bp, synthetic construct
  misc_feature 1..435: note = Description of Artificial Sequence: Synthetic coding sequence
  source 1..435: mol_type = other DNA
atgagcctgtggggcctggtgagcaagatgccccccgagaaggtgcagaggctatacgtcgatttcccccagcatttgcgacacctgctaggcgactggctcgagtctcagccctgggagtttctggtgggctctgacgccttttgttgcaacctagctagtgcccttctgagcgacaccgtgcagcacctccaggcctctgtgggcgagcagggagaaggttctacaatcctgcagcacatctccacacttgagtctatttatcagagggaccctctcaaacttgtagctactttcagacagattctgcaaggtgagaagaaagctgttatggagcagttccggcatctccctatgccctttcattggaaacaggaagagcttaaattcaaaacaggactgaggagactccaacatcgggttggagaaatatag

SEQ ID NO: 205178 - DNA, 465 bp, synthetic construct
  misc_feature 1..465: note = Description of Artificial Sequence: Synthetic coding sequence
  source 1..465: mol_type = other DNA
atgagcctgtggggcctggtgagcaagatgccccccgagaaggtgcagaggctctacgtggacttcccccagcacctgcgccatttgctgggcgattggctggagagtcagccatgggaatttctggtcggcagcgacgccttctgttgtaacctcgcctccgcgctgctgagcgataccgtacagcatctgcaggccagcgtcggtgagcagggagaaggatcaactatcttacagcatatttccacccttgaatccatctaccagcgtgatcccctcaaactggtagcgaccttccgacagatcttgcagggtgaaaaaaaggcagtaatggagcaattcaggcatcttccaatgcccttccactggaagcaagaggagctaaaattcaagactggacttaggagattgcagcatcgcgttggggagattcacttgttgagggaggccctgcagaaaggttag

SEQ ID NO: 205179 - DNA, 318 bp, synthetic construct
  misc_feature 1..318: note = Description of Artificial Sequence: Synthetic coding sequence
  source 1..318: mol_type = other DNA
atgagcctgtggggcctggtgagcaagatgccccccgagaaggtgcagcgcctgtacgtggacttcccacagcatttgcgccacttgctcggcgattggttagagtcccagccctgggagtttctcgtcggctccgacgcgttctgttgtaacctggcctccgcccttctgagtgataccgtccagcacctacaggcctctgtgggtgagcagggagaaggttctaccatcttacagcatattagtacactcgaatctatttaccagcgcgatcccctgaaactggtggccacctttcgtcaaattctccagggatag

SEQ ID NO: 205180 - DNA, 312 bp, synthetic construct
  misc_feature 1..312: note = Description of Artificial Sequence: Synthetic coding sequence
  source 1..312: mol_type = other DNA
atgagcctgtggggcctggtgagcaagatgccccccgagaaggtgcaacgactttatgtggattttccgcagcacctgaggcacctcctcggtgattggttggagtcacagccctgggaatttctcgtgggatcagatgccttctgctgtaacctggcatccgctctgctgtctgatactgtccaacatctgcaggcctccgtgggagaacagggcgaggggtcaaccattctgcagcacatttcgactctggagagcatatatcagagagacccattaaagttagtggccacattcagacagattttgtag

SEQ ID NO: 205181 - DNA, 480 bp, synthetic construct
  misc_feature 1..480: note = Description of Artificial Sequence: Synthetic coding sequence
  source 1..480: mol_type = other DNA
atgagcctgtggggcctggtgagcaagatgccccccgagaaggtgcagcggttatacgtggacttccctcaacatttaagacacctcctgggcgattggctggagtctcagccatgggagtttctggtggggtctgacgccttttgttgcaatctggccagtgccctccttagcgataccgtgcaacatcttcaggcaagcgtgggagagcagggagagggtagcaccatcttgcagcacatcagcacactggagagcatatatcagagggaccccctcaagctggtggctacgtttcggcagatacttcaaggcgaaaagaaggcggtcatggagcaatttcgacatcttcctatgccctttcactggaaacaagaggagctgaagttcaagactgggctgagacggctgcagcacagggtgggggagatccacctgctccgtgaggccctccagaaaggagccgaggccggacagtag

SEQ ID NO: 205182 - DNA, 2544 bp, synthetic construct
  misc_feature 1..2544: note = Description of Artificial Sequence: Synthetic coding sequence
  source 1..2544: mol_type = other DNA
atgagcctgtggggcctggtgagcaagatgccccccgagaaggtgcagcgcctttatgtcgacttcccacagcatctgcggcacctgctcggagattggttggagagccagccttgggaatttcttgtaggttcagatgcattctgctgtaacttagcatccgccctgttatccgatacagtgcagcatcttcaggcgagtgttggcgagcagggcgaggggtccacaatcctgcagcacatttctaccctcgaatcaatctatcagcgcgaccccctgaaactggtggctactttccgccaaatcctccagggagaaaaaaaagccgtgatggagcaatttcggcacctccccatgcccttccactggaagcaggaagaactcaagttcaagaccggcctgcgcagacttcagcatagggtaggggaaatacatttattacgcgaggcgctgcagaagggtgccgaggctgggcaagtcagcctgcatagcctcatcgaaacacctgccaatggcaccgggccatcagaggcactggccatgttactgcaggagacaacgggagaactagaagccgctaaagcactggtactgaaacgcattcagatatggaagcggcaacagcagctagccggaaatggcgccccgtttgaagaatctctcgctcccctgcaagaacgttgtgagagccttgtggacatctactctcagctgcagcaggaagtgggggcagctggtggcgaactcgagccaaagacaagagccagtctaactgggcgcctggatgaggtgctgagaactcttgttacttcctgcttcctggtggagaagcagccaccacaagttcttaaaacacagaccaagttccaagccggagttcgctttctgctcggtctcagattcctgggggccccggccaagcctcctttagtcagagccgatatggttactgaaaaacaagctcgcgaactttccgtgccgcagggtcccggagccggggcagagagcactggagagatcataaacaacaccgtaccactcgaaaattctatacccggcaattgttgtagcgccttgtttaagaaccttctgcttaaaaaaattaaaaggtgtgagcggaaagggaccgagtccgtcacagaggagaaatgtgctgtgctgttcagtgcatcctttaccctcggtcctggaaaactccccattcagctgcaggcccttagtctaccacttgtggtaatcgtccatggcaatcaagacaacaatgcaaaggcaaccatcctctgggacaatgcattttctgaaatggaccgcgtgcctttcgtagtagcagagagagtgccatgggagaaaatgtgcgagaccctgaacctcaagttcatggcggaggttggcaccaataggggattgctgccagaacattttctgtttctcgctcagaagatctttaacgataattcactatctatggaagcattccagcacagatccgtctcctggagccagtttaacaaagaaatattactaggcagaggctttacgttttggcagtggtttgatggggtcctggatctgactaaacgttgcctgagatcttattggagcgatcgtctgataatcggattcattagtaagcaatatgtgacaagtctgctattaaacgaacccgatggaacatttctgctacggttctctgacagtgagatcggggggatcacaattgcgcatgtgatccgcgggcaggacgggagcccccagatcgagaacatccaaccattcagcgctaaagacctatcaatcaggtcactgggcgataggatcagagacctggctcagctgaagaacctgtaccctaagaaacctaaggatgaagccttccggtctcattacaaaccagagcagatgggaaaagacggtagaggctatgtccccgcgacaattaagatgacagttgaacgggatcagcctctccccacaccagaactgcaaatgcctactatggtgccatcatatgacctgggaatggcccccgattcatctatgagtatgcaactgggtcccgatatggtcccccaggtctaccccccgcactcccactcgatacccccataccaggggctgtctccagaagagtctgtgaacgttctgagcgccttccaggagccccacctgcagatgccaccatccctggggcagatgtcactgccctttgaccagccacacccacaaggcttactgccatgccaaccacaggagcatgcagtttcaagccccgaccccctgctgtgttccgacgttacgatggtggaggactcttgcctgagccaacctgtcactgccttccctcaggggacctggatcggcgaggatatctttcctcccctgctgccaccaactgagcaggacctaaccaagttacttctggaggggcagggcgaaagtggaggagggagcctcggagctcagcccctgttgcagcccagccactacggtcaaagcgggatatccatgtcccatatggatctgcgcgctaacccctcctggtag

SEQ ID NO: 205183 - DNA, 225 bp, synthetic construct
  misc_feature 1..225: note = Description of Artificial Sequence: Synthetic coding sequence
  source 1..225: mol_type = other DNA
atgagcctgtggggcctggtgagcaagatgccccccgagaaggtgcagcggctctatgtcgactttccccaacatctgcggcacttactcggcgactggctcgagtcccagccatgggaatttttggttggatcagatgcattctgctgcaatctggcaagtgctcttctcagcgacaccgtgcagcatctccaagcaagcgtgggggagcagggcgagggatag

SEQ ID NO: 205184 - DNA, 564 bp, synthetic construct
  misc_feature 1..564: note = Description of Artificial Sequence: Synthetic coding sequence
  source 1..564: mol_type = other DNA
atgctgggccaccccaaggtgtgcgagaagctgaaggccctgatggtggagtggacagatgagttcaagaacgatccgcagctgagtttaatttcagccatgatcaagaaccttaaggagcagggcgtgacattccccgccatcgggagtcaagccgctgagcaagcgaaggccagccctgctctggtggcaaaggatcctgggacagtggcaaataaaaaggaagaggaggaccttgctaaggcgatagagctctccctgaaggaacagcgccagcagtctactaccctgtccactctgtatcccagcaccagtagtttgctgacaaatcaccaacacgagggcagaaaggttcgtgccatttacgatttcgaagctgccgaggacaacgagcttacttttaaagcaggagaaataatcacagtgctggacgactctgacccgaactggtggaaaggggagacccaccagggaatcgggctttttccttctaacttcgtgaccgccgacttgacagctgagcctgaaatgattaaaacagaaaagaagacagtgcagttctag

SEQ ID NO: 205185 - DNA, 1623 bp, synthetic construct
  misc_feature 1..1623: note = Description of Artificial Sequence: Synthetic coding sequence
  source 1..1623: mol_type = other DNA
atgcccctgttcgccaccaaccccttcgaccaggacgtggagaaggctacctccgagatgaacaccgctgaggattggggattaatccttgatatatgcgacaaggtgggacaatccaggacaggaccaaaggattgtctgcgatccatcatgcggcgcgtgaaccataaggaccctcacgtggcaatgcaagctcttacccttctcggcgcctgcgtaagcaattgcgggaaaatttttcacctggaggtgtgctcaagggatttcgcgtcagaggtgtcaaatgtcctcaataaaggtcacccaaaagtgtgtgagaagcttaaggctctgatggtggagtggaccgacgagttcaagaatgacccacagctcagccttatctcagccatgattaaaaacttaaaggagcagggtgtaacttttccagcaattggctctcaagccgctgaacaggcaaaagcatccccagctctcgtagcaaaagaccctgggaccgtggccaataagaaggaagaggaagatctcgccaaagccattgagctgagcctcaaggagcagcggcagcagagcaccactcttagtacgctataccccagtacatcttcattgcttactaatcaccagcatgagggccggaaggtgcgtgccatttatgacttcgaagccgcagaggataatgagttgacatttaaagccggtgaaattatcactgtgcttgacgattccgacccaaactggtggaagggagagactcaccagggcattggcctgttcccttcgaactttgtgaccgccgatctcactgccgagcccgaaatgatcaagacagaaaagaagacagttcagttctcggacgacgttcaggtggagactatagagccagaacctgagcccgcgttcatcgacgaggacaaaatggatcagctgctccaaatgcttcagagcaccgacccttccgatgaccagcccgacctgccagagctccttcatctagaggcgatgtgtcatcaaatggggccattgatcgacgaaaaacttgaggatattgataggaaacattctgagttgtcggaactgaatgtgaaagtgatggaggcgctttctctctacaccaagttgatgaacgaggatccgatgtattccatgtacgcaaaacttcagaatcaaccctattatatgcagtcaagcggcgtgagcgggtcccaggtctatgctggcccgccgcccagtggcgcatacctggtcgctgggaatgctcagatgtcccatttacaaagctattctctgccccctgaacagctgtctagcctgagtcaggctgtggtccccccctccgctaaccctgcgttgccttctcagcagacccaggccgcctatcctaatactatggtgtcttctgttcaaggaaacacctatccctcccaagctccggtgtactctccacctccagccgctacagcagccgctgctacagctgatgtgaccctgtaccagaatgctggccctaacatgcctcaggttcctaattataatcttacttcttctacattgccccagcccggtggatctcagcagccacctcagccgcagcagccatatagccaaaaggccctactgtag

SEQ ID NO: 205186 - DNA, 357 bp, synthetic construct
  misc_feature 1..357: note = Description of Artificial Sequence: Synthetic coding sequence
  source 1..357: mol_type = other DNA
atgcggcgggtgaaccacaaggacccccacgtggccatgcaggccttgacactactcggggcctgcgttagcaattgcggcaaaatctttcacctagaggtctgctcccgcgacttcgctagcgaagttagtaatgttttaaataagggacaccccaaggtatgcgaaaaactgaaggcactgatggtcgagtggaccgatgaattcaagaacgacccacagctcagtctcattagtgctatgatcaagaatctgaaagaacaaggtgttactttcccagctatcgggagccaggcagctgaacaagccaaggcctctccagcactggtggcaaaagacccagggactgtagcctag

SEQ ID NO: 205187 - DNA, 1290 bp, synthetic construct
  misc_feature 1..1290: note = Description of Artificial Sequence: Synthetic coding sequence
  source 1..1290: mol_type = other DNA
atggtggagtggaccgacgagttcaagaacgacccccagctgagcctgatcagcgctatgataaagaacttgaaggaacaaggggttacattcccggccatcggttctcaagcagcggagcaggctaaggcatcccccgccctggtcgccaaggaccctgggactgttgctaataaaaaggaggaagaggaccttgcaaaagcaatcgagctgtccctgaaggagcaacgccagcaatctactactctctctacactgtacccttccacctcctctctgctgacgaaccaccagcacgagggaagaaaggtgcgtgcgatttatgacttcgaagctgccgaggataacgaactgacctttaaggccggagagataatcactgtgctggacgactctgaccctaattggtggaaaggggaaacacatcaagggatcggcctgtttccgtcaaacttcgtgacagctgacctgacggctgagccagagatgattaagacagaaaaaaaaacggtccagttctccgatgacgtccaggtggaaactatagagcctgagccagaacccgcttttattgacgaggataaaatggaccaattgcttcaaatgctccaatctacagacccctctgacgaccagcctgacttaccggagcttctgcacctcgaggccatgtgtcatcagatgggacccttgatcgacgagaagctcgaggacatagaccgcaagcacagtgaacttagcgagctcaatgtgaaggtgatggaagccttgagtttgtacaccaaactcatgaatgaggaccctatgtatagtatgtatgcaaagctccagaatcaaccctactatatgcagtctagtggcgtgtccggcagccaggtgtatgctgggccacctcccagtggcgcatacctggtagctggcaacgctcagatgtcacacctccaatcatattctttaccccctgagcagctgtcttcattaagccaggctgtggtcccccccagtgctaatcccgcattaccaagtcagcagacgcaggccgcctacccgaacactatggtgtcaagtgtacaaggtaacacgtatccttctcaggccccagtctacagtccccctccggccgctactgcagctgctgcaacggccgacgtgaccctgtaccagaatgcaggccccaatatgccacaggtacccaattacaacctgacttcgagtacattaccccaacccggaggctcccagcagcccccacaaccacagcagccttatagccaaaaggcgctgctgtag

SEQ ID NO: 205188 - DNA, 1578 bp, synthetic construct
  misc_feature 1..1578: note = Description of Artificial Sequence: Synthetic coding sequence
  source 1..1578: mol_type = other DNA
atgcccctgttcaccgccaaccccttcgagcaggacgtggagaaggcaacgaatgagtacaacacaaccgaagattggtctctgatcatggacatctgcgataaagtcggttctaccccaaacggggccaaggattgtcttaaagcgatcatgaaacgggtcaatcacaaagtgccccacgtcgcactccaagctctcaccctgctgggggcctgtgtagccaactgtgggaaaattttccacttagaagtctgcagtagagattttgctactgaagtccgtgccgtgattaaaaataaagcccatccaaaggtctgtgaaaagctcaaaagcctgatggttgagtggtctgaggaattccagaaagacccccagttttccctaatcagcgcaacaataaaatcgatgaaagaggaggggatcacatttcctcccgcaggatcccaaacagtgtccgcagccgccaaaaacggtacatcctctaataaaaacaaggaagacgaagatattgctaaagctatcgagctgagcctgcaggaacagaagcagcagcacactgagactaagagcctgtacccttcaagtgaaattcaactgaacaacaaggttgcgagaaaagttagagctttatacgactttgaggcagtcgaagataacgaactgacttttaagcacggggagatcattattgtgttggacgactcagacgcaaattggtggaagggggaaaatcaccggggaatcggtcttttcccaagtaacttcgtcaccactaatctcaatatcgagactgaggccgcagccgttgacaaactgaacgtgattgacgatgacgttgaggaaattaaaaagagcgagccagagccagtctacattgacgaggataagatggacagggctctgcaggtgttacaatcaatcgaccccactgatagcaaacctgatagccaggatcttcttgacctggaggatatctgtcagcagatgggacctatgatagacgagaaactcgaggaaatagataggaagcacagcgagctgagcgagcttaatgttaaggtgttggaagccctggagttgtacaacaaactggtaaatgaagctcccgtgtactcagtttatagtaagcttcacccccccgcccattatccccccgccagtagtggagtgcctatgcaaacgtaccctgtacagtcccatgggggaaattatatgggccagtccatccatcaggttactgttgctcagtcatatagcctcggtcctgatcagattggacctctgagaagcctgcctccaaatgtcaattcctccgtgacagcccagccggcccagacctcttatctttccaccgggcaggatacagtgtctaacccgacatatatgaatcagaatagcaaccttcaatctgctaccggaaccactgcctacacccagcagatgggtatgtccgtggatatgtcttcataccagaacactacttcaaatctcccacagctggctggcttcccggttacggttccagcacacccagtcgcacagcagcatacaaactatcaccagcaaccgctgctgtag

SEQ ID NO: 205189 - DNA, 3129 bp, synthetic construct
  misc_feature 1..3129: note = Description of Artificial Sequence: Synthetic coding sequence
  source 1..3129: mol_type = other DNA
atgcccatgtgggccggcggcgtgggcagcccccggcggggcatggccccggcgtctactgacgacctttttgcacgcaagcttcggcagccagctagacctcctctgaccccccacacgttcgagcccaggcccgttagagggcccctgctgcggtccggaagcgatgcaggcgaagcacggccccccacccccgcctccccccgggctagggcgcattcccacgaggaggccagccggcccgcagcgacttcgaccagattgtttactgatcccctcgcactgctgggactcccagccgaagagcccgagcccgccttcccccctgttctcgagcctcgatggtttgcacattacgacgtgcaatccctcctatttgattgggccccccgttcccagggaatgggatcacacagcgaagcctccagtgggacactggctagtgccgaggaccaagccgccagtagcgatctcctccatggggcaccggggttcgtttgcgagctcggtggggagggagagttagggttgggcggacccgcctccccccctgtcccccccgcactacccaatgctgccgtctcaatccttgaagaaccccagaacaggacttcagcctattcccttgagcacgctgatcttggcgccggatactataggaaatacttttatgggaaggagcaccagaacttcttcgggatggatgaatccctcggccctgttgcagtaagtcttcggcgcgaggagaaggagggtagcggcggcggtacccttcatagttaccgggtcatcgtcagaacaactcaactgaggactttgcgcggtaccatcagcgaagacgccttacccccaggccctccacgtgggctttcaccacgcaaacttttggagcacgtcgcaccgcaattgagcccttcttgtctgcgactcggctcagcttcgcccaaagtcccccggacattattgacactggacgagcaggttttatccttccagagaaaagtgggcatactctactgtagagctgggcaaggctctgaggaagagatgtataacaaccaagaagcgggccctgcctttatgcagtttctgacgcttctcggagacgtggtgagactgaagggctttgagtcttatagagcacagttagatactaagaccgactctacaggcacccattcactttatacaacatatcaagatcatgagatcatgtttcacgtcagtaccatgttgccatacacgcccaacaaccagcaacagctgttgagaaagaggcatataggaaacgacatcgtgactatcgtgtttcaggagcccggctccaagccattttgcccaactaccatccggtcacactttcagcacgtattccttgtagtcagagctcatacgccgtgtacccctcacacaacctaccgagtagctgtgtctaggacccaagacacgccagccttcgggcccgcccttccagcaggagggggcccctttgctgccaatgctgactttagggcatttctattagcaaaagctctgaatggagagcaggcggctggccatgctaggcagtttcacgccatggcaacacgcaccaggcaacaatacctgcaggatctggctaccaatgaggtgacaactacgtccctcgacagcgcctcccgctttggactgccaagcttgggcgggagacggagagcagcacctagagggccaggggccgaacttcaggctgccggcagcctcgtttggggtgttcgggccgctcccggcgcccgggtcgctgctggggcacaagcgtctggcccagaaggaatcgaggtgccctgtctgcttggcatttctgcagaggccctggtgcttgtcgcacctagagacggaagggtggtctttaactgtgcttgtcgcgatgtgttggcgtggacattctctgaacaacaactggacttgtatcatggtagaggagaggccatcacactgaggtttgatgggagccctggccaggcagtcggcgaggtggtggcgaggctgcagctggtttcccgcggttgcgaaacgagagagctcgcactgcccagggacggacagggtcgactcggtttcgaagtagacgccgagggatttgttacacacgttgaacggttcacgttcgctgagacagctggcctgcgcccaggggctcgactgctgcgagtttgcggccagaccctgccaagcttgcgaccagaggcagctgctcaactactgcgttccgcaccaaaggtctgtgtaaccgtgttacctcctgacgaatcaggtcgcccacggcggtccttcagtgagctgtacactttatccttgcaagagccttcgcggcgcggcgcgcctgatccagttcaagacgaggtacagggcgtcacactccttccaacaacgaagcagcttttgcatctgtgccttcaggatggagggtccccacctggaccaggcgacctggctgaggaaaggactgagttcctgcactcgcagaatagcctgtccccaagaagcagcctgagtgatgaagctcccgtgctgccaaacacaacaccagatctgctgttagccactactgccaaaccttccgttcctagcgcagacagcgagacccctctgacacaggacagaccggggagccccagcggctcagaggataaaggaaaccctgcgccggagctgagagcctcatttctcccacgcaccctctctttaaggaactcgatctctcggattatgtcggaagctggatctgggacactcgaggatgaatggcaggccatctccgagatagccagcacctgtaacactatcctggagagtctcagcagagagggtcaacctattccggaatctggagaccctaaggggactccaaagtcagatgcagaacccgagccaggtaacctctcagagaaggtttcccaccttgaaagcatgttgagaaagctgcaagaggatttacagaaagagaaagccgacagggctgccctcgaagaggaggtgcgcagtctacgtcataataatcgccgcctgcaggcagagtccgagagtgctgccacgcggctcttattagcatcaaagcagctagggtcacctaccgcagacttggcttag

SEQ ID NO: 205190 - DNA, 2823 bp, synthetic construct
  misc_feature 1..2823: note = Description of Artificial Sequence: Synthetic coding sequence
  source 1..2823: mol_type = other DNA
atgcccatgtgggccggcggcgtgggcagcccccggcggggcatggcgcctgcgagcaccgatgacttgtttgccaggaaattgcggcagcccgcccgcccccccttaacaccccatacctttgaaccacgaccggtccgcgggccattgcttcgctcaggtagcgatgcgggggaagcacgaccaccaacccccgcatcacctagggcccgagcccatagtcacgaagaggcgagcagacccgccgcaacaagcacaaggctgttcactgaccccttagccctcctggggctgcccgccgaagagccagaacccgcctttccacctgtattggaacccaggtggttcgctcactatgatgtgcagtctctgttgttcgattgggcacctagatctcaaggtatgggtagtcactcagaggctagttccggaaccctggctagcgccgaagatcaggccgcgagctctgacctgttacatggggcaccaggtttcgtgtgcgaattaggcggggaaggtgaactcggtcttggagggccagctagtccccccgtaccacccgccctacctaatgctgctgtatcaattttggaggaacctcagaaccggactagcgcgtactcgctggagcatgccgatctgggagcagggtattatcgaaaatacttttatggcaaggagcatcagaactttttcgggatggacgagtccctggggcccgtggcggtgtctctccggagagaggaaaaggaaggaagtggcggaggcaccttgcattcctaccgcgtgattgttcgaactactcaactgagaactctgcgcggaacaatctctgaggacgccctcccacctggcccaccacggggcctgagtcctagaaaacttctggagcacgtagctcctcagctatccccatcgtgcttgcggttggggagcgccagtcccaaggtgccccgcacactgttaaccttagatgaacaggtgctgtctttccaacgaaaggtgggtatactctattgcagagccggccaaggctcagaggaagagatgtataacaatcaggaggccggcccggccttcatgcagttcctgaccctcctcggggatgtcgtaaggctcaaaggcttcgaatcttaccgggctcagctcgatacaaaaaccgattcaacagggacacacagcctgtatactacttatcaagaccacgagataatgttccatgtgtcgacaatgcttccttacacccctaataaccaacagcaactgcttcggaaacgccacatcggcaatgatattgtcacaatcgtatttcaggagccaggaagcaaacccttttgtcccactacaatcagaagccactttcaacatgtctttcttgttgtgcgggctcacacaccatgcaccccacacacaacatatcgggtggccgtgtcccggacacaagatactcccgcttttggccctgctctgcccgctgggggtggaccatttgctgccaatgcagacttcagagccttcctgctggcaaaagcactaaacggggaacaagcggccgggcacgcccgccaatttcatgctatggccaccaggacccggcagcaatacctccaagacctcgcgaccaacgagcagctggatctgtaccatggcagaggggaagcaatcactcttaggttcgatggatcacctgggcaggccgtaggggaggtggtagcccgactgcagctggtgtctcgagggtgcgaaacccgggagctggccctgcctcgagatggacaaggcagattgggattcgaggtggatgccgagggcttcgttactcacgtggagaggtttacattcgcagagactgcaggattacgccccggtgcgcgtctgttacgggtttgtggacagaccctccctagcctgcgccctgaggccgctgcccagctgctacggtccgcccctaaggtctgcgtaaccgtccttcctcccgacgaatcaggccggccccgacgatccttttcagagttgtataccttatctctgcaggagccaagcaggcgaggagcacccgatcctgtgcaggacgaggtgcagggtgtgacattactgcctaccactaagcagttgctccatctatgtctccaggatggcggttcccctccagggccaggtgaccttgccgaggaaagaaccgagttcctgcacagccagaattccttgtcgccacgttcctctctgtctgacgaagcaccagtcctgccgaataccactccagatctgctactagccactaccgcaaaaccgtccgtacccagcgctgacagcgagacacccctcacacaggaccggcccggtagcccaagcggctcggaggacaaaggaaatcctgcccccgagctgagggccagctttctccctagaaccctctcgttacggaactctatctccagaatcatgtctgaagccgggtctggtacactcgaagatgagtggcaggccatcagcgagattgcatctacctgcaatacgattctggagtccctcagcagggagggtcagccaatccctgaatcaggcgatcctaagggcacgccgaaatctgatgcagaaccggagcccggaaatttaagtgaaaaagtaagccacttggagtccatgctgcgtaaacttcaggaggacctccaaaaggaaaaggctgatcgggccgcactggaggaggaggttcggtccctgcggcataataaccgcagactgcaggcagagtccgagagcgccgcaactcgacttcttctcgcttctaagcagctcggatctccgaccgccgatttggcctag

SEQ ID NO: 205191 - DNA, 21 bp, synthetic construct
  misc_feature 1..21: note = Description of Artificial Sequence: Synthetic coding sequence
  source 1..21: mol_type = other DNA
atgcccatgtgggccggctag

SEQ ID NO: 205192 - DNA, 312 bp, synthetic construct
  misc_feature 1..312: note = Description of Artificial Sequence: Synthetic coding sequence
  source 1..312: mol_type = other DNA
atgcccatgtgggccggcggcgtgggcagcccccggcggggcatggctcctgctagcacagatgacctgtttgctcgaaaacttcgtcagccagctcggcctccactgacacctcacacattcgaacctaggccagtgaggggtcccctgctcaggagcgggtctgatgctggagaggcccggccccctacacccgctagtccccgtgccagagcccacagccacgaagaagctagtcggcccgccgccacaagcacacgcctctttaccgatccccttgcccttctggggctgccggccgaagaaccatag

SEQ ID NO: 205193 - DNA, 3129 bp, synthetic construct
  misc_feature 1..3129: note = Description of Artificial Sequence: Synthetic coding sequence
  source 1..3129: mol_type = other DNA
atgcccatgtgggccggcggcgtgggcagcccccggcggggcatggcgccagcctcaacggacgatctctttgctcgcaagctgcggcagccagccaggcccccgcttacacctcatacattcgagccccgtccggtgcgtggccctctactgagatcagggagtgacgcgggggaggctcgtcccccgactccagcctccccaagggccagggctcacagccacgaagaggctagcaggcctgcagcgacaagcaccaggctctttactgatcccctcgccctgctggggctccccgccgaggaacctgagcccgcctttcctcccgtcctcgaacccagatggtttgcccactatgacgtgcagagtctgctgttcgattgggccccacgctcccaaggaatgggtagtcactcagaggcctctagtggcaccctggcatctgctgaagatcaggcagcttcgtctgacctcctgcacggcgccccggggtttgtctgtgaacttggtggagaaggtgaactagggctgggaggtcctgcaagtccccctgtcccccccgccttgccaaacgccgccgttagtattcttgaggagccccagaacagaacctctgcttatagcctggaacatgcagatctgggtgccggctattatcggaaatatttctatggcaaagaacatcagaatttcttcggcatggacgagtctctgggcccagtggccgtgtctctacgacgagaggagaaggaaggatccggaggcggtacgcttcactcataccgagtcatcgtgcgcactacacagctgagaacgcttcgaggtaccatatccgaggatgccttgcccccgggtcccccccgaggtctctcaccccgcaaactcctcgagcatgttgcaccccagctgtctccgagttgcttgcgtctgggcagtgccagccccaaggtccctcggacactcctgactttggatgagcaggtgctgagcttccaacggaaggtcggtatactatactgccgggccggccagggcagcgaggaagaaatgtataataatcaggaagccggcccggctttcatgcaattcctgaccctgctcggagatgtagtgagacttaagggcttcgagagttaccgcgcccaattagacactaaaacagattcgaccgggacacacagcctctacaccacctatcaggaccacgagattatgttccacgtatctactatgctaccctatacccccaacaaccagcaacaattgttaagaaaaaggcatattggtaatgacatcgtaacaatcgtttttcaggaacccgggagcaaaccattttgcccaactaccatccgtagccatttccagcatgtgttcttagtcgttcgggctcacaccccgtgtactccacacactacttatagggtggccgtctcccggacacaggatacacctgcttttggccccgccctgcccgccgggggaggcccttttgctgccaatgctgactttagagccttcctgctggccaaggccctaaacggagaacaagccgcaggtcacgcccgacaatttcacgccatggccaccagaacccggcagcagtatttacaggatctcgctactaacgaagtgaccactaccagtctcgattcggcctccagattcggcctgccaagcctgggtggaaggcggcgggccgctcccaggggccctggagcagaattgcaggccgctgggtcactcgtgtggggcgtaagggccgctcccggggcccgcgtcgccgccggcgcccaagccagcggacccgaagggatcgaggtgccttgcctgctgggaatctccgccgaggcgcttgtcttagtggctccaagggatggacgggtggtatttaactgtgcctgcagagacgtcttagcttggacgttcagtgaacagcagctggacctctaccatggccgaggagaggctataacgctgcgtttcgacggaagtccaggccaagctgtgggtgaggtggtggccaggctccagttagtgtcacggggctgcgaaacgagagagttagcccttcctagggacggacagggaagactgggcttcgaagtcgatgctgagggatttgtgacccacgtggagcgctttacgtttgctgagacggctgggcttcgccctggggcccgtttgcttagggtttgcggacagaccctgcctagtttaagacccgaggccgccgcccagctgctccgcagcgctcctaaggtatgtgtcacggtgctgcctcccgacgagtcaggcagaccccgaaggtctttttccgaattgtatacccttagcctccaggaacccagtcgcagaggggcaccggatcctgtccaggacgaggtccagggtgtgacactgttgccaacaaccaagcagttgctccatttgtgcctgcaggacggtggcagcccacctggtcctggcgatcttgcggaagagcgaactgaatttcttcactcgcagaattccttaagcccaaggtcaagtctgtcagatgaggccccagtgttacctaacaccacgcccgacctgctcctcgctaccaccgccaaaccctctgtgcccagcgccgacagcgagacaccacttacccaggaccgccctggctctccatccggaagtgaggacaagggcaaccccgcacccgaacttcgcgctagtttcctacctcgtactctgtctctgaggaatagtatctccaggataatgtccgaagctggctccggtacccttgaggatgagtggcaggccatcagcgagatcgccagtacctgtaacacaattctggagagccttagcagagagggccagcccattcccgaatccggcgatcctaaaggtacgccaaagagtgacgccgaaccagagccaggcaatctgtctgaaaaagtgtcccatttggaatcaatgctgcgcaagctacaggaggatctgcagaaggagaaggccgatagagccgctcttgaggaagaggtcagaagcctccgccacaataaccgaaggctgcaggctgagtctgaatctgctgctacccgcctgttgttggcttcgaagcaactcggatcccctacggccgacctggcttag

SEQ ID NO: 205194 - DNA, 5169 bp, synthetic construct
  misc_feature 1..5169: note = Description of Artificial Sequence: Synthetic coding sequence
  source 1..5169: mol_type = other DNA
atgagcgacccccggcagagccaggaggagaagcacaagctgggcagagcctcgtctaaatttaaggatccgccccgcattatgcagtctgatgattacttcgcacgtaagtttaaggcaattaacgggaatatgggaccaactacgtccttaaatgcctcaaactccaacgagacagggggcggcggacccgcgaacggcacaccagccgtgcctaagatgggcgtgagggcaagggtgtcagagtggccaccgaaaaaggactgttccaaggagctcacctgtaaagcactgtgggagagcaggagtcaaacctcatacgagagcatcactagcgtgctacaaaatggtcagtcggatcagagcgagggacaacaggatgagcagctggacctggacttcgtggaagcaaagtatactattggagatatctttgtccattctccccagcgtggccttcaccctatccggcaaaggtccaacagcgacgtaactattagcgacattgacgcagaagacgtcctggaccagaacgctgttaatcccaacactggtgcggctcttcaccgggagtacgggagcaccagcagcatcgatcgccagggcctgagtggagaaaatttctttgccatgctccgcggctatcgggtcgagaattatgaccataaagctatggtccccttcggttttccggagttttttagatgcgatcccgcaatttcaccatccctccacgcagccgcccagatatctaggggagaatttgtgagaattagtgggctcgactacgtcgactctgcgctcctgatgggtcgagaccgggataaaccttttaagcggagactaaagtccgagtctgtagagacatctctgtttagaaagctgcggacagttaagagcgaacacgagactttcaagttcacctcagagctggaggagagtcggctggagcgtggtatcaggccatggaattgccagcgttgctttgcacactatgacgtgcagtctattctttttaacataaatgaggccatggcaacgagagccaatgtgggaaaaagaaagaacattaccaccggcgccagtgctgcatcccagacgcagatgccgactggacagaccgggaactgtgagtccccactgggatctaaggaggacctaaactccaaagagaatcttgatgccgacgagggggacggaaagagcaacgatctggtcctgagttgcccttattttcgtaatgaaacgggaggggaaggagacagaaggatcgcgttatcgcgggcgaattcaagtagcttctccagtggtgagagctgctctttcgaatcatccttaagcagccattgtacaaacgccggagtttccgtgctggaagttcccagggagaaccagcctattcatcgggaaaaggtgaaaagatatattattgagcacatagacttaggcgcatactactatcgaaaatttttttatggcaaggaacaccagaactactttggcattgacgagaatctcgggcccgtggccgtgagtattcggagagaaaaggtggaggacgcgaaggagaaagaggggtcccagttcaattaccgggtcgcatttcggacgagcgagctgaccactttgagaggtgcaattctcgaggacgcaatccctagcactgccagacacggaacagcccgtggactgccgcttaaggaggttctggagtacgtgatacccgaactcagcattcagtgtctgagacaagcctctaattccccaaaggtgtccgagcaactgcttaagctagatgaacagggtctgagtttccagcacaagattggaatcttgtactgcaaagcggggcagtctacagaggaggagatgtataacaacgagactgcaggtccagccttcgaggaattccttgatttgctgggccaacgagttcgcctcaagggattcagcaagtaccgtgcccagttagataacaaaacagattccaccggtacccattcactgtacaccacctacaaggactacgagctcatgttccatgtttcaaccctgttgccctacatgccgaacaatagacagcagcttctccgcaagcgccatataggtaacgatatcgtgactatcgtctttcaggagccaggggccctcccatttactcctaagtcaatccgttcacacttccaacatgttttcgtaatagtgaaggtgcacaatccctgcacagagaacgtgtgttatagtgttggcgtctcccgatcgaaagacgtgcctccttttggccctcccatcccgaagggggttacttttccgaaatccgccgtgtttcgcgatttcctgctggccaaagttataaacgcggaaaacgccgcgcacaagtcggaaaagtttagagcgatggcaacgagaacccgccaggagtacttaaaggacctcgctgagaactttgtaaccactgcgaccgttgacacaagcgtcaagttctcattcataactctcggggctaagaagaaagagaaggtgaagccgcggaaggatgcacacttgttttcaattggtgctattatgtggcatgtgattgccagagattttgggcagtctgccgatattgaatgcctccttgggattagcaatgaatttatcatgttgattgagaaagacagcaagaacgtggtgttcaactgtagctgtagagacgtgattggatggacctccggtcttgtcagcatcaaagtcttttacgagcgtggcgaatgcgtgctgttgtcttctgtggacaattgcgctgaagacatcagggagatagttcagcgtctagtaatcgttacccgcgggtgtgaaacagtggaaatgaccctgcggcggaatgggctgggtcaactgggctttcatgttaactttgaagggattgtagcagacgtggagcctttcggattcgcctggaaagccggcctcagacagggctcacgtctcgtggagatttgtaaagtggcagtggccactctgacgcacgagcagatgattgatctgctcaggacctctgtaaccgtgaaagtcgttattatacagccgcacgatgacggttctcctagaagggggtgcagcgaactctgtcggattcctatggtagaatacaagcttgactctgaagggaccccttgcgagtacaagacccctttccgccgcaatacgacatggcatagggtgcccacgcctgcgctgcaacccctctcacgggcatcacctatccccggaacacctgaccgcctaccctgtcagcaactcctgcaacaggctcaggcagccataccacggtccaccagcttcgaccgcaaattacccgacggaactcgctccagccccagtaatcagtcgtcaagctctgatccgggtcctggcggatccgggccctggcgaccccaagtcgggtacgacggatgccagagccccctactgcttgagcaccaaggttccggccccttggagtgcgacggcgccagggagagggaagacacaatggaagcatcacgtcatcctgaaacaaaatggcacgggccccctagtaaggtgttaggctcttacaaggaacgcgccctccagaaggatgggtcctgtaaagactccccgaacaagctgtcacatatcggagacaaatcatgtagttcccactcatctagcaacaccctcagcagtaacacttcatccaactctgacgataaacacttcggcagcggcgacttaatggaccccgagctgttgggactcacatatataaagggcgcttccacagacagcgggattgataccgcaccgtgcatgcctgccactattttggggcctgtgcatttagcggggtccagaagcttgatacactcaagagctgagcagtgggcagatgctgctgacgtttcaggtcctgacgatgagccggctaagctttacagtgtgcatggatacgctagcacaatttctgcaggaagcgcagccgagggatcaatgggggacctctcagaaatctccagtcacagctccggcagccaccacagcggcagcccatctgctcattgttccaagtcctctggcagcctggactccagcaaagtgtatatcgtgagtcactctagcgggcagcaagtgccaggaagcatgagcaaaccatatcacaggcagggagctgtgaataagtacgtgataggctggaagaaaagcgagggcagtcctccaccagaggagccagaggtgaccgaatgtcccggaatgtactcggaaatggatgtaatgtccactgccacacagcatcaaaccgtggtcggggacgcggtggctgagacacagcacgtgctgtccaaggaggacttcctgaaactcatgctgccggattccccactggttgaggagggacgccgtaaattcagtttctatggaaacttatctcctagaaggtcactgtatcggaccttgtctgacgagtctatttgcagcaatagacgcggaagcagctttgggagctccagaagctccgtcttagatcaagcgctgcccaatgacatcctgttctctactaccccaccctatcattctacgctccccccccgagcccatccagcgccaagcatgggcagcctgagaaacgagttttggttcagtgatgggagcctcagcgacaagtcaaaatgtgccgacccgggtctcatgccactgcctgacacagcaacaggattagattggacgcaccttgtggacgctgctagggcgtttgaaggtctggactcagacgaggagttaggacttctttgtcatcacacctcatacctggaccaacgagtggcttccttttgtacactaaccgacatgcagcacggacaggacttggaaggggcgcaggaactgcccctctgtgtcgacccaggtagcggtaaagagttcatggatactactggagaacgcagtccatctccacttactgggaaggttaatcagctggagttaatactgcggcagctccagaccgacctccgcaaggaaaagcaagacaaagcagtcctgcaggccgaggttcagcacctgcggcaagacaacatgcgcctccaagaggaaagccagaccgctaccgcgcaattacgcaaatttacagagtggtttttcaccaccatcgacaagaagtcttag

SEQ ID NO: 205195 - DNA, 2337 bp, synthetic construct
  misc_feature 1..2337: note = Description of Artificial Sequence: Synthetic coding sequence
  source 1..2337: mol_type = other DNA
atgagcccctgcttcagcttcatcggctgcaagctgtgcagcatcgtgacaagaggctgtgaaactgtggagatgaccctcaggaggaacggattaggccaacttggattccacgtgaattttgaagggattgtagccgacgtggagcctttcggcttcgcttggaaggcggggttacgccaaggttccagactggtcgagatctgtaaggtggcagttgctacattaactcacgagcagatgattgacctgctgagaacttccgtgaccgttaaggtagtaataatccaaccacacgatgatggtagcccccggagaggctgttcagaactgtgccggatccccatggtggaatacaaactggatagcgaagggactccatgtgagtacaagactccctttagacggaatacaacatggcaccgcgtacctacccccgctcttcaacccttaagcagggcctcgcctattcccggtacaccggatcgcttaccttgccagcaactgctccagcaggctcaggccgctatccctcgaagcacgagctttgataggaagctgccagacgggacacgtagttctcctagcaatcaatcaagcagctccgatcctgggcccggagggtccggtccctggcgcccccaagtgggctacgacggttgccagtcccctctgctcctggaacatcagggttctggccctttggagtgcgatggtgcccgggaaagggaggacactatggaggcatcacggcatcccgaaacaaaatggcacgggccaccgtctaaggtattgggctcctacaaggaaagggctctgcaaaaggacggaagctgcaaagattccccaaacaaactttctcatataggagataaatcttgtagctcccacagttcttccaacacattatctagcaacacttccagcaactcggatgacaagcacttcggctcgggcgatctaatggatcccgaattgctggggctgacttacatcaagggggcatcaactgattcagggatcgacaccgctccatgtatgccagcaacgatcctgggccccgtacatcttgctgggagtaggtcacttatccattcgagagccgagcaatgggctgatgctgccgatgtcagtggtcctgacgatgagcctgctaaactgtacagcgtccatggctatgcatcaactatctctgcaggatccgctgccgaaggcagcatgggagatctgagcgagatcagcagccatagctccggcagccaccatagcggttccccaagcgcccattgtagcaagagctctggctccttggattcgagcaaagtctacatagtgagccactctagcgggcagcaggttcccggatccatgtccaagccctatcacaggcaaggcgccgtcaacaaatatgttatcggctggaaaaaatccgaggggtccccgcccccagaggagcccgaagtaaccgagtgccctgggatgtacagcgaaatggatgtaatgtccaccgcaacacagcatcagaccgttgtcggtgatgcagtggcggagactcagcatgtgctgagtaaggaggattttttaaaattgatgctgccagactccccgctggtggaggaggggcggcgcaagttttctttttatggaaacctgtcgccccgtcggtcactctaccggaccctctccgatgaatctatctgcagcaacaggagaggctcatccttcggcagctcccgttcctctgtgcttgaccaggccctgccgaacgatatcctgttcagtaccactccaccatatcactctacactgccaccccgcgcccacccggcgcccagcatgggaagcttgagaaatgaattttggttctctgacggctctctctctgacaagtccaaatgcgccgaccctgggctgatgccattgccagatacagccacagggctggattggacccatcttgtagacgcagctagagcatttgaagaccagcgggtagcctctttttgtacacttaccgacatgcagcatgggcaagacttagagggggctcaggaactgcctctgtgtgtcgatcccggatcagggaaggagttcatggacaccacaggagaaagatcgccaagtcctctgaccgggaaggttaaccaattggaattaatcttgcgtcaattacagaccgatcttagaaaggagaaacaggacaaagccgtgcttcaggctgaggtgcagcacctgcgccaagacaacatgcggcttcaagaggagtctcagaccgctactgctcagcttaggaagttcacagagtggtttttcacaacgatcgataagaagtcttag

SEQ ID NO: 205196 - DNA, 5169 bp, synthetic construct
  misc_feature 1..5169: note = Description of Artificial Sequence: Synthetic coding sequence
  source 1..5169: mol_type = other DNA
atgagcgacccccggcagagccaggaggagaagcacaagctgggcagggctagtagtaagtttaaagaccccccaaggatcatgcagtctgacgactacttcgcccgcaagttcaaagccatcaacggaaacatgggccccacaacatcgctcaatgcctctaattccaacgagacgggggggggagggccagcaaacggtacccccgcagttccaaagatgggtgtgcgtgcccgggtgagtgagtggcctcctaagaaggactgttcaaaggagttaacttgcaaggccctgtgggaaagccgttcgcagacaagttatgaatccattacaagcgtgctgcagaacgggcagagcgaccaatccgaagggcagcaagacgagcaactcgaccttgacttcgtagaggccaagtacacaattggcgatatattcgtgcacagccctcagcgggggctccatcctatcagacagaggtccaatagtgacgttacaatctctgacatcgacgccgaagatgtcctggaccagaacgctgtcaatccgaacacaggagctgcccttcaccgtgaatacggctcaaccagcagtattgatcgccagggcctgtccggggagaattttttcgcgatgttaagaggctacagagtagagaactacgaccacaaagctatggtgccatttgggtttcccgaatttttcaggtgtgatcctgcaatttccccttcgctacacgcggccgcccaaatctcccgcggggagtttgttcgaatctcaggcctcgactacgtggactccgctcttctcatgggtcgagaccgggacaagccttttaagcgcagactaaaatcagagtcagtcgaaacttccctgtttcgcaagctcaggaccgtgaagtccgagcacgagacctttaaattcacaagcgaactggaagaaagccggctcgaacgggggataagaccctggaactgccagcggtgctttgcccactatgacgttcagtcaattctcttcaacattaacgaagcaatggctacacgggctaacgtaggcaagaggaagaatataaccaccggagcctcagccgcaagccaaacccagatgccaacaggacagaccggtaactgtgaatctcctctgggatctaaggaggacctgaactccaaggagaacctcgacgctgatgagggggacggaaagtctaatgatctcgtgctgtcttgcccctattttagaaatgaaaccggaggcgaaggtgatcggcggattgcccttagccgtgccaatagcagctcttttagcagcggggaatcatgttcgttcgagagcagtctcagttctcattgcaccaatgcaggtgtgagcgtcttggaggtgccccgagaaaaccagcccattcatagagaaaaagtcaaacggtatattattgaacacatagatctcggcgcatactattatagaaagtttttctacggtaaagaacatcagaattacttcggaatagacgagaatttgggccctgtcgcagtctccataaggcgcgaaaaggtcgaagatgctaaagagaaagaagggagtcagttcaactaccgtgtagctttccggacaagcgagcttaccactctcagaggggccatactggaagatgccattccgtctaccgcccggcacggtacagcgcggggactcccgttgaaggaagtgttggagtacgtgattcccgagttgtcaatccaatgcctccgccaggctagcaactcgcctaaagtgagcgaacagctgctgaaactggacgagcaaggactcagcttccagcacaaaatcggcatcctgtactgcaaagccggacagagcacagaggaggagatgtataacaacgagactgcaggcccagcttttgaggaatttttagatctgcttggtcagagggtacggctgaagggattctccaaatacagagcacaattggataacaagaccgatagcaccggtacacattccctgtacacgacgtacaaagattacgagctcatgttccatgtgtctactctgctgccatacatgcccaataatcgccaacaattgctgcgtaagcgacatatcgggaacgacatagttactatagtttttcaggaacccggtgcactgccttttacacctaaatcgatacgctcccactttcaacacgtgttcgtcattgtgaaggttcacaatccatgtacagagaatgtgtgctactccgtgggagtcagccgctcaaaagacgtgcccccctttggtcctcctattccaaaaggtgtgacctttccaaagtctgcggtgttccgggatttcttgctggcaaaagtgattaacgccgaaaacgccgctcataagtctgagaaatttcgtgctatggccacccgcacaaggcaggagtacttgaaagacctcgccgaaaacttcgttaccactgcaaccgtagatacgagcgtgaagtttagcttcattaccctgggcgcgaagaagaaagagaaagtcaagccgaggaaggatgcccacctattttcgattggagcgattatgtggcatgtgattgccagggacttcggtcaatcagctgatatcgaatgcctgttgggcataagtaatgaatttataatgctgatcgagaaggactcaaagaatgtggtgtttaactgtagctgccgagatgtgattggttggacatcaggacttgtttccatcaaagttttttacgagcgcggagagtgcgtgcttttgagctcagttgacaactgtgcggaagacatccgtgagatcgttcagaggctggttatagtgactcgcgggtgcgagactgtcgaaatgaccctgagaagaaacggactggggcaattgggctttcacgtaaatttcgaaggtattgtggccgatgtggaaccctttggatttgcttggaaggcaggtcttcgtcagggctctcgactggtggagatatgtaaagtggccgtggcaacgctcacacatgaacagatgatcgacttactgcggacttccgtcacagtgaaagtggtgatcattcagccccatgacgacggatctccacgcagaggctgttccgagttgtgcaggattcccatggtcgaatataaactcgactcggagggcactccttgtgaatacaaaacaccatttcgccgcaacacaacctggcacagggtgcctacccccgctctccagcccctgagccgtgcttcacccattccaggcactcctgaccgtctaccatgccagcagttgctacagcaggcccaagcagccataccccggtctaccagcttcgaccgtaaattaccagatggtacacggtcatctccaagcaaccagtcgagcagctctgacccaggtcccggtggcagcggcccttggaggccgcaggtgggttatgatggttgccaatcgcccttactgctggaacaccaaggcagcgggcctcttgagtgtgacggagccagagagagggaagacaccatggaggcatcccgccacccagagactaagtggcacggaccaccctctaaggtgctgggctcttacaaagaacgtgctctacagaaggatggctcttgtaaagacagccccaacaaactttctcacattggggacaaaagctgctcatcccactcctcttctaatacgctctcctcaaacacttcaagcaatagcgatgataagcactttggatcgggcgacttgatggacccggaactgctggggttaacttacatcaagggagcgagcactgattccggcatcgataccgccccgtgcatgcctgccacaattctggggcctgttcatctggccgggagcaggtcactgatacattcgcgtgccgaacagtgggcagacgcagccgacgtaagcgggccagacgacgagcccgctaaactgtattccgtgcatgggtacgcaagcacaatttcagcgggcagtgcagccgagggctctatgggggatttgtcagagatttcttcacattcatcaggaagtcaccattcaggcagcccctccgcacattgcagcaaaagtagcggctcccttgactcttccaaggtgtacattgtgtctcatagctctggccagcaggtccccgggtcgatgtccaaaccataccacagacagggagctgtgaataagtacgtaattggatggaagaaatcagagggtagtccaccgccagaggagccagaagttaccgaatgcccagggatgtactccgaaatggatgtcatgtcaacagccactcagcatcaaactgttgtaggtgacgccgtggctgagacacagcacgtactcagtaaagaagactttctgaagttaatgctgcccgactcaccgcttgttgaagagggccggaggaaattcagtttttacgggaacctttctccaagacggtcactctatcggactctctccgacgagtctatttgttccaacaggcgtggaagttccttcggttcttcgagatcatccgttctggaccaggcactgcctaacgatatactcttctcaactacaccaccataccattctactctgccccctcgcgctcaccccgcccccagcatggggtcattgcgcaacgaattttggttctcagatggcagtctttccgataagtcaaaatgcgcggatcccggtctgatgcctctccctgacaccgcgaccggactcgattggacacatctcgttgatgctgcacgggcctttgaggggcttgacagtgacgaggaactgggcttactttgccatcacacatcatacttggatcagcgggtagcctccttttgtaccctaactgatatgcagcacggccaggacctcgaaggcgcgcaagagttgcctctctgcgttgatcctggatcagggaaagagtttatggacacgactggggagagatcgccgagtcctctcactggtaaggtcaatcaactcgagctcattctgcgacagctgcagaccgacctacggaaagaaaagcaggacaaggcagttttgcaggcagaggtgcagcatctgcggcaagacaacatgcgactgcaggaggaatcccaaaccgcaacggcgcaattgcgaaagttcaccgagtggtttttcaccactatcgacaaaaagtcctag

SEQ ID NO: 205197 - DNA, 918 bp, synthetic construct
  misc_feature 1..918: note = Description of Artificial Sequence: Synthetic coding sequence
  source 1..918: mol_type = other DNA
atggaccccaagggcctgctgagcctgaccttcgtgctgttcctgagcttggcctttggggcttcatatggaaccggcggccgaatgatgaattgtccgaaaattttaagacaactagggtctaaagtactgctgcctctgacttacgaaagaattaataagtcgatgaataagagtatccacatagtcgtcactatggcaaagagtttggagaactcagtcgaaaataaaatcgtctccctggacccgtcagaagcaggccctcctagatatctgggggaccgttacaaattctaccttgaaaacctaacacttggcattcgggagagccggaaggaagacgaggggtggtacctcatgaccttggagaaaaacgtctctgtccagagattttgccttcagctccgcctgtacgagcaggtttctactcccgagatcaaagtactcaacaagacccaggaaaatgggacatgcacgctgatcttaggttgcactgtcgaaaaaggcgaccacgttgcatatagttggtctgagaaggcaggcacccaccccttaaacccagccaattcttcccaccttctatcattaacactggggccacagcatgccgataacatctatatctgcaccgtatcaaatccgatatcaaacaacagtcagacctttagcccatggccagggtgtcggaccgacccatccggcaaaacaaatcattatcaaacgacagtggagaagaaatccctgactatttatgcacaggtacagaaacccggaccgcttcagaaaaagttggattcattcccggcccaggatccttgcaccactatatatgtcgcagccactgagccggtgcccgaaagcgttcaggagaccaatagcattaccgtgtatgcttcagtgactctcccggaatcctag

SEQ ID NO: 205198 - DNA, 1008 bp, synthetic construct
  misc_feature 1..1008: note = Description of Artificial Sequence: Synthetic coding sequence
  source 1..1008: mol_type = other DNA
atggaccccaagggcctgctgagcctgaccttcgtgctgttcctgtccttggcatttggcgcaagctatggcactggggggcgcatgatgaattgcccgaagatcctccgccagctgggcagcaaggtcctcttgcctctcacctacgaacgaatcaacaagtcgatgaacaaatccatccatattgttgtcaccatggccaagtctctggagaattccgttgagaataagatcgtcagtcttgatccctccgaggcagggcctcctagatatctgggcgatagatacaagttttatctcgagaatcttacattgggcatcagagagtcccggaaggaagatgaaggatggtaccttatgacgcttgagaagaacgtatcagttcagcgcttctgtctccagctgcgactgtatgaacaggtgtccacaccagagattaaggtgctgaacaagacccaggagaatgggacatgtacccttatcctcgggtgtacagtggagaaaggcgaccatgtggcctactcctggtcagagaaggccgggactcaccccctcaaccctgccaactcttcccacctgctgtccctcactctgggcccccagcacgccgataatatctatatctgcactgtttcgaatcccatttctaataactcacagacgttcagcccttggccgggctgcagaaccgatccatcggagactaaaccctgggcagtttatgcagggcttctggggggtgtcattatgatcctcatcatggtagtaatactgcagctgagaaggagaggcaagactaaccattatcagactaccgttgagaagaagagtcttaccatttatgcacaagtgcagaaacccggacccctccaaaagaagctggattctttccctgcccaggatccatgtacaaccatctatgtggccgccaccgaacctgtgcccgaatcagtacaggaaacaaacagtatcactgtttatgcgtccgttacactgccagagtcttag

SEQ ID NO: 205199 - DNA, 897 bp, synthetic construct
  misc_feature 1..897: note = Description of Artificial Sequence: Synthetic coding sequence
  source 1..897: mol_type = other DNA
atggaccccaagggcctgctgagcctgaccttcgtgctgttcctgagccttgctttcggggccagctatggaacggggggaagaatgatgaactgccctaagatactcagacagttgggctctaaggttctgctccctctgacttatgaaagaatcaataagtctatgaataagtccatacacatcgtcgtgacaatggcgaagtctctggagaattccgtcgagaacaaaatagttagtctcgaccccagtgaggccgggcctccccggtacctgggagaccgctacaaattctacttagagaatctgacacttggcatcagagagagccggaaagaagacgaaggatggtatctaatgacactggaaaaaaatgtgtcagtccaaagattttgcttacagcttcggctttacgagcaggttagtactcctgaaatcaaagtactgaacaagactcaggaaaatgggacgtgtacactcattctcgggtgcaccgtcgagaagggggaccacgtcgcttatagttggagtgaaaaggccggtactcaccccctcaaccccgctaacagctcccacctactgtccctgacgctcggcccccaacatgcagataacatttacatttgtaccgtgtccaaccctatatcaaacaactctcagactttcagtccctggcctggctgcagaacagaccctagcgaaactaagccgtgggctgtctatgccggtttgctggggggcgtcataatgatcctcatcatggtcgtgattctacaacttcggcggcgggggaagactaaccattatcagaccactgtggagaagaaaagcctgacaatctacgctcaagtgcagaagcccggcgacagccatcaccagacgagtgatttattttag

SEQ ID NO: 205200 - DNA, 435 bp, synthetic construct
  misc_feature 1..435: note = Description of Artificial Sequence: Synthetic coding sequence
  source 1..435: mol_type = other DNA
atggaccccaagggcctgctgagcctgaccttcgtgctgttcctgagtttagccttcggcgcatcctatggaaccggaggcaggatgatgaactgccccaaaattctgcggcagctggggtccaaggttttactcccgctgacctatgaacgtatcaataagagcatgaataagtctatacacatagtcgtaaccatggccaagagccttgaaaactcggtggagaacaagattgtaagcctcgatccgtctgaagccggccctccccgctacctgggagatagatataagttctacctggagaacctgacgttgggaattagagagagtcgtaaggaagatgagggctggtacttgatgacattagagaaatcgctgcattttggttacctgtattttgtgttaggcgctgatcatgacaatctacagacatag

SEQ ID NO: 205201 - DNA, 810 bp, synthetic construct
  misc_feature 1..810: note = Description of Artificial Sequence: Synthetic coding sequence
  source 1..810: mol_type = other DNA
atggaccccaagggcctgctgagcctgaccttcgtgctgttcctgtccttggccttcggtgcctcatacgggaccggggggcggatgatgaattgccccaaaatacttcgacaattgggctccaaggtgttgttgccactgacctatgaacgaattaataagtcaatgaacaagtctatccatatcgtcgttaccatggctaaaagcctcgagaacagcgtggagaacaagattgtgtcactggaccccagtgaggcagggcccccaaggtacctgggcgatagatataagttctacctcgagaacctcacgttagggattagagagagcagaaaggaagacgagggatggtacctgatgactcttgagaagaacgtatctgtgcagagattttgtttgcagctgagactgtatgaacaggttagcactcctgaaatcaaggtcttaaataaaactcaggaaaacggtacctgtacattgatcttagggtgtacggtggaaaagggggatcacgtcgcatactcttggagcgaaaaggccggtacgcatcccctaaacccagccaactcttctcatttactgtcactcacacttggaccccaacatgcagataacatatatatttgtaccgtatctaacccaatctccaacaactcccagaccttctcgccatggcccggatgcagaaccgatccttcagagacaaagccatgggctgtgtacgccggcctgttaggaggggtgattatgatactgatcatggtggtcattctgcagctgcggcggcgagcttcttctgaggagacatag

SEQ ID NO: 205202 - DNA, 1029 bp, synthetic construct
  misc_feature 1..1029: note = Description of Artificial Sequence: Synthetic coding sequence
  source 1..1029: mol_type = other DNA
atgtgcagcaccatgagcgcccccacctgcctggcccacctgcccccatgctttctcctcctagcattggtactggtgcccagcgacgcatcggggcagtcgagccgaaatgactggcaagtgctgcaacctgaagggcccatgcttgttgcagagggcgagactctgctgttacggtgcatggtcgttggaagctgcactgatgggatgatcaaatgggtcaaagttagcacccaggatcagcaggaaatttataattttaaacggggaagtttcccaggtgtgatgcccatgatccagaggacaagtgagcctctgaattgcgattattctatttatatccataatgtgacaagggagcatacgggcacgtatcattgtgtgaggttcgatggcttgtctgagcactcagaaatgaagtccgacgaggggacctctgtcctcgtgaaaggagccggcgaccccgaacctgacctgtggatcatccagccacaagaactggtgctcgggactactggggatacagtgttcctaaattgcaccgtcctcggagatgggccccccggccctatccggtggttccagggcgccggccttagccgggaggccatatataatttcggaggtatatcacaccccaaggagacagcagttcaggcatccaacaacgacttcagcattctcttgcagaatgtctcctccgaggatgctgggacttattactgcgtaaaattccagcggaagcccaatcgtcagtatctgagtggacagggcacctccctcaaggtcaaggccaagtccacttcatctaaagaagccgaattcacctcagagccagcaaccgagatgtccccaaccggcctgctggtggtctttgctcccgtggtgctggggttgaaagctatcaccttagccgctctgttgctcgctctcgccacctctaggagatcccctggccaggaggatgttaaaacaactggcccggctggcgcgatgaatacactcgcctggagcaaaggccaggagtag

SEQ ID NO: 205203 - DNA, 624 bp, synthetic construct
  misc_feature 1..624: note = Description of Artificial Sequence: Synthetic coding sequence
  source 1..624: mol_type = other DNA
atgtgcagcaccatgagcgcccccacctgcctggcccacctgcccccttgtttcctgttgctggcacttgtgctcgttccttcagatgccagtgggcaatcgtctcgcaacgattggcaagttcttcagcccgaaggcccaatgctggtggccgagggagccggagaccccgaacctgacttatggataatccagccgcaggaactcgttctcggcacaacgggcgacaccgtctttctcaactgtacagtgctcggtgatggcccacctgggccgattcgctggtttcaaggggctggactttctcgtgaagctatctataatttcggaggaatcagccaccccaaagagactgccgtgcaggctagtaacaacgacttcagcattttactccaaaacgtcagtagcgaggacgccggaacctactattgcgtgaagttccagaggaaaccaaaccggcagtacttgtccggccaggggacaagtcttaaggtgaaggaacagaacctgcctctccccaaacgtcaaaactccccagtcaatctgcagctgagatgtctccagcaagtatctgttccaacctctgtcgagtcaatgagccctccacaggctcgtggcccttag

SEQ ID NO: 205204 - DNA, 624 bp, synthetic construct
  misc_feature 1..624: note = Description of Artificial Sequence: Synthetic coding sequence
  source 1..624: mol_type = other DNA
atgtgcagcaccatgagcgcccccacctgcctggcccacctgcccccatgctttcttctcctggcccttgtcttagtgccgtccgacgcctccggccagagcagccgtaatgactggcaagtactccagcctgagggtccaatgctggtggccgaaggagccggcgatccagagccagacctgtggatcatccagccacaagagcttgtgttgggcaccactggtgacacggtctttctcaactgcacagtgcttggtgacggcccgccgggaccaatccgctggtttcagggagccggtttgagtagagaggcaatttacaatttcggaggtatctcgcaccctaaagagaccgctgttcaagcctccaacaacgacttctcaatacttttgcaaaatgtctcttcagaggacgccgggacctattactgtgtaaaatttcagcgtaaacctaataggcagtatttgtcaggacaggggacgtcgctgaaagtaaaggagcagaacctccctttgcctaagaggcagaatagccctgtcaacctccagctgagatgtcttcagcaagtgtcagtccctacttctgtggagtccatgtctcctccacaggcccggggcccatag

SEQ ID NO: 205205 - DNA, 735 bp, synthetic construct
  misc_feature 1..735: note = Description of Artificial Sequence: Synthetic coding sequence
  source 1..735: mol_type = other DNA
atgtgcagcaccatgagcgcccccacctgcctggcccacctgcccccatgcttcttgttgcttgccctggtgctggtcccctccgacgcaagcgggcagtccagccggaacgactggcaggtactccagcccgaaggcccgatgttggtagcggagggggcaggggacccagaacctgacctgtggatcatccaacctcaggagctggtactggggaccactggagataccgtctttttaaactgtaccgttcttggtgatgggcctcctggacctataaggtggtttcaaggagccggcctatctcgggaagccatatataacttcggcggcatctctcatcctaaggaaacagccgttcaagcatcgaacaacgacttcagcattctactacaaaacgtgagctcagaggatgctggcacctactactgcgtgaagttccagaggaaacccaatcggcagtatctgtcaggacaaggtacttcgctcaaagttaaagctaaatctacctcaagcaaggaggccgagtttacatccgagccagccaccgagatgtccccaacaggtttgctggtcgtctttgccccagtggtgttggggctgaaagccatcaccctcgccgcgctactgctggccctggctacttcaaggagatctccaggccaagaagatgtaaagaccacaggcccagccggggctatgaataccctcgcatggtccaaaggccaagagtag

SEQ ID NO: 205206 - DNA, 633 bp, synthetic construct
  misc_feature 1..633: note = Description of Artificial Sequence: Synthetic coding sequence
  source 1..633: mol_type = other DNA
atgaagagcgacgagggcaccagcgtgctggtgaagggcgccggcgatccagaacccgacttgtggatcattcagcctcaggagcttgttctgggcactaccggggatactgtgtttttaaactgtactgtcttgggagatggccctcccggtcctattcggtggttccagggcgcaggcctctcacgtgaggctatctacaactttgggggaatctcccaccccaaggagacagctgtgcaagccagtaacaacgacttttccattctcctgcagaatgtgagctctgaagatgctggcacttactactgcgtcaaatttcaacgtaaacctaaccggcaatatctgtctggtcagggtacttctctgaaggtaaaagcgaagagtacaagtagtaaggaagctgagtttacatccgaacctgctacagagatgagtcctaccggcgagcggacacacctttccggcgtgaacgaaagccctacaggaaaaggggccatgaacggacttgtcatgggcagagagcagtcacaaactccaggcgccaacctgcccccacgtatgcttcccggtcttcacctcaattgtaggactagaacacccgagaatcatgtgattactgctcagctgtag

SEQ ID NO: 205207 - DNA, 2046 bp, synthetic construct
  misc_feature 1..2046: note = Description of Artificial Sequence: Synthetic coding sequence
  source 1..2046: mol_type = other DNA
atgaacgccagcagcgagggcgagagcttcgccggcagcgtgcagatacccgggggcacaaccgtactggtggagctcaccccagacattcacatctgcggcatctgcaaacagcagttcaacaatcttgatgccttcgtggcccacaagcagtctggctgccaactgaccggaacctcggccgccgctccctccactgtgcaattcgtgtctgaagaaactgttcctgccacgcaaacccaaactactaccagaacaataacaagcgaaacccagacaattactgtgtctgcaccggagttcgtcttcgagcacgggtaccaaacttacttaccaaccgagtcaaacgagaaccaaaccgccacggtcatttcattaccggcaaaaagtaggaccaagaagcccaccacacctcctgcgcagaagcgcctcaactgctgctatcccggctgtcagttcaaaacagcctacgggatgaaggatatggaacggcatctgaaaatccataccggagacaaacctcacaagtgcgaggtttgcgggaagtgcttctccaggaaagataagctgaaaactcacatgcggtgccacacgggtgtgaagccctataaatgcaagacttgcgactacgctgcagccgattccagtagcctgaataagcacttaaggatccattccgatgaacgcccctttaagtgtcaaatatgcccctatgctagtaggaatagctcccagctgactgtgcatttgaggagtcatacaggagacgccccgttccagtgctggttgtgctcagcaaagttcaagatctcatccgacttgaagcggcatatgagggtgcactcaggagaaaagcccttcaaatgtgaattctgtaacgtgcgctgtaccatgaaaggaaacctgaaatcccacatccggatcaagcatagcggaaacaacttcaagtgcccacactgcgactttctgggtgattccaaggcgacactacgtaagcactcacgcgtgcatcaatctgaacatcctgaaaaatgttctgagtgtagttattcatgtagcagcaaggccgctctacgcatccacgagcggattcactgtactgaccggccatttaagtgtaactactgcagcttcgatacaaagcagccatcaaacttgagcaagcatatgaagaaatttcacggggacatggtcaaaactgaggctttagagcgcaaggatacaggacgacaaagctcgcgtcaggtggctaagctggatgccaaaaagtcattccactgtgatatctgtgatgccagtttcatgcgggaggacagtttgcgatctcataaacgccagcactctgaatattcagaaagcaagaactcagacgtgaccgtgttgcagttccagattgacccatccaaacagcctgctactccactgactgttggtcacctgcaggtccccttacagcccagtcaagttcctcaatttagtgagggcagagttaaaatcatagtgggtcatcaggttcctcaggccaataccattgtgcaggccgctgccgctgccgtgaacattgtgcctccagccctggtggctcagaacccagaagaattacccgggaatagcagactgcagatcctaaggcaggtctcccttattgcccccccacagagctcccgctgcccctcagaggcgggcgcgatgacacagccagccgtactcctaactacccatgaacagaccgatggagccaccctgcaccagacgctgatccccactgcatcagggggcccacaggagggaagcgggaatcaaacatttatcaccagttctggtattacctgcaccgattttgagggtcttaacgctctgatccaggagggaactgctgaagtcaccgtcgtaagtgatggcggccaaaatatcgcagtggcaacaaccgctcccccagtgtttagcagctcgagtcaacaagagcttcccaagcagacctactcaattattcagggagctgctcacccagctctcctctgcccagccgacagcatccctgactag

SEQ ID NO: 205208 - DNA, 1164 bp, synthetic construct
  misc_feature 1..1164: note = Description of Artificial Sequence: Synthetic coding sequence
  source 1..1164: mol_type = other DNA
atgcccgtgcccgccagctggccccacccccccggccccttcctgctcctgactttactactgggcctaaccgaggttgcgggcgaggaggagctgcagatgattcagccagaaaagctcctgctcgtgactgttggcaaaaccgctaccctgcattgcaccgtcactagcctgctgcctgtgggaccggtcctgtggtttcgcggtgtcggacccggccgggaactgatttataatcagaaagagggccacttcccccgggttacgacagtgagtgatctgacaaagagaaataacatggatttcagcattcgcatatctagtatcacccccgcagacgtaggtacatactattgtgtcaagttccggaagggcagcccagaaaatgtcgaatttaagagtggccccggcactgagatggccctcggagccaagcccagtgccccagtggtgttagggcccgccgccaggacaactcctgagcatactgtgtcttttacctgcgagagccacgggttcagtccgagggacatcactttaaagtggttcaaaaacggaaacgagctcagcgacttccaaactaacgttgatccaacaggccaatccgttgcgtatagcatacggagcaccgcgcgcgtggtcctggatccatgggacgtgcgcagccaggttatctgcgaggtcgcccatgttaccttacagggggacccgctccggggaacggccaatctgagtgaggctattagggtcccaccaacacttgaggtaacacaacagcccatgcgcgtaggaaaccaagtgaacgtgacctgccaggttcgcaaattctacccgcagtccctacagttgacatggtctgaaaatggcaacgtgtgccagagagagacagccagtacactcaccgagaacaaggatgggacctataactggacctcctggttcctcgttaacatctccgaccagcgggatgatgtggttttgacctgccaagttaaacatgacggtcagctggccgtgtctaagcggcttgcacttgaagtcaccgtgcaccaaaaggatcagagctcagatgccactcctggacctgccagcagcctcaccgctcttctcctgatcgcggtgctgctgggtccgatctacgtcccatggaagcagaaaacctag

SEQ ID NO: 205209 - DNA, 513 bp, synthetic construct
  misc_feature 1..513: note = Description of Artificial Sequence: Synthetic coding sequence
  source 1..513: mol_type = other DNA
atgcccgtgcccgccagctggccccacccccccggccccttcctgctgctcacccttctattgggacttaccgaggtggccggtgaagaggagctccaaatgatccagcctgagaaactgctcctggttactgtgggcaaaactgccactctccactgcacagtgacaagcttgctgcccgtgggccccgtcttgtggtttagaggcgtgggtccagggcgagaactgatttacaatcaaaaagaggggcatttccccagggttaccacagtttccgatctgaccaaacggaacaacatggacttttccatccgtatttccagcatcacacccgccgacgtcgggacttattactgtgtcaaatttagaaagggaagccctgagaacgtggaattcaaaagcggtccgggaaccgaaatggcccttggaggtccggcatccagtcttaccgccttgttactgattgcagtgctgttggggccaatctatgtcccatggaaacagaagacttag

SEQ ID NO: 205210 - DNA, 1065 bp, synthetic construct
  misc_feature 1..1065: note = Description of Artificial Sequence: Synthetic coding sequence
  source 1..1065: mol_type = other DNA
atgatccagcccgagaagctgctgctggtgaccgtgggcaagaccgcaacgctgcattgcactgtcacgtctcttctgccagtgggtccagtgctgtggtttcgcggagtcggaccgggacgagaactgatttacaatcagaaggaggggcacttcccacgggtcaccacagtgagcgacctgacaaagagaaacaatatggattttagtataaggattagctccatcactccagccgatgtggggacatactactgtgtcaaatttagaaaaggatctcccgaaaacgtggaattcaaaagcggacctgggaccgaaatggcgctgggcgccaagcccagtgcccctgtcgtcctcggccccgccgcccgaacaacccctgaacataccgtttcatttacgtgtgaatcccacgggttcagtccacgggacatcaccttgaaatggttcaaaaatggaaatgaactctccgacttccagaccaatgtagacccaacaggccagtccgtggcctattccatcaggtccacagcacgggttgtcttggacccttgggacgtgagaagccaggtgatttgtgaggttgcacacgtgacgctgcagggtgacccactacgcggtaccgctaatctttcagaggcgatccgagtgccgcccacgttagaagtaactcagcaacctatgcgtgtgggcaatcaagtaaacgttacttgtcaggtgcgaaaattctacccccagtccctgcaattgacatggtcagaaaacggcaatgtgtgtcagagggaaacagctagtactttgaccgaaaataaggacggcacatataattggacttcttggttcttggtcaatatctccgaccagagagatgatgtggtccttacctgtcaggtgaagcatgatgggcaactcgcagtcagtaaacgcttggccctggaggtcaccgttcatcagaaggatcaatcctctgacgctacgccaggaccagcttcttccttgacggcacttctcctcatcgcagtcctattgggtcctatctatgtaccttggaagcagaaaacatag

SEQ ID NO: 205211 - DNA, 831 bp, synthetic construct
  misc_feature 1..831: note = Description of Artificial Sequence: Synthetic coding sequence
  source 1..831: mol_type = other DNA
atgcccgtgcccgccagctggccccacccccccggccccttcctgttgctcacacttcttctggggctgacagaagttgccggggaggaggagctgcaaatgattcagcccgaaaagctgctgctagtgactgtcgggaaaacagccactctccactgcaccgtgaccagcctgctaccagtgggacctgtgctgtggttcaggggagtgggtcccggtcgtgagctcatttataaccaaaaggaaggtcatttccctagggtgacaacagtgtcagacctgacaaagcggaacaacatggatttctcaattcggatatcaagcattaccccagcagatgtaggcacttactattgtgtgaagtttcgtaaggggtcacctgaaaacgtggaatttaaatcgggacccggcactgagatggctctcggcgcaaaaccctctgcgcccgtcgtcttaggccctgctgccaggaccaccccagagcacactgtgagcttcacctgcgaaagccatgggttttctccgcgagatatcacactgaaatggtttaaaaacggcaacgagctgtccgattttcagaccaacgtggatccaacaggtcagtctgtcgcctacagcatccgcagcaccgccagagtggtgctggacccatgggatgttcgaagtcaggtgatctgcgaagtggctcacgtaactttacaaggcgacccattacgggggactgcgaatctatcagaggccataaggggccccgcaagctccctgacagccttactccttatcgccgtactcctggggccaatctacgtgccttggaaacagaagacatag

SEQ ID NO: 205212 - DNA, 1386 bp, synthetic construct
  misc_feature 1..1386: note = Description of Artificial Sequence: Synthetic coding sequence
  source 1..1386: mol_type = other DNA
atggccccccagagcctgcccagcagccggatggcccccctgggcatgctcctggggctgttaatggctgcgtgctttactttttgtctaagccaccaaaatctcaaagagttcgctctaacgaatcccgaaaaatccagcacaaaagaaaccgagagaaaggagaccaaagcggaagaggaactggacgctgaagtgctggaggtcttccacccgacgcatgagtggcaagcgctacaaccaggccaggccgttccagccggcagccacgtcaggctgaacctgcagactggtgagagggaagcaaagttgcagtatgaggacaaattccggaacaatctgaaggggaagagactcgatattaacactaacacatatacgtcccaggatcttaagagtgcccttgccaaatttaaggagggagccgaaatggaaagctccaaggaggataaagctaggcaggccgaggtcaagagactcttccgcccaatcgaggaactgaagaaggattttgacgagctgaacgtggtgattgagactgacatgcagatcatggtgaggctgatcaataagttcaacagttctagcagttcactggaagagaaaatcgccgcgttgtttgatctggagtactatgtccatcagatggataatgcccaggacttattatcatttggaggactccaggtcgtgataaatggcctgaactccaccgagcccctcgtcaaggagtatgccgcatttgtgctgggagcagctttctcgtccaatcccaaggtccaggtggaggcgattgaggggggcgccctgcaaaaactgctcgtgatcttagctaccgagcaaccgctcaccgcaaagaagaaagtgctctttgcgctgtgttctctccttcgacattttccctacgcacagcgtcagttcctgaagctcggcgggcttcaagttctgcgaaccctggtccaggaaaagggtaccgaagtgctcgcggttagagtcgttactttactgtacgacctcgtgaccgagaagatgttcgcggaggaagaagcagagcttacccaggaaatgtcaccagagaaattgcagcagtaccgccaggtccatcttttacccggcctctgggagcaggggtggtgcgagattacggcgcatttacttgcgttacccgagcatgatgcccgagagaaagtgcttcagacgctgggagtcttgctgaccacatgtcgagacagatacaggcaggatccacagttgggccgcacactcgcaagcctccaggccgagtatcaggtgctggccagccttgaattgcaggatggagaggatgaaggctatttccaggagctactcggcagtgtgaactccctgttgaaggagctgagatag

SEQ ID NO: 205213 - DNA, 1386 bp, synthetic construct
  misc_feature 1..1386: note = Description of Artificial Sequence: Synthetic coding sequence
  source 1..1386: mol_type = other DNA
atggccccccagagcctgcccagcagccggatggcccccctgggcatgctcctcggcctgctgatggccgcctgctttaccttctgcctgagccaccagaacctcaaggaattcgctctaaccaatccagaaaagtcctctaccaaggagaccgagcgaaaagagaccaaagccgaagaggagttggatgcagaagttctggaggtctttcaccccacacatgagtggcaggctctgcagccgggacaggctgtgcctgcaggctcccatgtccgccttaacctacagaccggagagagggaggccaaactgcagtatgaagacaaattcaggaacaaccttaaagggaaacgactcgacatcaacacgaatacatatacttctcaagatctgaaatctgccctggctaagttcaaggagggagcggaaatggaatcctctaaggaagataaagcccggcaggcagaggtgaagcgactcttcaggcccattgaagagctcaagaaagacttcgacgagcttaatgtcgtgatcgaaacagatatgcagattatggtgagactgataaacaagtttaatagctcctcatcatccttggaggaaaaaatcgccgccctcttcgacctagaatattacgtacaccagatggacaatgctcaggatctgctaagcttcggcggtctgcaggttgtaattaacggcctcaacagtaccgagcctcttgtcaaggaatacgcagcatttgtgctaggggctgccttcagttctaatccaaaagtgcaggtcgaggccatcgagggcggcgctctgcagaagctgcttgttattctggccactgaacagcctctgacagcgaagaagaaagttctgttcgctctgtgttcccttttgcggcactttccttatgcccaacggcaatttctgaagctggggggtctgcaggtcttgcggacccttgtgcaagagaaaggcaccgaagtattggctgtcagagttgtcaccctcctctacgatctggtgaccgagaaaatgttcgcagaggaggaagccgaactgactcaggagatgagcccagagaagctgcagcagtatcgccaggtccacctgttacctgggctctgggagcaaggatggtgtgagatcacagcacatctgcttgcgctccctgagcacgacgcccgcgagaaggtgctgcagacactaggagtgcttcttaccacttgtagggaccggtatcgccaagacccacagttaggccgcacattagcttcgctacaagccgagtaccaggtgttggcttcactggagctgcaggacggagaggacgagggctactttcaggaactcctaggaagtgtgaattcactgctgaaggagctccgctag

SEQ ID NO: 205214 - DNA, 288 bp, synthetic construct
  misc_feature 1..288: note = Description of Artificial Sequence: Synthetic coding sequence
  source 1..288: mol_type = other DNA
atggccccccagagcctgcccagcagccggatggcccccctgggcatgctcctcggtctactgatggctgcctgtttcaccttttgtttgagccatcaaaatctcaaagaattcgctctgacgaatccagagaaatcttctaccaaagagaccgagaggaaggaaaccaaggccgaagaagaacttgatgccgaagtactagaagtgtttcatcccacacatgagtggcaagcccttcaacccggacaagcagtgccagctggtagccatgtccgtctaaatctgtag

SEQ ID NO: 205215 - DNA, 492 bp, synthetic construct
  misc_feature 1..492: note = Description of Artificial Sequence: Synthetic coding sequence
  source 1..492: mol_type = other DNA
atggccccccagagcctgcccagcagccggatggcccccctgggcatgctgctgggactccttatggctgcctgttttaccttctgcctttctcaccagaacctgaaagagttcgctctcacaaaccccgagaagtctagtactaaagagactgaaagaaaagaaacaaaggcagaggaggaattagacgctgaggtgcttgaagtgttccacccaacccacgaatggcaggccctgcagcctgggcaggctgtgccggccggtagccacgtgagactgaaccttcagaccggcgaacgggaagccaagctccagtatgaggataaatttcgcaacaacttaaaagggaaacgacttgacataaatactaatacctacacgagccaggatttgaagtcagcacttgctaagtttaaggagggtgccgaaatggaatcttcaaaagaggacaaagcccgacaggccgaggtaaaaaggctgtttaggccctag

SEQ ID NO: 205216 - DNA, 372 bp, synthetic construct
  misc_feature 1..372: note = Description of Artificial Sequence: Synthetic coding sequence
  source 1..372: mol_type = other DNA
atggccccccagagcctgcccagcagccggatggcccccctgggcatgctgctgggcttgcttatggccgcgtgttttacgttttgtctgagccatcagaatctgaaggaatttgccctaacaaacccggaaaaaagcagtacaaaggaaactgaacggaaggaaactaaggcagaagaggagttggatgcagaggtgctggaggtgttccatcctacccatgagtggcaggccttgcaacctggtcaggctgtccctgccggttcccatgttagactcaatctacagaccggggaacgcgaggcgaagctgcagtatgaagacaaattccggaacaacctgaagggcaagcgacttgacatcaatacctag

SEQ ID NO: 205217 - DNA, 579 bp, synthetic construct
  misc_feature 1..579: note = Description of Artificial Sequence: Synthetic coding sequence
  source 1..579: mol_type = other DNA
atggccgcctgcttcaccttctgcctgagccaccagaacctgaaggagtttgccttgaccaatcccgagaagagctccactaaggaaactgagcggaaggagacaaaggccgaggaggagctagacgccgaagtccttgaggtttttcatcctactcacgagtggcaagcactccaacctgggcaggcggtccctgcaggaagtcacgtgaggctgaaccttcagactggcgaacgggaagctaaactacagtatgaggacaaattcagaaataacctgaaaggcaagcggctcgacatcaatactaatacttacacctcccaggatcttaagtctgccctggccaaatttaaagagggcgccgaaatggaatcttcaaaagaggacaagatggacaacgcccaggacctgctcagctttggcgggctccaagttgtcataaatggtcttaatagtacggaaccccttgtaaaagagtacgcagcattcgtgctaggcgccgcattctcctccaaccccaaagttcaggtagaagcgatagaggggggtgcgctacaaaagttattagtgattttgtag

SEQ ID NO: 205218 - DNA, 3822 bp, synthetic construct
  misc_feature 1..3822: note = Description of Artificial Sequence: Synthetic coding sequence
  source 1..3822: mol_type = other DNA
atgaagcggcggctggacgaccaggagagccccgtgtacgccgcccagcaaaggcgtatccccggttcgacagaggcatttccgcaccagcaccgcgtcctggcgcccgctcccccagtttatgaggctgtatcggagaccatgcaatccgccacaggaatccaatacagcgtgaccccaagctatcaggtgagcgcgatgcctcagagctcaggttcacacggccctgctattgcagcagtacatagctcccaccatcatcctaccgcagtccagcctcatggcggtcaagtggtacagtctcatgcgcaccctgcacccccagttgccccagtacaaggccagcagcagttccagcgacttaaggttgaggacgccctatcatacctcgaccaggtgaaactccagttcggctcacagccacaggtctacaacgacttcctggatatcatgaaagaatttaagagccagtccatagatacccccggggtgattagcagggtgagtcagttgttcaaaggacatcctgacctcattatgggtttcaacacattccttcctccaggctataagatcgaagttcagaccaatgacatggtcaacgtcactacccccgggcaggtccaccagatccctactcacggaatacaaccacagccgcagcctcccccccagcatccttctcagccctcagctcaaagtgcccctgctccagcccagcctgccccacagccacctcctgcaaaagtttctaaaccttcccaactccaggcgcatacacccgcttctcagcaaacccctcccctgccgccgtatgccagtcctcgatcccctcccgtgcagccccacacaccggtgacaatcagtctggggactgcacccagcctgcaaaataatcagcctgtggaatttaaccacgccattaactacgtgaacaagatcaaaaatcgcttccagggtcagcccgatatttacaaagccttcttagagattctgcacacctatcagaaggaacagcgcaatgctaaggaagccggcgggaattacacaccagccctgaccgaacaagaagtgtatgcacaggtggctagactttttaagaaccaggaagacttactgagcgaattcgggcagttcctcccagatgccaatagctctgtattgctgtccaaaaccactgcagagaaggtagatagcgtccggaatgatcacgggggcacggtgaaaaaacctcagctcaacaacaagccgcagcggcccagccagaatggatgtcagatccgccgccatcccactggcacgactccaccggtcaaaaagaaacccaaactcctgaatctcaaagattcttccatggccgatgcttctaagcacgggggaggcaccgagagtctatttttcgacaaggtgcgaaaagcccttcgcagcgcagaggcatatgagaattttctgcgctgcctggtaatctttaaccaggaggtgatatctcgggcagaactcgtgcagctggtatccccattcctcggaaagtttcctgagctctttaattggttcaaaaactttctgggatacaaggaaagcgtgcacctggaaacataccccaaggagcgggcaactgaagggatagcaatggagatcgattacgcttcgtgcaagcggctcggctcaagctacagggctctccctaagtcttaccagcagcctaagtgcactggacggaccccgctctgtaaagaggtgctgaacgatacttgggtctcttttccctcctggtctgaggatagtaccttcgttagctctaaaaaaacccagtacgaggaacacatctaccgatgtgaggacgaacgtttcgaactggacgtggtactggagacaaacttggccactattagagtactagaggctattcagaagaagctcagtagactgagtgccgaagagcaagccaagtttaggctggacaacaccctgggaggcacaagcgaagtcatacaccgcaaagcactccaacggatctacgcagacaaagccgcagacataatcgacggcctgcgcaaaaacccatcgattgcagtgccaattgtcctgaaaaggctaaagatgaaggaggaggagtggagggaggcacagcggggttttaataaggtgtggagagagcaaaacgaaaaatactatctgaagtctctggatcatcagggtatcaatttcaaacagaatgatactaaggttctgcggtctaaatcactactgaatgagatagaatctatctatgatgagcgacaggagcaagccacagaagagaacgctggggtccccgttggaccccaccttagtctggcctacgaggacaaacagatcctggaagacgccgctgccctgatcatccatcacgtcaaacggcaaaccggtatccaaaaagaagataagtataagattaagcagatcatgcatcatttcatccccgacctgctttttgcacagcgaggagatcttagtgatgttgaggaggaagaggaggaagagatggacgtggacgaagccacaggcgcagtgaagaagcataacggggtgggtggctctccccctaagtccaagctcctcttctcaaatacagctgcgcagaaactaagagggatggatgaggtgtacaacctcttttacgtgaacaacaattggtacatcttcatgcggctacatcagatcctgtgcctgcgcctcctgcggatttgctctcaagccgaaagacagatcgaagaagaaaacagagaaagggagtgggagagagaggtgttgggcatcaagcgggataagagcgactctcccgcgatccaattgaggcttaaggagccgatggatgttgatgtggaagactattacccggcttttctggacatggtcaggtccctacttgacggtaacattgattcctcccaatatgaggattcattacgggaaatgttcaccattcacgcatacatcgccttcaccatggacaagttgatccaaagcatcgtgcgccagctgcagcacatcgtctctgacgaaatatgcgtgcaggtgactgatctatatctagccgaaaacaacaatggggcgactgggggacagttgaatacacagaattcacgctcattgttggagagtacctaccagcgaaaggcagagcagctgatgtcagacgaaaattgtttcaaattgatgtttattcaatcccagggccaggtgcagctgactattgaactgctggatactgaagaggagaatagcgacgatcctgtcgaagctgagaggtggagtgactatgtagaaagatatatgaattcagatacaacctcacccgaactcagggagcacctggcacagaaacccgtgttcctcccacgcaacctgcggcgcattcgcaaatgtcaaaggggccgggaacaacaagagaaagaagggaaggagggtaatagcaaaaagaccatggagaatgttgacagtcttgataagctggagtgcagatttaagttgaacagttacaagatggtgtacgtaatcaagagtgaggactatatgtacagacggaccgctttgttgcgggcgcatcaatcccatgaacgagtgtccaagagactgcatcagcggttccaggcctgggtcgacaagtggactaaagagcacgttccccgggagatggcggccgaaacgtcaaagtggctcatgggggagggacttgaggggttagtgccttgcactactacatgcgatactgaaacactccacttcgtttccatcaataagtacagggtcaagtatggcacagtgttcaaggccccctag

SEQ ID NO: 205219 - DNA, 3822 bp, synthetic construct
  misc_feature 1..3822: note = Description of Artificial Sequence: Synthetic coding sequence
  source 1..3822: mol_type = other DNA
atgaagcggcggctggacgaccaggagagccccgtgtacgccgcccagcagaggcggattccaggtagcacggaggcctttccccatcagcacagagtgcttgcaccagccccccctgtgtacgaagcagtgtccgaaactatgcagtcagccaccggcattcagtattccgtgacacctagctatcaggtgagtgccatgcctcaatcatcagggtcccacggccccgccatcgccgccgtgcattccagccatcatcatcctacagccgtgcaaccacatggtggccaggtcgtacagtcgcatgcacacccagcgccaccagtggcaccagtacagggccagcaacagtttcagagattgaaagtggaggatgctctctcttacctggaccaggtaaagctgcagttcgggtcacaaccacaagtgtataacgacttcctggacatcatgaaggaatttaaaagccaatccatcgatactccgggggtgatatctagagtttctcagctattcaaaggccatcccgatctgatcatgggctttaacacgttcctgccgccgggctataaaattgaggtgcagactaatgacatggtcaatgttactacacccgggcaggtccatcagattccgacccatggcatccagccacagccccagccccccccccagcaccccagccagccatctgcacaatcggcccctgccccagcccagcccgcccctcagcctcccccagcaaaagtctctaaaccaagtcagttgcaagcccatactcccgccagtcagcagactccccccctgcccccttatgcctcgccacgctcgcccccggtgcagcctcacacacccgtgaccatttcccttgggaccgctccaagccttcagaataatcagccagtggagtttaatcacgccattaactacgtaaataagattaagaacagatttcaaggccagcctgacatttacaaggctttcttggaaatcctgcatacgtaccagaaagagcaacgtaacgctaaagaggctggcggcaactatacacctgcactaacagagcaggaggtatacgcccaggtggcccgtctctttaaaaaccaggaggacctactgtctgaattcggacaattcctcccagacgccaatagcagcgttctcctttcaaaaacaaccgccgaaaaggtcgattcagtacgcaacgaccatggaggtaccgttaagaagcctcagctcaataataagccccagcgccccagccagaacggatgccagattcggcggcaccctacgggaacaacacccccagttaaaaagaaaccgaagcttctaaatcttaaagattccagtatggctgatgcaagcaagcatggcgggggtactgaatccctgttcttcgataaggtcagaaaggctctgaggagcgcagaggcctacgagaactttctacgctgtcttgtgatctttaatcaggaagtaatcagtagggcggaactcgtgcagctcgtatcgccattccttggcaagttcccagagttgttcaactggttcaaaaatttcctgggctataaagaaagtgttcacttagaaacgtatcccaaggagcgggctactgaaggcattgcaatggaaattgattacgcatcctgcaagagactcggttcgagctatcgggcactgccaaagagttaccagcagcctaagtgtactggtcgaacccccttgtgcaaagaggtgctcaacgacacctgggtctcatttccttcgtggagcgaagactcaacctttgtgagctcaaagaagacccaatacgaggagcatatatatcgctgtgaggacgaacggttcgaactggacgtggttctggagacgaacttggctacaattcgggtgctggaagctattcagaaaaagctgagtagactctccgccgaagagcaagcaaagtttagactggacaataccctcgggggcacgagcgaagtcattcacagaaaggcgctgcagcggatatacgctgataaagccgctgacattatcgatggattgcgcaagaatccttcgatagccgtacctattgtgctgaagcgtcttaagatgaaggaagaagaatggcgggaagctcagcgcggatttaataaggtctggcgagagcaaaatgagaaatattacctcaagtcactcgaccatcaggggatcaactttaaacagaacgataccaaggtcctgcgcagcaagtctcttcttaacgaaattgaatcaatctatgatgagagacaggagcaagcaaccgaggaaaatgccggcgtcccagttggcccccacttgagccttgcttatgaagacaaacaaattcttgaagacgccgctgccctgatcatccaccacgtaaaacggcagaccgggatacagaaggaggataaatacaagattaaacagatcatgcaccatttcatcccagacctgctgttcgcccagcggggggatctgagtgatgtggaggaagaggaggaagaggaaatggatgtagacgaggccaccggggctgtcaaaaaacacaatggcgtcggcggttctccaccgaaaagtaaattactcttctcaaacactgctgcccagaagttacgagggatggacgaggtctacaacctcttctatgtcaataataactggtacatcttcatgagactccaccagattctgtgtctgcgtttgctccggatatgcagccaggcggagaggcagatagaggaagagaatcgggagcgcgaatgggaacgcgaagtgctaggcatcaaacgggataaatccgatagcccagcaattcagctccgcctgaaggagcccatggatgtcgacgtcgaggattactacccagctttcctagatatggtaagatctctgctggacggaaacatcgatagctcacagtatgaagattcgctgcgtgaaatgttcacaatccatgcctacatcgcctttacgatggacaagttgatccagagcatcgtgcgtcagctccagcacattgtcagtgatgagatttgcgtgcaggtgacagatttatatctggccgaaaacaacaacggagctaccggaggccagctgaacactcaaaattcgcggtcccttcttgagagcacatatcagcgtaaggcggagcagttaatgtccgatgagaactgctttaagctcatgttcattcagtcacaagggcaagtgcagctgacaattgaactgcttgatacagaggaggagaattccgacgatcccgttgaggcagaacggtggtctgattacgtggaaagatacatgaatagtgatacaacaagtcccgaattgcgcgagcacctggcccaaaaaccagtttttctccctcgtaatcttcggcggatcagaaagtgccagcggggacgtgagcagcaagagaaggaaggtaaagagggcaacagcaagaagactatggagaacgtggactccctggacaaactggagtgcagattcaaattaaactcctacaagatggtttatgtgatcaagagtgaggactatatgtatagaaggacagcgctgctaagagcacatcagtctcacgagcgggttagtaaaaggcttcaccagagatttcaggcttgggtggacaagtggactaaggagcatgtgcctagagaaatggcagctgaaacgagcaagtggctcatgggtgaagggctcgaagggctggtgccgtgcaccactacctgtgatactgaaaccctccactttgtgagcatcaataagtatcgcgttaagtatggaacggtcttcaaagccccatag

SEQ ID NO: 205220 - DNA, 3822 bp, synthetic construct
  misc_feature 1..3822: note = Description of Artificial Sequence: Synthetic coding sequence
  source 1..3822: mol_type = other DNA
atgaagcggcggctggacgaccaggagagccccgtgtacgccgcccaacagcgccggattcctgggtcaaccgaggcatttccgcaccagcatcgggttctagctccagcaccacccgtgtacgaagccgtgagtgagaccatgcaatctgctactgggatccaatattcagtgaccccaagttatcaagtcagcgccatgccacagtcttccggtagtcatggtcctgcaattgctgccgtgcattctagccaccatcacccaacagctgtccagccccacggcggtcaggtggttcaatcacatgctcatccagctcctcctgtggcgcccgttcaggggcagcaacaatttcaacgcctcaaagtggaggacgctctgtcgtacttggaccaggtgaagctgcagtttggcagtcagccacaggtgtataatgacttcctcgacatcatgaaagagtttaagagccaatcgatcgacacaccaggcgtgatctcacgcgtgagccagttgttcaagggccaccccgatctgattatgggattcaacaccttccttccccccggatataagatcgaggtgcaaactaacgacatggttaatgtgaccactccggggcaagtccaccagatccctacacacggcatccaaccgcagcctcaaccccctccccagcatccaagtcaacccagcgcccagagtgcaccagcacctgcacagcccgctccccaacccccacctgccaaagtctctaagcccagccagctgcaggctcacacgcccgcatcgcagcaaacacctccgctcccaccctacgctagcccaagatccccccccgtgcagccacacacaccagttacaatctccctggggactgcccccagtctgcagaacaatcaacctgtcgagtttaatcatgcgatcaactacgttaataagatcaagaatcgattccagggccagcctgatatctataaggcttttctcgagattctgcatacataccagaaagagcagcgaaatgccaaagaggcaggcggcaattacactcctgctctgaccgaacaggaggtgtacgctcaggttgctaggttgtttaaaaatcaggaagacttgctgtcggagttcggtcagtttcttcctgacgctaacagttcggtactactgtcaaagaccacagctgaaaaggtcgattccgtgagaaacgaccatggaggaacggtgaaaaagcctcagctgaacaacaagccacagcggcccagtcaaaatggatgccaaatcagaaggcatccaacaggaactactcctccggtgaagaaaaagcctaaattgctcaatcttaaggactcttcaatggccgatgcatccaagcacggcggcggcaccgagtcactcttttttgacaaggtgcgcaaggcccttagatctgcagaagcttacgagaacttcctgaggtgtctggtcatcttcaaccaagaggtcataagtagagcagagctggtacaacttgtcagtccctttctaggcaagttccctgaattgttcaattggttcaagaacttcctaggctacaaggagtccgtgcatctggaaacctaccccaaagagcgcgctacagagggtattgctatggaaattgattacgcaagttgcaagagactcgggtcttcatatcgggccttgccaaaatcctatcaacagcccaaatgcacagggagaacgcctctatgtaaagaggtgctgaatgacacctgggtgtctttcccatcttggagcgaggattccacattcgtgtcgagtaaaaaaacacagtatgaggaacacatctatcggtgtgaggacgagagattcgagcttgatgtcgttctcgagacaaatctggccactattagagtccttgaggctattcagaaaaagctgagccggttgagtgctgaggaacaggctaaattcaggctggacaataccctgggtggaacctcggaggtgattcacaggaaagcactgcagagaatctacgctgataaagcagcagacatcattgacgggttaaggaaaaatcctagtatagcagtccccatcgtactgaaacgcctgaaaatgaaggaagaagaatggagagaagcacagaggggctttaacaaggtgtggcgggaacaaaacgagaagtattacctgaaaagcctggatcaccagggcatcaactttaagcaaaatgatacaaaagtgctcaggagcaagagccttttaaacgaaatcgaaagcatctacgatgagagacaggaacaggccaccgaggaaaatgctggggtgccagtcgggcctcatctttcactggcatacgaggataagcagatactggaggacgctgctgctctgataattcaccacgtgaaaagacagactggtattcagaaggaagataagtataaaatcaaacagatcatgcatcactttatccctgacttactattcgcacaacggggggacctctctgacgtggaggaggaagaagaggaagagatggatgtcgacgaagctactggcgccgtgaagaaacacaacggggttggcggttcacctcctaaaagcaagctcctgtttagcaacacggctgctcaaaaactgcgaggaatggacgaagtatataatctcttttacgtgaacaacaattggtatatcttcatgcgcctacaccagattctgtgcttgcgcttgctgcgtatctgcagccaggccgagcggcaaatcgaagaggaaaatagagagcgagaatgggagcgggaggtgctcggaatcaaaagggataagagtgacagtccagcgattcagttgcggctcaaggaacccatggatgtggatgtggaagactactaccccgctttcctcgatatggtaaggtctctcctggacggcaacattgacagctcacagtatgaagatagcctgagagaaatgtttacaattcatgcttatattgctttcacaatggacaaactgatccagtcaatcgtgaggcaactgcagcacatagtgagcgatgaaatctgcgtgcaagtgaccgatctctacctagccgagaacaataatggggccactggcggccagctgaacacgcaaaatagtaggagcctgttggaatccacctaccagaggaaagccgagcagttaatgtccgacgagaactgttttaagctgatgttcattcaatctcagggacaagtgcagctgacaattgaacttctggataccgaggaggaaaactccgacgaccctgtggaagccgagcgatggtccgattacgtcgagagatacatgaatagtgacactacttccccggagctcagagagcacctggcccaaaagcctgtgttcttgccacggaacctaagacggatcagaaaatgtcagcgcggccgagaacagcaggaaaaggaaggaaaagaagggaactcaaagaagaccatggagaatgtcgacagccttgataaattggagtgtcgatttaagctcaattcctataagatggtctatgtaattaaatctgaggactatatgtaccgccgcacagcattactaagagcgcatcagtctcacgagagggtgtctaagcgcttacaccagagatttcaagcatgggtggacaaatggacgaaggagcacgttcctagggaaatggccgccgagacttccaagtggctgatgggggaaggcctggagggcttagtgccctgcacgacaacatgtgatacagagacattacacttcgtgtccatcaataaatatcgcgtgaagtatgggaccgtctttaaagctccatag

SEQ ID NO: 205221 - DNA, 3393 bp, synthetic construct
  misc_feature 1..3393: note = Description of Artificial Sequence: Synthetic coding sequence
  source 1..3393: mol_type = other DNA
atggcccacgccggcggcggcagcggcggcagcggcgccggcggccccgccggccgaggtctgtctggggcccgctggggacgctccggtagcgccggtcatgaaaagctgcccgtgcacgttgaagacgcgctcacatatctggatcaggtcaagattcggttcggcagcgaccccgcaacctataatgggtttttggagatcatgaaggagttcaagtcccagtcaatcgacactcctggagtgatccgacgggtatcccaattatttcatgagcatccagacttgattgtggggtttaatgcttttctgccactgggctacagaattgacattccaaaaaacggtaagctcaatattcagagtcctttaacttctcaagagaattcacacaatcatggcgacggagccgaagatttcaagcagcaagtcccatacaaagaagacaagccacaggtacctctcgagagcgatagcgtggagtttaataacgctatcagctatgtcaacaaaattaaaacacggttcctggatcatcccgagatttatagatcttttctggagatcctgcacacataccagaaagagcagctaaatactcggggacgcccctttaggggcatgtctgaagaggaggtgtttaccgaggtggccaatcttttcagaggtcaagaagacctgctgagcgagttcgggcaattcctgcctgaggccaagaggtccttgttcaccggtaatggaccatgcgaaatgcattcagtgcagaagaatgaacacgataaaacaccagagcatagtagaaaaagaagcagaccttctctccttagacccgtctcagcaccagcaaaaaaaaagatgaagctgcgaggcacaaaagatctgtccatcgccgccgttggtaagtacggaacacttcaggagttttctttctttgacaaagtacgcagagtcttgaagagccaggaggtgtacgagaatttccttagatgcattgcactttttaatcaagagctggtgtctggatccgaactgttacagcttgtatcgccgtttctgggcaaatttcccgaattgtttgcccagtttaaatccttcctcggcgtgaaggaactgtcgtttgctcctcctatgtctgaccggtctggcgacggtatctcccgcgaaatcgactacgccagttgtaaaaggatcggttcgagctatcgagcactaccgaagacctaccagcagccgaaatgttccggccgcactgccatttgcaaggaggtgctgaacgacacatgggtatcttttcccagttggagtgaggacagtacctttgtgtccagcaaaaagaccccatacgaagaacagctgcatcgatgtgaggacgagaggttcgagctcgacgtggtgcttgagactaacctggctactatccgtgtgctggagagtgtgcaaaaaaaactgagtaggatggctcccgaggatcaggagaagttccgactagacgactccctgggaggaactagtgaggtgatccagcggcgcgcaatttatagaatctacggagacaaagctccagaaatcattgagtcactcaagaagaatcccgtgacagccgtcccagtggttctcaagcgcctgaaggccaaggaggaagagtggcgggaagcgcaacaaggtttcaacaagatatggcgggagcagtacgaaaaagcctatctcaaatccctggatcatcaggcagtcaactttaagcagaacgatactaaggcattgcgctctaaatctctcctgaacgaaatcgagagtgtttacgatgaacatcaggaacagcactccgaaggacgttcggccccatccagcgaaccacatctgattttcgtgtacgaggacagacaaattctcgaggacgccgccgcactcatctcctattatgtcaagaggcagcccgcaattcaaaaggaagatcaaggcactatccaccagctattacatcagttcgtgcccagcctttttttctctcaacagctggatcttggggcgagcgaggagtctgcggacgaagatagagactcgcctcagggacagaccacggaccccagcgagcgtaaaaaaccagcacccggtccgcactcaagtccccccgaagagaaaggcgctttcggggacgcgccagccacagagcagcccccccttccacctccagctcctcacaagccacttgacgacgtgtattcactgttctttgccaataataattggtattttttcctgcgcttgcatcaaactctctgctctaggttactcaagatttaccggcaagctcagaagcagctcctggagtatcgtacagagaaagaacgggagaagctgctgtgtgaggggcgcagagagaagggctcggaccccgctatggagctacgactaaagcagccaagtgaggtggaacttgaggaatactatcctgcttttctggacatggtcaggtcactgctggagggttcaatcgaccctactcagtatgaggacaccctgcgcgaaatgtttacaattcatgcgtacgtgggttttaccatggataaactggttcagaatatagcccggcagttacatcacttggtgtcggacgacgtctgcttgaaggtcgtggaactctatctaaacgaaaagaaacggggagcagccggcggaaatctgtcttcacgctgcgtgcgggctgccagggagacctcttaccagtggaaggccgagagatgcatggcagacgaaaattgttttaaggtaatgttcctgcagcgaaaagggcaggtcattatgacaatagagctgctggacactgaggaggcccagaccgaggacccagttgaagtgcagcacttggcaaggtatgtcgagcagtacgtaggaaccgagggtgcttctagttcccctactgaggggtttttacttaagcccgtattccttcagagaaatctgaaaaaattcagaaggcggtggcagtcagaacaagcccgagctctccgaggcgaggcacgcagctcgtggaagaggctagtgggtgtagagtctgcatgcgatgttgactgcaggtttaagctgtccacccacaagatggttttcatcgtgaactcagaggattatatgtatcgtagagggacactctgtcgagctaagcaggtccagcctctggtgcttcttaggcatcatcagcactttgaggagtggcacagtcgttggctggaggacaatgtcaccgtagaggcagcgagtctggtgcaggactggcttatgggtgaggaggatgaagatatggttccatgcaaaactctctgtgagaccgtgcacgtccatggcctcccagtgacgcggtatagagtccagtattctcggagaccggcctccccatag

SEQ ID NO: 205222 - DNA, 3489 bp, synthetic construct
  misc_feature 1..3489: note = Description of Artificial Sequence: Synthetic coding sequence
  source 1..3489: mol_type = other DNA
atggcccacgccggcggcggcagcggcggcagcggcgccggcggcccagcagggaggggcctgtccggtgcccgctggggcaggtccggcagtgccgggcatgaaaaattgccagtgcatgtcgaagatgccctgacttacttggaccaggtgaaaattagattcggcagcgatccggctacatataatggtttcttagagatcatgaaggaatttaagagtcagagcatcgacactccaggagtgatcagacgcgtcagccaactgtttcatgaacacccagacctcattgtcggcttcaatgccttccttcccctcgggtaccgcatcgacatcccgaagaacggtaaactgaacatccaaagcccactcacaagtcaggaaaatagccataatcacggggacggggctgaggattttaagcaacaggtgccttacaaagaggataaaccccaggtgccattggagagcgactctgtagaatttaacaatgcaatctcctatgtcaataaaatcaaaacccggttcttggaccatcctgaaatctataggtcgtttctggaaatcttgcacacataccagaaagagcagctgaatacacgcgggcgcccgttcagaggcatgagcgaagaggaagtgtttactgaggttgctaacctctttagaggccaggaggatttactgtctgagttcggccagtttcttccagaggctaagcgctctcttttcacagggaacgggccctgcgagatgcattctgttcagaagaatgaacacgataaaacacctgagcacagtcgaaaacggagccgtccctccctcttacgacccgtcagcgctccagccaagaaaaaaatgaagctgaggggtactaaggatctgtccatcgccgcagtcggaaaatatgggactctgcaggaattctcatttttcgacaaggttcggcgcgtactcaagagtcaggaggtctatgaaaactttctgaggtgtatcgcgctattcaaccaggaactggttagcggcagtgaactcctgcagcttgtctcccctttcctaggtaagttccctgagctgttcgcccaattcaaatctttcctcggggtcaaagagttgagcttcgccccacccatgagcgatcgctctggcgatggtatcagccgcgagatcgactatgcatcatgtaaacgtataggatcatcctaccgtgctctgcctaagacgtatcaacagccaaaatgttcaggccgtacagccatttgtaaggagttggaccattggacactgctccaaggaagttggactgacgattactgtatgtccaaattcaaaaatacatgctggatccctggttattcagcgggggtccttaacgacacatgggtctcattcccgagctggtctgaggacagtactttcgtatcttccaagaagaccccgtatgaggagcagctgcaccgctgcgaggatgagcgctttgaacttgatgtggtcttggagacaaacctggctactattcgggtactggagtccgtgcagaagaagcttagtcgcatggcacccgaagaccaagagaagttcagactggacgactctctaggcggtacgtctgaggtgatccagaggcgcgctatttaccgtatttacggggacaaggctcctgaaattatcgagtctctgaagaaaaaccccgttactgccgttcccgtggtgctaaagcgcttaaaggctaaggaagaagagtggagagaggcacagcagggtttcaacaagatctggagagagcagtacgaaaaagcctacctcaaaagcctcgatcaccaggccgtgaatttcaagcagaacgacactaaagctctgcgctcaaaaagcctgttaaacgaaattgagtccgtctacgatgagcaccaggagcagcacagcgagggcaggtccgccccttcctcggaaccacaccttatcttcgtctacgaggatagacagattctggaagacgcagctgccctgatctcctactacgtgaaaaggcagcctgccatccagaaagaagaccagggtacaatacatcaactgctgcaccagttcgtgccaagcttgtttttcagccaacagctggacttgggagccagcgaggaaagtgcggacgaagatcgcgacagccctcagggccagaccacagacccgagtgaaagaaagaagcctgcccctggcccccacagcagcccccctgaggaaaagggggccttcggcgatgcgcctgcaactgaacaaccgcctctccctcctcctgccccacataagcctctggatgacgtgtactcccttttcttcgcaaataataactggtactttttcctaaggctccaccaaaccctgtgctcccggttgcttaagatctatcgacaggcacagaagcaactactggagtaccggacagagaaggagcgcgagaaattgttgtgtgagggtcgcagggaaaaaggtagcgatcccgccatggagctgcgcctgaagcagcctagcgaggttgaactggaagagtactatccggcctttcttgacatggttcggagcctcctagagggaagtattgaccccacccagtacgaagacacactgagggagatgttcactatacatgcatacgtagggttcacaatggacaaactggtccaaaacattgcacgtcaattgcatcacctcgtgtctgacgacgtttgccttaaggtggttgaactgtatctcaatgagaagaaacgaggagccgcaggtggtaatctatccagccggtgcgtgcgggccgctcgggaaacgtcttatcagtggaaggctgagcgctgtatggcggacgaaaactgcttcaaagtgatgtttctgcagcgtaagggtcaggtaatcatgaccattgaactgcttgataccgaggaggcgcagactgaggaccctgtagaagtgcagcatctggcccgatacgtagagcagtacgtcgggactgaaggggcgagtagcagcccgacagaggggtttctcctcaaacccgtgttcctgcagcgaaatctaaagaagtttcgccggcgatggcaaagtgaacaggctcgggcactaaggggggaggccaggtctagttggaagcggttagtgggtgtggaatccgcttgcgacgtggattgccggttcaaactcagcactcacaaaatggtattcattgtcaatagtgaggactatatgtaccgacgcggcaccctctgccgcgccaagcaggtccagcccctcgtgctgctgaggcatcaccagcacttcgaagaatggcatagtaggtggctcgaggataacgtgaccgtggaagctgcgagtctggtgcaagattggctgatgggggaagaggacgaagacatggtcccctgtaagactctatgtgaaaccgtccatgtccatggcctccctgtaactcgctatagggtgcagtacagcagaaggcccgctagcccatag

SEQ ID NO: 205223 - DNA, 3171 bp, synthetic construct
  misc_feature 1..3171: note = Description of Artificial Sequence: Synthetic coding sequence
  source 1..3171: mol_type = other DNA
atgagcagccagcagttcccccggctgggcgcccccagcaccggcctgtcccaggctccttctcagattgcgaattcagggagcgcagggcttatcaatcccgctgccacagtgaacgatgagagtgggagagatagcgaggtcagtgctcgcgaacacatgtccagcagcagctctcttcaatcgcgtgaagaaaaacaagagcccgtggtggttaggccatatccccaggtacagatgctcagcactcatcacgctgtcgcctctgctacccctgtggctgtcacagccccccccgcccatctgacacccgccgttcctctctcctttagcgagggactgatgaagcctcctcccaaaccaacaatgccatcccggccaattgcaccagcgcccccaagcaccctaagcctcccccctaaagtgccaggacaggtgacagtgaccatggagtcaagtatcccccaggctagcgccatccccgtggcaaccatcagtggccagcaaggtcaccccagcaatctccaccacataatgactaccaacgttcaaatgtccatcattcgaagcaacgctccggggcctcctctgcacataggcgcgagtcatctgccacggggcgctgccgcagccgctgtaatgagctcctcgaaggtgactactgtgcttagacctacatcacagttacccaatgctgcgacagctcagccagcagtccagcatataatccaccagcccatccagtccagaccgccagttaccaccagcaacgctattccgcctgcagtggtggccaccgtgagcgccacaagagctcagagccctgtaattacaaccactgcagctcacgctacagactcagccctgagcaggccaacactgtcaattcagcatcctccctcagcagcaatctccatccagaggccagcgcaaagcagggacgtgacaaccagaattacccttccctcccacccggctttgggaaccccgaaacagcaattacacacaatggcacagaagaccatctttagcacagggactccagtggcagctgcaaccgtagccccgatactggccactaatacaatcccatcagccaccactgctggcagtgtgtctcatacgcaagcccccacaagcacaatcgtcactatgactgtcccctctcactcatcccatgccactgcagttacaaccagcaacattccagtggcaaaggtcgtcccacagcagattacccacacttcaccccgtatccagccggactatcctgccgaaaggtcatccttgatacccattagcggccatcgggcgtcgccaaaccccgtcgcaatggagactcggagcgacaaccgaccatcggtacctgtacagttccagtactttctccctacctaccctccatcagcctatccgctggctgcccacacatacactcctatcacttcatctgtgtccactatccggcagtatcccgtgagtgcccaagccccgaacagcgccatcactgcgcaaacaggggttggagtcgcttctacagtccatctgaaccccatgcagctgatgaccgtggacgctagccacgcaaggcacatccagggaatccagccagctccaatttccacgcagggaattcagcccgctcccattggcacccctggaatccagcccgctcccctggggacgcaaggtatccattcagcgacccctattaacacacaagggctacaacctgcgccaatgggaacccaacagccgcaaccggagggcaagaccagcgtggtcctggctgatggcgcgaccatcgtagcgaatccgatatccaacccgttctccgctgctcctgcggctacaacagtggtacaaacccattcccagtcagcatcaacgaacgcccctgctcagggctcctcgcctcgtccatctatactaaggaagaagcccgcgaccgatggcatggctgtcagaaagaccctgatacctccacagcccccagatgtggcctcaccccgcgtcgagtcttctatgagatccacttcaggctctcctaggcctgccggcgccaagccaaagtccgaaatccacgtgtccatggcgaccccggtgacggtatcgatggagaccgtgagtaaccaaaacaacgaccagccaacaatcgcagtgccccccaccgcccagcagcccccaccaactatcccaaccatgatcgccgcagccagccccccctcacaaccagctgtcgctctgagcactatccctggcgctgtaccaatcaccccacctataactaccatcgccgccgccccgccaccctcagtgacggtcggagggtccctttcctctgttctgggaccccccgttccagaaatcaaggtaaaggaggaagtagaacctatggacatcatgcggccagtgtccgccgtgccgccactggccacaaacaccgtgtcacctagcctcgctctgctggccaacaacctatcaatgcctacctcagacttaccaccaggcgcctccccaagaaaaaagccgaggaaacaacagcatgttatctcaactgaggagggcgacatgatggagaccaattctaccgacgacgagaagagcacagcgaagtcactgcttgtcaaagctgaaaagcggaaatcgccccccaaagagtatatcgacgaggagggagtccgatacgtgccagtgcggcctcgcccaccaatcaccctgctgagacattataggaatccttggaaggctgcctatcaccattttcagcggtatagtgatgttcgcgtgaaagaagagaaaaaggccatgttgcaggaaatcgccaaccagaaaggagtcagctgtagggcccagggatggaaagtgcatctctgcgcagctcagctgctccagttgacaaatctagaacacgacgtctatgagagactgacaaaccttcaggagggaattatacccaaaaagaaggcggccaccgatgatgatttacatcgcatcaatgagttaatccaaggcaatatgcaacgctgtaagctggtaatggatcagatcagcgaagccagagactctatgctgaaagtccttgatcacaaggaccgtgtgctgaagctgcttaacaagaatggtacggttaagaaagtctcgaaacttaagcgcaaggagaaggtttag

SEQ ID NO: 205224 - DNA, 3147 bp, synthetic construct
  misc_feature 1..3147: note = Description of Artificial Sequence: Synthetic coding sequence
  source 1..3147: mol_type = other DNA
atgggccccccccggcacccccaggccggcgagatcgaggccggcggagccggaggagggaggagattacaggtggagatgtcctcccagcagttccccaggctaggggcccccagtacagggctgagccaggcacccagccagatcgcaaatagcggctcggctggcctgattaaccccgccgcgacggtcaatgacgagtccggtcgggactcagaagtctctgccagggagcacatgagtagttcaagctctttgcaatcgagagaggaaaaacaggaacctgttgtggtccggccctacccccaggtgcagatgctgagcacacatcacgcagtggccagcgccacaccagttgccgtaactgcgccgccagctcacctcacaccggccgttccactgagtttttctgagggactaatgaaacctccccccaagccgacaatgcctagtaggccgatcgcgccagcgcctccaagcaccctgtcgctgccacctaaggtccctggtcaagtcaccgtgaccatggaatcatctatccctcaggcttctgcaatcccagtcgccacgatatcgggccaacagggccacccttcaaaccttcaccacatcatgaccactaacgtacagatgagcatcatcaggagcaacgcccccgggccccctttgcatattggcgcaagccatttacccagaggtgccgctgcagctgcagtgatgagctcctcaaaagtgactacagttctgagacctacctcgcaactgccaaatgcagctaccgcgcagcctgctgtccaacatattattcaccagcctatacagagcaggccacccgttaccacctccaacgctattccacctgccgtcgtggctactgtgagtgcaactagagcccagtctcctgtaatcacgaccacagcagcgcatgccactgatagcgccctttcgcggcccaccctctccatccagcacccgccgtctgccgctatctccatccagaggcctgctcaaagcagagacgtcaccacccggattacactgccctcgcatccagcattgggtacccctaaacagcagctgcataccatggcccagaagactatattcagcaccggcacacctgttgcagccgcaactgtggctccaattttagccaccaacacaatcccatcagccaccacggcaggtagcgtttcacacacacaagcgccaacaagtactatcgtgacgatgaccgtgccttcacacagcagccatgccactgcagtaaccacgtcaaacattccagtggccaaggtggtgccacagcagattacacacactagcccccgcatccagccagattatccagcagaaagatcgtctcttatacccattagcgggcaccgcgcttcgcctaaccccgttgctatggagaccagatcagataaccggccaagcgttcctgtgcagttccagtatttcttgcctacctaccctcccagcgcctatcctcttgccgcacatacatacacacccattacgagtagcgtgagcacgataaggcagtaccctgtttctgctcaggcccccaactctgcaatcaccgcacagaccggggtgggagtcgcgagcaccgtccatttgaatcctatgcagctaatgacagtggatgcttcacacgccagacatattcagggtatccagcctgcacctatctcaacacaaggaattcagcctgcacccatcggcactcccgggattcagccagcaccgttggggacccagggcatccattcggccacgcccatcaacacccaaggactgcaaccagcgcctatgggcacccagcagccgcagcccgaagggaaaacaagcgccgttgtattagccgatggtgccaccatcgtcgcaaatcccatttccaatccattttctgctgcccctgccgccactaccgtggtgcagactcattctcagtctgcaagcacaaacgcacccgcacaaggatcatccccacgccccagcatactccgcaaaaaacccgccacagatggcgcaaagccaaaaagcgaaattcacgtcagcatggccacgccagttactgtaagcatggaaaccgtctccaatcaaaataatgaccaaccaacgatagctgtgcctccaaccgcccagcagcctccccccacaattcccacaatgatagctgcagcatctccccccagccagcccgccgtcgctctctctacaattcctggagccgtgcctatcaccccaccaataaccactattgctgcggcgccaccaccttccgtgacagttggagggtccctatcaagcgtgcttgggccacccgtacccgagattaaagtcaaggaggaggtggaacccatggacatcatgcgtcccgtgtcagctgttcctcccctggcaaccaatacggtctctcccagcctggccctccttgctaataatctttctatgccaacttccgacttgcctcccggggcgagtccacgcaaaaaaccccggaagcagcagcacgtcatctcgactgaggaaggcgatatgatggagacaaatagcactgatgacgagaagagcacagctaagagccttttagtgaaggccgaaaaacgtaagtcccccccgaaggaatacatagacgaagagggcgtaagatacgtccctgtgagaccaaggcctcccatcaccctattgcgccactaccgcaacccatggaaggccgcctatcaccacttccaaaggtactccgatgtgagggtgaaggaagaaaagaaggccatgttgcaggaaattgccaaccagaaaggcgtgtcttgcagggctcaaggctggaaagtgcacctgtgcgccgcccagctgcttcagctgaccaacttagagcatgatgtttatgagcgcctgactaatctgcaagagggcataattcctaagaaaaaagctgctactgacgacgatctgcaccgtatcaacgagttaatccaggggaacatgcagaggtgtaagctcgtgatggaccagatctcagaggcaagggactccatgctgaaggtcttggatcacaaagacagagtgctcaagttgctgaataagaacggaaccgttaaaaaagtatcgaaacttaagcgaaaggaaaaggtgtag

SEQ ID NO: 205225 - DNA, 3252 bp, synthetic construct
  misc_feature 1..3252: note = Description of Artificial Sequence: Synthetic coding sequence
  source 1..3252: mol_type = other DNA
atgggccccccccggcacccccaggccggcgagatcgaggccggcggcgccgggggcggccgcagactgcaggtcgagatgagcagtcagcagtttccccgcctgggcgctcccagcacagggcttagtcaggcaccctcccagattgccaattctggatcagccggtttaataaaccccgctgccacagttaatgacgagtcgggccgggacagtgaagtgtccgcccgggaacacatgtcatccagttctagtcttcaatctagagaggaaaagcaggagccagtcgtagtgcgcccctatccgcaggtgcagatgctgagcacacatcacgcagtggctagcgccacccccgtagccgtcaccgctccccccgcacacttgactcctgctgtgcctctgtctttctctgagggactcatgaagccacctcccaagccaaccatgccctcccgacctatagcgcctgccccaccctcaactttaagccttccacccaaggttcctgggcaggttacggtcacaatggagtcttctatccctcaggccagcgctattcctgttgccaccattagtggacagcaggggcacccctcaaatctgcatcacatcatgacaactaatgtgcagatgagcataatccgctccaacgcccccgggccgccactccacattggtgcaagccacctgcctaggggagcggctgctgccgccgtaatgtcttcgagtaaggtgacaaccgtgctccgccccacatcccagcttccaaacgccgccaccgctcaacccgccgtccagcacattatacaccagcctatccagtctcggcctcccgttacaaccagcaacgccataccccccgcagtggtcgctactgtgagcgcaaccagggcacaatcccctgtaattactactacagccgctcatgccactgattccgcgctctcgaggccgactctatcaatccagcatccaccttcagctgccatttcaatacagcggcctgcccagtctagagacgtaactacccgcatcaccctccctagccaccccgcactgggcacccccaagcagcaactgcatactatggcccagaaaaccatattctctacaggaacgcccgtggctgcagcaacggtggctccaatattggccaccaacacaatacctagcgcgactaccgcagggtccgtgagccatacacaagctccaacctctactatagtgaccatgacagtcccctcgcactcttcccacgccacggcagtaactacttcaaacatcccggtagcaaaagtggtcccacagcagataacccacacctcacccagaatacagccagactatccagctgaacggtcgtccctcattcccatttccggtcatagggcaagtccgaaccccgtggccatggaaactaggtccgataaccgacccagcgtgcccgtgcagtttcagtatttcctccctacctacccaccgagcgcctacccgctggccgcccacacttacactccaatcacatccagtgtctcgacgatccgccaataccctgtgagcgcccaggcacctaatagcgccataactgcccagacgggggtgggggttgcgtctaccgtccatctcaatccaatgcagctcatgaccgtagacgcctctcacgccaggcacatccaggggattcaaccagcccctatctccacacaggggatccagcccgcacccatcggaaccccgggtatccagccagctcctctgggaactcagggcatccattctgctacgccgatcaacacccagggtcttcagccagcgccaatggggacacaacagccccaaccggagggaaagacgagtgctgtggtactggcggacggtgctactatcgtggccaaccctatcagtaacccatttagcgctgccccggcagccaccaccgtggtgcaaactcactctcagtcggcctcaacaaatgcccccgcacagggcagttcacccagaccatcaatcctgagaaagaaaccagctactgacggcatggctgtgagaaagacccttattccccctcagccgcctgacgtcgcaagtccccgggtggagtcctcaatgcggtccacgtccggatctccccggccagcgggcgccaagcccaagagtgaaattcacgtctcaatggcaacgccagtcactgttagcatggaaacagtatctaaccagaacaatgaccaacctacaattgcagttccaccaacagcccaacaaccgccgccaacaatacccacaatgattgccgccgctagtcctccctcacagcccgccgtggccctttctaccattcctggcgccgtccctatcacccctccaatcaccaccattgccgccgctcccccaccatccgttacagtcggagggagtctttcttccgtattgggtccaccagtaccagaaattaaagtgaaggaagaggtggagcctatggacatcatgagacccgtttcagccgtgccccctctggccaccaatactgtttcaccaagtctggctctgctggccaataacctttccatgcccacctcagacctgccacccggggcctctccaaggaaaaaacccagaaaacagcagcacgtgattagcaccgaggaaggtgacatgatggagaccaattcgactgacgatgagaagtctaccgctaaaagcttgctggtgaaggctgaaaagaggaaaagcccacctaaagaatacattgatgaggaaggggtacggtacgttccagtaagacctagaccacctattaccctcttgagacactatagaaatccctggaaggctgcataccaccacttccagcggtacagcgatgtgcgggtcaaagaggagaagaaagccatgttacaggagatcgccaatcagaagggtgtgtcctgtagagctcaaggttggaaggtccatctgtgtgccgctcagttgctccagctgacaaatctggagcatgacgtgtacgagcggctgaccaacctgcaggaaggaataatccccaagaaaaaggccgctacagatgatgatctgcatcgaatcaacgaactcatccagggcaatatgcaacgctgtaaactcgtgatggaccaaatttctgaagctcgtgactccatgctgaaggtgctggaccacaaagaccgcgtgctgaaattgcttaataagaatggcaccgtaaaaaaagtgagcaaactgaagagaaaagaaaaggtgtag

SEQ ID NO: 205226 - DNA, 789 bp, synthetic construct
  misc_feature 1..789: note = Description of Artificial Sequence: Synthetic coding sequence
  source 1..789: mol_type = other DNA
atgagcagccagcagttcccccggctgggcgcccccagcaccggcctgtcacaagctccaagccagattgccaactctgggtccgcgggcctgattaatcctgctgctactgtgaacgacgaaagcggacgcgattccgaggtgtccgctcgggaacacatgtcctccagctcctccttgcagagtcgcgaggagaaacaggaacctgtggtcgtgagaccatacccacaggtgcagatgctctccacacatcacgccgtggcgagtgccactccagtggctgtaaccgcaccgcccgcccatctcactccggccgttccactaagtttttcagaagggctaatgaagccacccccaaagccaaccatgccttcccgccctattgctccagcgccaccgtctaccctgtccctgccccccaaagttcctggccaagttactgtcaccatggagtcttccatcccccaggccagcgccatccctgtggccacgatatctgggcagcaggggcacccgagtaatctacatcacatcatgacaaccaacgtgcagatgtccattatacggtctaatgcacctggcccacccctgcacattggagccagccacctcccccggggggccgccgcagcagctgtaatgagcagttcgaaggtgacaaccgtcctcaggcccacttctcagctgccaaatgccgccaccgcacagccagcagtacagcatatcatacatcaacctatccagagcaggcctcccgtgactacgagcaatgcaatcccccccgcatag

SEQ ID NO: 205227 - DNA, 630 bp, synthetic construct
  misc_feature 1..630: note = Description of Artificial Sequence: Synthetic coding sequence
  source 1..630: mol_type = other DNA
atgaaccccagcatgaagcagaagcaggaggagatcaaggagaacattaagaactcttcagtaccgcggcggacgttgaagatgattcagccaagtgcctccggatccctggtgggcagggaaaatgaactcagtgctgggttgtctaaaaggaaacacagaaacgaccacttgaccagtacgaccagctccccgggagtcattgtgcccgaatcctctgaaaacaagaatctgggcggtgtaacccaggagtcttttgatctgatgattaaggagaacccgtctagccagtactggaaggaggtcgctgaaaagagaagaaaagcgttgtacgaagcactgaaagagaacgagaaattacataaggaaatcgaacagaaggacaacgaaatcgcacggttaaagaaggagaacaaagagcttgctgaagtggcggagcacgtacagtacatggccgagctaatcgaaagactgaatggggagccactggacaattttgagagcctggataatcaagagtttgacagcgaggaagagactgttgaagattctctggtagaagatagcgagatcggaacttgtgccgagggaacggtgtcctctagcacagacgccaagccatgtatctag

SEQ ID NO: 205228 - DNA, 2622 bp, synthetic construct
  misc_feature 1..2622: note = Description of Artificial Sequence: Synthetic coding sequence
  source 1..2622: mol_type = other DNA
atggccgagatggagaaggagggccggccccccgagaacaagcggagcaggaagcctgcccatccggtgaaaagagagataaacgaggagatgaagaacttcgcagagaacacaatgaatgagctgcttggatggtatggctatgacaaggtggaattaaaggacggggaagacatcgaatttcgatcgtatccaaccgacggcgagtcaagacagcacatctccgtgttgaaagagaactcattgcctaagcctaagctgcccgaagactccgtaattagcccatacaatatctcaacaggctacagtggactggctacgggaaatggtctgagtgacagccctgcgggttccaaggatcatggctctgtgccaatcattgtgcctcttatcccaccaccctttatcaagcctcctgcggaggacgatgtttcaaacgtccaaattatgtgcgcttggtgtcaaaaggtgggtatcaagcgctatagcctgagtatgggctccgaagttaagtcgttttgttcagaaaagtgtttcgctgcttgccggagagcctacttcaaacggaacaaagcccgcgacgaggatgggcatgccgaaaattttccacaacaacattacgcgaaagagacaccaaggctagccttcaaaaataactgtgaactcctggtgtgcgactggtgtaagcatattagacacacaaaagagtacttagacttcggagacggtgagcgtcgcctccaattttgcagtgccaagtgcctgaaccagtacaagatggatattttctacaaagaaacccaagctaatctcccagccgggttgtgtagtaccctgcacccacccatggagaacaaggcagagggtacaggcgtgcaacttctgactccagacagctggaatatccctctgaccgatgctaggcggaaagcacccagccccgtcgctacagccggacagtcccagggccccggaccctccgcttccaccactgttagtccgagcgatactgcaaattgctcggtaacaaagataccgacacccgtgcctaagagcataccaatctctgagactcccaatattccacctgtgagcgttcagccacccgcctccataggtccccccctgggtgtgccaccacggtcccctccaatggtgatgaccaatcgaggaccagtgccgctccccatattcatggaacagcaaattatgcagcagattcgccccccctttatccgcgggccgccccatcatgcaagcaaccccaattctcctctgtctaacccaatgttgccgggaattggcccgccccctggaggcccgcggaacctgggccctacaagctctccaatgcatcgccctatgttatctccgcatattcaccccccgagcactcccaccatgcccggaaaccctcccggcctcttaccgcctcctcctccaggcgcacctctgcctagccttcccttcccacccgtgtcaatgatgcccaatggcccaatgccagttcctcaaatgatgaattttggcctaccctccctggctccgctagtgcctcccccgaccctccttgttccatatcccgtaattgtaccactgcctgtccctatccctatccctattcccattccacatgtgtccgactccaaaccaccaaatggtttcagctctaacggcgagaactttattccaaacgcacccggggatagcgccgccgccggcgggaagccgtccggacattccctgagcccccgggatagcaagcagggctcgtctaagtctgccgatagtcccccaggctgctccggtcaagcattatctctggctcccacgccagctgagcacggcaggtctgaagtggtggatcttacccgccgcgcagggtccccgccgggacctcccggcgcaggtggacaattaggcttccctggtgtgctgcaaggcccacaagacggggtcatcgatcttacagtgggtcatagagccaggttgcataatgttattcaccgcgctctccatgcgcatgttaaggccgaacgagagccatccgcagcagagagacgtacctgcggtggctgccgcgatggacattgtagccctcccgccgccggagaccccggtccaggagccccagctggcccggaggctgccgcagcctgcaacgtaatcgtaaatggaacccgcggggccgcagctgagggagcaaaatcagccgagcccccgcccgaacaacctcccccaccaccacctccggccccccctaagaagttgctgtcaccagaggagcccgccgtgtcagaactagaaagcgtcaaagagaacaattgtgcgtcgaactgtcacctcgatggggaggccgccaaaaagctgatgggagaggaggctcttgcaggcggagataagtccgacccaaatcttaataaccctgccgacgaagatcacgcctatgccctaagaatgctgcctaagacagggtgtgtgattcaacctgtgccaaaacctgcagagaaggctgccatggctccctgtatcatttcttcgccaatgctctctgccggtccagaggatctcgagcctcccctgaaacgccgatgcctgcgcattagaaatcagaacaaatag

SEQ ID NO: 205229 - DNA, 1233 bp, synthetic construct
  misc_feature 1..1233: note = Description of Artificial Sequence: Synthetic coding sequence
  source 1..1233: mol_type = other DNA
atgcccggcgtgtgcgaccgggcccccgacttcctgagccccagcgaggaccaggttctacgcccagccctgggatcctctgtggccctgaattgcacagcctgggtcgtctctggcccacactgttcactgccttcagtccaatggttgaaggacggcttgccactcggtatcgggggccattacagcctacacgaatactcatgggtgaaagctaacctgagtgaggttctcgtctctagcgtgcttggggtgaatgtaacaagcacagaagtctatggagccttcacctgcagtattcagaacatcagtttttctagcttcactctgcagcgagctggcccgacatcccacgtcgccgccgttctggccagtttactcgtgctcctcgctctgttattagctgcattactgtatgtcaaatgtcgactaaatgttttgctctggtaccaagacgcatacggcgaggttgaaatcaacgatggcaagctgtatgacgcgtatgtttcctactcagactgcccagaagatcgtaagttcgtgaacttcatcctcaagccacagttggaacgtcggcgggggtataagctctttcttgatgacagggacctgctcccccgggcagagccgtccgccgaccttctggttaatctatctcgctgcaggaggctgatcgttgtgttgagtgatgcattcctctcacgggcctggtgctctcactccttcagagaagggctttgcaggctccttgagctgacgcgccgtccaatctttattactttcgaagggcaaaggagggatcccgcccatcccgctttaagacttttgaggcagcaccggcatctcgttacattgcttctgtggcgtccagggtcggtgaccccgagctccgacttttggaaggaagtgcaactcgccctgcccagaaaagtgcaatacaggcctgtggagggcgacccccagactcagctgcaggatgataaggatcccatgctcattctgcgcggcagggtcccagaggggagggctttagactcagaggttgacccggatcccgagggtgacctcggagtgaggggccctgtattcggcgaaccctcagccccacctcatacctctggagtctctcttggcgagtcacggtcttccgaggtagacgtcagtgatctgggtagccgcaattactccgcacggaccgatttttactgcctggtttccaaagacgatatgtag

SEQ ID NO: 205230 - DNA, 1515 bp, synthetic construct
  misc_feature 1..1515: note = Description of Artificial Sequence: Synthetic coding sequence
  source 1..1515: mol_type = other DNA
atgcccggcgtgtgcgaccgggcccccgacttcctgagccccagcgaggaccaagtcctgcgacccgctctgggttcctcagtggcactcaactgcacggcctgggtcgttagcggcccgcactgctctctccccagcgtgcagtggctcaaagatgggctgccgctcggtattgggggccattattctcttcacgagtacagttgggtgaaagctaacctctccgaggtgctcgtcagtagtgttcttggagtgaatgttacctctactgaggtttacggtgcattcacatgttcaatacaaaatatctcattcagcagtttcaccttacagcgtgccggccccacgtctcatgtggcagcggtgctcgcctccttacttgtcctcctagctctgctgttggcggcattgttatacgttaagtgtagattgaacgtgctgctttggtatcaggatgcttacggggaggtggagatcaatgatgggaagctatacgacgcatacgtgtcctactccgattgtcctgaagacagaaaattcgtcaactttatcctcaaaccacagctggaacgtagaagggggtacaagctgttcttagacgatagggatctgctgcctagagctgagccctccgccgacttattagttaacttgtctcgctgtcgccggctaatagtcgtcctgagtgacgcattcttgtcacgcgcctggtgcagccacagcttcagagaagggttgtgcagattgctggagcttacccgtcgtcctatctttattaccttcgaaggccagcgtcgagatcccgcccatcccgccctccggctcctaaggcagcacaggcacctcgtgactttattactctggcgtcccggcagcgtgaccccttcttctgatttctggaaggaggtgcagctcgcactgccacgcaaggtgcagtaccggcctgtggagggggatccgcagacacagctgcaggatgataaggaccctatgcttattctgcgtggacgcgtccccgagggacgggctctggatagtgaggttgaccctgatcccgagggtgacctggggatgcctgcccagccacattccccaaccggagaagcgcaacatagggccgagtggggccaggcccagggaacaggccccggtggcgctccgggcgtggaagattctagccgacacagagagccactgcatggcctatgtcccggcggcgctagaccaagcgtgtgtttgggcacatcctgggcatcacaggccatcaccgcgggtggcgaacaagggcagcctctcgccgttggcttggggcaggggtgcggatggcccccccaagcatcccggagccctcacccgaggtgtcctggcgcttgcctctggcgcgctataagtagcacggcacatcaatggggtctcgccggcagggaaccagaacagcgatccggccgcctcggttcaaggttggcaaagctccagtgcccccacaggttactcttgcctggggtccaggggtag

SEQ ID NO: 205231 - DNA, 1233 bp, synthetic construct
  misc_feature 1..1233: note = Description of Artificial Sequence: Synthetic coding sequence
  source 1..1233: mol_type = other DNA
atgcccggcgtgtgcgaccgggcccccgacttcctgagccccagcgaagatcaggtcctacggccagctcttggttcgagcgtcgctcttaattgtaccgcctgggtggtgtccgggccacattgttcactgcctagcgtgcagtggctgaaggacggcctaccattgggaatcggaggacactatagcctacacgagtattcttgggtgaaagccaatttgtcggaagtcctcgtctcttccgtgctgggagtaaacgtgaccagtacagaagtgtacggcgccttcacgtgttctattcaaaacatcagcttttccagttttaccctccaacgggccggccccacctcccacgtggccgcggtgctcgcgtctctgctggtgctcctggccctcctcttggccgcgctgctctatgttaagtgccgcctaaatgtccttctttggtatcaggatgcttacggggaagtcgagatcaacgatggaaaactctacgatgcctatgtgtcttactcagattgccccgaagaccgtaagttcgtgaattttattctgaaaccacagctggaacggcggagagggtacaaactgtttctggacgaccgggatctgctgccccgggctgagcccagcgccgatttgctcgtcaatttatcacgctgccgaagactcatcgtggtgctttcggacgcgttcctatctcgtgcttggtgctcacactctttccgcgaaggactctgtcggctcctagaactcacacggcgaccgatttttataacgtttgaaggacaacgcagagaccctgcccacccagctctaagactgttacgacagcacaggcacctcgtcacgctgcttctttggcgtcctgggtcagtgaccccaagctctgatttctggaaagaagtgcagctagccttgccacgcaaggtccagtatcgacccgtagagggagacccccagacccagctgcaagacgacaaagatccgatgctcattctgagaggacgcgtgccggaaggaagagctctcgacagcgaagtagacccagacccagaaggtgacttgggtgtgcgaggtcctgttttcggagagccctcagctcctccccacacatctggtgtgagtttgggggaatcccgctcctccgaggttgacgtcagtgatcttgggtcccggaattatagcgcccgaacggacttttactgcctggtctcgaaggatgacatgtag

SEQ ID NO: 205232 - DNA, 1233 bp, synthetic construct
  misc_feature 1..1233: note = Description of Artificial Sequence: Synthetic coding sequence
  source 1..1233: mol_type = other DNA
atgcccggcgtgtgcgaccgggcccccgacttcctgagccccagcgaagaccaggttttacggccggcgctaggcagcagtgtggccttgaattgtacggcatgggttgtgtccggcccacattgcagtctccctagcgtgcaatggttaaaggatgggctccccctcgggattggcgggcattactcactgcatgagtactcatgggtgaaggcaaacctctcagaggtgctggtgagtagtgtcctgggagttaacgtcacatcgaccgaggtttatggcgcattcacatgttccattcagaatatatctttcagttccttcacactgcagagggccggccccacatctcatgtggccgcagtgcttgcaagtctcctggtactgctcgcactgctgctggcggccctcctctacgtcaaatgtcggctgaatgtactgctgtggtatcaggatgcatatggagaggtggagattaacgatgggaaactatacgacgcatacgtgagctattcagattgcccggaagaccgaaaatttgtaaactttatcttgaagccacaattagaacgcagaagaggatataagttgtttctcgatgaccgggacctccttcctcgggctgaaccatcggcggacctcctagtgaacctttctagatgccgaaggcttattgtggtattgagtgacgcattcctgtcacgagcatggtgctcccacagctttcgcgagggcctgtgtcggctcctcgagctgacaagacgaccaatatttatcaccttcgagggccaaagaagggatcccgcacaccccgctctgaggcttctgaggcaacaccggcacctggtgaccctccttctatggcgccccggaagcgtgacaccttcttctgatttctggaaggaggtccagctggccctgccacgcaaagtgcagtacagacctgttgagggagacccacagacgcagttgcaggatgacaaagaccccatgctaatcttaagagggcgcgtgccggaaggtcgggcactggacagcgaggtggaccctgatcctgaaggagacttgggagtgcgagggccagtgtttggcgaacctagcgctcccccccatacaagcggcgtttccttgggtgagtctaggagttccgaggtagatgtttccgaccttggatccaggaattattctgctaggaccgatttttactgtctggtgtccaaggatgacatgtag

SEQ ID NO: 205233 - DNA, 1515 bp, synthetic construct
  misc_feature 1..1515: note = Description of Artificial Sequence: Synthetic coding sequence
  source 1..1515: mol_type = other DNA
atgcccggcgtgtgcgaccgggcccccgacttcctgagccccagcgaggatcaagtgttgaggcctgcattgggttcatcagtcgctctgaattgcactgcctgggtcgtcagcggaccccattgttccctcccttcagtccagtggctgaaagacggtttaccactgggcataggagggcactactccctgcatgagtatagctgggtgaaggcgaatctgtctgaggtactagtgagctccgtgctgggggtaaacgtcaccagcacggaggtgtacggcgcgttcacttgttccattcagaatatatccttctctagtttcactctccagcgagccgggcctacttcacacgtagccgccgtgctggcaagcctgctggtcctacttgcgttattactcgctgccttgctctacgtaaaatgcagattgaacgtgctgctgtggtaccaagacgcctacggagaagttgagattaatgatggcaaactttatgatgcttatgtctcgtactctgactgtcctgaagaccgaaagtttgtgaatttcattctgaagccccagctggaaagaaggcgcggctacaagttgtttttagacgatagggatctgttgcctagagcagagccatccgcggatctcttggtcaatcttagcagatgcaggagactgattgtggtgttatccgatgcgttcctgtctcgtgcgtggtgctctcacagctttcgggagggcctctgccgattactcgagctgacccggaggcccatctttataacatttgagggtcaaagacgggatccagcacacccggctttgaggctgctccggcagcaccgccacctagtgaccctgctgctgtggcgtcctgggtcggtaacaccttcatccgatttttggaaggaggtgcagctggccttacctcgaaaggtgcaataccgaccagtggagggagaccctcaaacacaactacaagacgacaaagacccaatgctaatactgcggggaagggtgcctgaaggcagagctctggattcagaggtggatcccgatccagaaggtgatttaggcatgccagcccagccccactctcccactggagaagcccaacacagggccgagtggggtcaggctcagggtaccgggcccgggggagccccaggtgttgaagattcatcccgacaccgggaacccctgcacggattatgccctggcggggcccgcccaagcgtttgccttggcacttcctgggccagtcaagcaattaccgccggcggtgaacagggccagcctctcgccgtgggtttaggccagggatgtggctggcccccacaggcaagccggagtcctcaccctcgctgccctggcgcctgtctctggcgcgctattagtagcaccgctcaccagtggggcttagccgggagagagcccgagcagaggagcggcagattaggctctcgcttagcgaagttgcagtgcccccatcggctgcttcttcctggggttcaggggtag

SEQ ID NO: 205234 - DNA, 1107 bp, synthetic construct
  misc_feature 1..1107: note = Description of Artificial Sequence: Synthetic coding sequence
  source 1..1107: mol_type = other DNA
atgttcgccaagggcaagggcagcgccgtgcccagcgacggccaggcaagggaaaagctggccctgtacgtgtacgagtatcttctgcacgtcggtgctcagaaaagtgctcaaacattcctgtcagagattcgatgggaaaaaaacatcacgctgggcgagccgcccggatttctgcacagctggtggtgcgtcttctgggatctatattgcgccgcgccagagagacgggacacatgcgagcacagctctgaggccaaagcttttcacgattacagcgccgcagcggcgcccagccccgtgttgggcaatattccgccaaatgatggcatgcctgggggcccaatcccacccgggttcttccagggccctcccggctcacaaccgtccccgcacgctcagcctccgccgcataaccccagctcaatgatgggccctcacagccaaccacccggaggagtgccaggcacccaacctctgctgcccaattcgatggaccctaccaggcagcagggacacccaaacatgggggggtctatgcagcgcatgaacccacctaggggaatggggcctatgggacctggcccacagaactacggcagtgggatgagaccccccccgaactcattgggacctgcaatgcctggcattaatatgggcccaggggcagggaggccttggcccaatcctaactctgccaactctatcccatacagttcatcgtcgccaggaacctacgtaggaccaccagggggcggtgggcccccaggaacacctattatgccgagtccagcagacagcaccaactcttctgataatatctacacgatgattaatccggtgccacctgggggtagccggtcaaactttccgatgggtccagggtctgatggccctatgggcggtatggggggcatggagccccaccatatgaatggatctctcggttctggagacatcgacggccttccgaaaaacagtcccaataatatttcaggtattagcaacccccccggtacaccccgagacgatggagaactaggagggaacttcctccattcgttccaaaacgacaactacagtccaagcatgacaatgagtgtgtag

SEQ ID NO: 205235 - DNA, 1086 bp, synthetic construct
  misc_feature 1..1086: note = Description of Artificial Sequence: Synthetic coding sequence
  source 1..1086: mol_type = other DNA
atgttcgccaagggcaagggcagcgccgtgcccagcgacggccaggcaagagaaaaattggcgctttatgtgtacgaatacctgcttcatgtaggcgcacagaagtctgcccagaccttcctcagcgagatacgatgggagaagaatatcaccctaggagaaccgcctggatttctacacagctggtggtgcgtgttctgggacttatattgcgcagcacctgaacgtagggacacatgtgagcacagcagcgaagccaaagcgttccacgattactcagctgccgcggctccttcgccggtacttggaaacataccacccaatgacgggatgcctggaggtcccatcccccccgggttctttcagccatttatgtcaccacggtatgctggcggtcctaggccaccaatccgtatgggaaatcagccacctggcggcgtcccgggcactcagcccctcttgccgaattctatggaccccactcgacagcaaggccaccccaacatgggggggtcgatgcaaagaatgaatcccccccgcgggatgggcccaatgggcccaggcccgcagaactatggttccggaatgcgccctcccccgaacagcttaggtcctgcaatgccgggcattaacatgggacctggggctggaaggccctggcctaatccaaactctgctaatagcatcccttactcgtccagttcacctggtacttacgtcggcccaccaggtggcggagggccacctgggacccccatcatgccaagccccgctgatagcactaattcgagtgacaacatctataccatgattaatcccgttcctccaggaggatctcggtccaactttcccatgggccctggatccgacggccccatgggcggaatgggcgggatggaaccacaccacatgaatggctccctgggtagtggggatattgatggtctgcccaaaaacagtccaaataatattagtggaattagtaatccacctgggacgccaagagacgacggtgaactgggtggcaattttctgcattcatttcagaatgacaattactcacccagcatgaccatgtccgtttag

SEQ ID NO: 205236 - DNA, 1167 bp, synthetic construct
  misc_feature 1..1167: note = Description of Artificial Sequence: Synthetic coding sequence
  source 1..1167: mol_type = other DNA
atgttcgccaagggcaagggcagcgccgtgcccagcgacggccaggctcgcgagaagttagccctatacgtatacgagtacttattgcacgtcggtgcacagaagtccgcacaaaccttcttatctgagattagatgggagaagaacattacattgggcgaacctcccgggtttcttcattcgtggtggtgcgtattttgggatttatattgtgccgccccagaacggcgcgacacgtgtgagcactcttctgaggctaaagccttccatgactattccgccgccgccgctccatcccctgtcctaggaaacatacccccaaatgatggaatgcccggaggcccaattccacctgggtttttccagggacctcccgggtcccagccgagtccccacgcacagccaccaccacataatccttcttctatgatgggcccacacagccagccgtttatgtcccctagatatgcaggtgggccccggccccctatcaggatggggaatcaacccccagggggtgttcccgggactcagcctctgcttccaaactccatggaccccactcgtcagcagggtcatcccaacatgggcggatccatgcagaggatgaacccgccccgcggcatgggacccatgggccccggaccccaaaactacggcagtggaatgcgcccaccgccgaactctcttggaccggctatgccggggatcaatatgggacctggagcagggaggccatggcctaaccccaatagtgcgaactctatcccatattcaagttcctcaccagggacctacgttggcccacccggcggaggcggcccaccgggaacccctattatgccttcaccagcagactctaccaatagctccgataacatctacacgatgatcaaccccgtacctcctggcgggtccagatcaaatttccccatgggccccgggagcgacgggcccatgggcggtatgggcggcatggagcctcaccacatgaatggcagtctcggatcaggagatatcgatggccttccaaagaactcccccaataatatctccggcatttcaaaccctccgggcacccctcgggatgacggagagctcgggggaaattttcttcacagtttccagaacgataattattcgccctctatgacaatgagtgtatag

SEQ ID NO: 205237 - DNA, 837 bp, synthetic construct
  misc_feature 1..837: note = Description of Artificial Sequence: Synthetic coding sequence
  source 1..837: mol_type = other DNA
atgcccggcggccccatcccccccggcttcttccagggcccccccggatctcaacccagtcctcacgcccaacctcccccacacaatcctagcagcatgatgggcccacacagtcagccatttatgtcacctaggtatgccggaggccccagacccccaattaggatgggcaatcaacctccagggggagtgccgggaacccagcctttgctacctaattccatggaccctacccgtcagcagggccatcccaacatgggcggcagtatgcaacgcatgaacccgcccaggggcatggggccgatgggcccgggaccgcagaactacgggtctggcatgcgcccaccccccaattcacttggacctgccatgccagggattaatatgggcccgggcgccggtaggccctggccaaatcccaacagcgctaacagtattccctacagcagcagttcgccagggacctatgtggggcctcctggagggggcgggccgcctggcactccaatcatgccttctccagcggacagcacaaattccagtgataatatttatacaatgatcaatcccgttccccccggcggttctagatcaaatttccccatgggtcctggtagtgatgggcctatgggcggtatgggcggtatggaaccccaccatatgaacggcagcctcgggtccggtgatatagacgggttgccaaagaatagccccaacaacatcagcggcatttccaatcccccagggacgccaagagatgatggggaacttggcgggaatttcctccatagcttccagaatgataactacagtccctcgatgaccatgtctgtgtag

SEQ ID NO: 205238 - DNA, 471 bp, synthetic construct
  misc_feature 1..471: note = Description of Artificial Sequence: Synthetic coding sequence
  source 1..471: mol_type = other DNA
ccccccggcggcgtgcccggcacccagcccctgctgcccaacagcatggacccaacccgacagcagggacacccaaacatgggcggaagtatgcagagaatgaatccaccgcgtgggatgggacccatgggacctgggccacaaaattacgggtcagggatgaggccaccacccaacagccttggtcccgctatgcccggaattaatatgggacctggcgctggtaggccatggcctaaccctaattccgctaattctattccttattccagctcctcacctggcacttacgtcggtcctccaggcgggggcggaccacctgggactcctatcatgccaagtccggcggactctactaattctagcgacaacatctacactatgatcaatccggtgccccctgggggtagcaggagcaatgtttccctgctaagcaataacctccacattcggcaccacaacaagtcatag

SEQ ID NO: 205239 - DNA, 1158 bp, synthetic construct
  misc_feature 1..1158: note = Description of Artificial Sequence: Synthetic coding sequence
  source 1..1158: mol_type = other DNA
atgtacgccaagggcggcaagggcagcgccgtgcccagcgacagccaggctcgggagaaactggccctgtacgtgtacgaatatctgctgcacatcggagctcaaaaaagtgcccaaactttcctgtccgagattcgttgggaaaaaaacatcacgctgggagagccccctggcttcttgcacagctggtggtgcgtgttctgggatctttactgcgccgcgcccgaccgcagagaagcatgtgagcacagcggggaggcaaaggcctttcaggactattccgcggctgccgccccaagcccagtgatgggctctatggctcctggtgacacaatggccgctggatctatggccgcaggtttcttccagggtcctcctgggtctcagccttcacctcataaccctaacgcgcccatgatgggtccgcatggtcagcctttcatgtctccaagattccccggcggacccagacccacccttcgcatgcccagccagcctccggctggactccctggctcccagccacttctgccaggcgccatggaaccaagcccgcgggcgcaagggcaccccagtatggggggccccatgcagcgtgtgactccgcctcggggcatggcgtccgtgggcccccagtcctacgggggcgggatgcgcccccctccaaactccttggccggacccggactgccggccatgaatatggggccaggggtacgggggccctgggcgagcccctccggtaatagtattccctactcttcatcatctcctggcagctacactggaccgccggggggcggggggccccctggcaccccaattatgccctcaccaggggacagtactaactcctctgagaatatgtacacgatcatgaacccgatcggtcaaggcgccggacgtgccaactttcctctggggcctggccctgaagggcctatggcagccatgagtgccatggagcctcaccacgttaacggctcattgggaagcggcgacatggacggccttcctaagtcgagtccaggagccgtcgctggactgtcaaacgcacctggcacacctagggatgacggagagatggccgcggctggaacattcctccatcctttcccaagtgaatcttattctcccggcatgaccatgagtgtttag

SEQ ID NO: 205240 - DNA, 1092 bp, synthetic construct
  misc_feature 1..1092: note = Description of Artificial Sequence: Synthetic coding sequence
  source 1..1092: mol_type = other DNA
atgtacgccaagggcggcaagggcagcgccgtgcccagcgacagccaggctagggaaaaactggcactgtacgtctacgaatacctgctgcacatcggggcccagaagtccgctcagacattcttatcagagatcaggtgggaaaagaacattactcttggagaaccccctgggttcctacacagttggtggtgcgtgttttgggatctgtactgcgctgctcccgatcgtagagaagcctgtgagcattccggtgaagccaaggcatttcaagattacagcgccgctgcagccccctcgccagtgatgggcagcatggccccaggagacaccatggctgcgggtagcatggctgccgggtttttccagcccttcatgagcccccggttcccaggcggtccgagaccaacactgagaatgccctcccagcctcctgccggacttccaggctctcagccactgcttccaggagcgatggaaccatcccccagagcacagggacatccgtctatgggaggacccatgcagagggttaccccgccacggggcatggcctccgtgggcccccagtcgtatggaggaggcatgaggccaccgcctaactcactagctgggcctgggctgcctgctatgaacatgggtccaggtgtacggggtccctgggcgtctccatcaggtaactctataccctattcttctagctcacccggatcttataccggaccaccagggggtggcgggcctcccggaacaccgattatgccgtcacctggggacagcacaaatagctccgaaaacatgtacaccattatgaaccccattggtcagggagcggggcgtgctaatttccctttgggccctgggcccgagggccctatggctgctatgtcggctatggagcctcaccatgtcaatgggagccttgggtcaggcgacatggacggcctgcccaaatcatctcccggcgcagtggctggactgagtaacgcacctggaacacctagggatgacggtgaaatggccgcggctggaacatttctgcatccatttccaagtgagtcttactctcctggcatgactatgagtgtttag

SEQ ID NO: 205241 - DNA, 2301 bp, synthetic construct
  misc_feature 1..2301: note = Description of Artificial Sequence: Synthetic coding sequence
  source 1..2301: mol_type = other DNA
atgaaggagaagagcaagaacgccgcccggacccggcgggagaaggaaaatagcgagttctacgaactggctaaactgttaccattgcccagcgcaattaccagtcaactggataaggccagcatcatacggctgacaacgagttacctgaagatgcgggtcgtatttcccgaggggctgggagaggcttggggccatagctcaagaacctcgcccctcgacaatgttggccgtgaactgggaagccacttactgcagacattggacggctttatttttgtcgtggcaccagacggcaaaatcatgtacattagcgagacagcctcagttcaccttggtctgtcccaggtagagctgaccggcaactctatttatgagtatattcatcctgctgatcatgacgagatgactgcggtgcttactgcccaccagccgtatcattctcacttcgtacaagagtacgagatagagaggagtttcttcctacgaatgaagtgcgtgctggctaagaggaacgcgggcctcacatgtggcggatacaaggtgattcactgctccggttatctcaaaatcagacagtattcgttggatatgtcgcccttcgacggttgttaccaaaacgtgggcctggtggcagtcggccacagtctgcctccttctgcagtcaccgaaatcaagctacattctaacatgttcatgttcagggccagcctggacatgaaactgatttttctggacagtagagttgcagaactgacggggtatgaaccccaggatctgatcgagaaaaccctgtatcaccacgtgcatggctgtgatacctttcatttacgctgcgctcatcatctcttgctcgtgaaaggtcaagtgacaaccaagtactaccggttcttggccaagcacgggggctgggtttgggttcagtcctatgcaacaattgtgcataactcacggtcctctcgtcctcattgcattgtgtcagtgaactatgtactgacagacactgaatataagggccttcaattgtccctggatcaaataagtgctagcaagcctgctttctcgtatacctctagttcgaccccaactatgacagacaaccgcaaaggagcaaagagtaggttgtcaagcagcaaatcaaagtccagaacctccccctatccacagtactcaggctttcataccgagcgctcagaaagcgaccacgacagtcagtggggtggttccccactgacggacaccgcatcacctcagctcctcgatcccgccgacagacccggaagtcagcacgacgcatcatgtgcctatcggcagttcagcgatcgatcctcactgtgctatgggttcgctctggaccactcccggctcgtagaggagcgtcacttccatacccaagcatgtgaaggtgggcggtgcgaagccggtcggtactttttaggtacaccccaagccggccgggagccatggtgggggtctagagcagcgctcccacttacaaaagctagcccagagtcaagggaggcgtacgagaacagcatgcctcatatagctagcgtccaccgcatccatggtagaggtcactgggatgaggattcagtggtcagttctcccgatcctggctccgcgagtgagagtggagaccggtatagaaccgaacagtaccagtcctctccccatgagcccagtaaaatcgagacgctcataagagcgacacagcaaatgatcaaggaggaggaaaataggctgcagcttcgcaaggctcccagtgatcagctcgcgtccattaacggagcaggtaagaaacactcgctgtgctttgccaactatcagcaaccaccaccaaccggagaagtctgccacggtagtgctcttgctaacacatctccatgtgatcacattcagcagcgcgagggtaaaatgctttcgcctcacgagaatgactacgataattcaccgacagccctgagcaggatatcatcccccaactcagaccggatcagcaagtcaagtttaatacttgccaaagactacctgcacagcgacattagcccgcatcagacggccggcgaccaccccactgtgagccctaattgttttggttcccatcgccagtatttcgataagcatgcgtacacactgaccgggtatgcccttgaacacctctatgacagcgaaaccattagaaattattctcttggttgcaacggatctcacttcgacgttacgagtcacctgcggatgcagccagatccggctcaggggcataagggaacctccgtcatcattacaaatggctcctag

SEQ ID NO: 205242 - DNA, 2301 bp, synthetic construct
  misc_feature 1..2301: note = Description of Artificial Sequence: Synthetic coding sequence
  source 1..2301: mol_type = other DNA
atgaaggagaagagcaagaacgccgcccggacccggcgggagaaggaaaactctgaattctatgaactcgccaaattgctgcccctgcctagcgctatcacctctcagcttgataaagcaagtattattaggctgactacttcatacctgaagatgcgggttgtgtttcctgagggcctcggtgaggcctggggccactcctccaggacatccccactagataacgtgggaagggaactagggagtcacctgcttcaaaccctggacgggttcatattcgtggtggcaccagatggcaaaatcatgtatatctcagagaccgcctcagtgcacctggggctctctcaggtggaacttacgggtaactccatttacgagtacatccacccggctgaccatgatgagatgactgctgtcctgacggcccatcagccatatcactcccattttgtccaagagtacgagatcgaaagatctttttttctccgaatgaaatgcgtgctagccaaaaggaacgctggactgacctgcggaggttataaagttatccattgttccggctatctaaagatacgccagtactcactggatatgtccccgtttgacggttgctaccagaacgtcggtctcgttgccgtgggccactccctcccgccttcagccgtgacagagataaagttgcactccaacatgttcatgttccgcgcaagtcttgatatgaagctgattttccttgactctcgggtcgcagagctgaccggttatgaaccacaagacctgatcgaaaaaaccctgtatcaccacgtgcacgggtgtgacaccttccatttacgctgcgcccatcacctgttgctggttaaaggacaggtcacaacaaagtactatcgatttctggccaagcatggaggatgggtctgggtacagagctacgcaactatcgtacataattcccggtccagtcgcccccactgcatcgtcagcgtgaactatgttctgacagatactgaatacaaggggctccaacttagcctcgaccagatatctgcatcaaagccagcattcagttatacttcctcttctacaccaacgatgacagataataggaagggggccaaatccagactttcaagctcaaaatccaagtcaaggaccagtccttacccgcaatatagtggttttcacaccgaaagatcagagtctgatcatgattcacagtgggggggaagtccactgacggatacagcatcaccccagcttctggaccccgctgatcgccccgggtcccagcatgatgcatcgtgcgcctaccgccagttcagcgacagaagctcattatgttacggatttgctctggaccactcgcgcctagttgaagagcggcactttcacacgcaggcatgcgaagggggacggtgcgaagccggacggtattttctgggtacgccacaggccgggcgggagccatggtggggatcaagagccgcactccccctgacaaaagcctccccggagtcccgcgaagcctatgagaactctatgccccacatcgccagcgttcataggatccatggccgaggacactgggatgaagattccgtggtgtcgtctccagatcctggaagcgcttcagaaagtggcgaccgttaccgcacagagcagtaccaatcctccccccacgagcccagcaaaatcgagaccctaatcagagctacgcagcagatgataaaggaggaggaaaaccggttgcagctgcggaaggccccctccgatcagctggcatccattaatggcgccggaaagaaacattccctgtgcttcgctaactaccagcagccccctcctacaggcgaagtgtgtcacggctccgcccttgcaaatacctccccttgtgaccatatccagcagcgcgaaggcaagatgctgtccccccacgaaaatgactacgataactctcccactgctctgagccggatttcctcaccaaattcagataggattagtaagtcatcactgatcctcgccaaggattacctacattccgatatttccccgcatcagactgcaggtgaccacccgaccgtgagtccaaattgtttcggaagccaccgacagtacttcgataagcatgcttacacgctaactggctatgcacttgagcacctctacgacagcgaaaccatacggaactacagcctgggatgcaatggctcccacttcgatgtgacttcacacctgcgcatgcagcccgatccagcccaggggcacaagggaacaagcgtcattatcaccaacggcagctag

SEQ ID NO: 205243 - DNA, 2004 bp, synthetic construct
  misc_feature 1..2004: note = Description of Artificial Sequence: Synthetic coding sequence
  source 1..2004: mol_type = other DNA
atgaaggagaagagcaagaacgccgccaagacccggcgggagaaggagaatggggagttctacgaattagctaagctgttgccactgccaagcgctatcacctcccagttagacaaggcatctattataaggttgacaacttcctacctgaagatgcgtgccgtgttccccgagggcctgggggacgcctggggacagcccagcagggccgggccactggacggggtggccaaggaacttgggtcccacttactgcagacactggatggttttgtgtttgtcgtggccagcgatggcaagatcatgtacatatccgaaacagcctcagtgcacttagggttgtcacaggtagagctgactggcaactctatctatgagtatattcacccaagcgatcatgacgaaatgaccgccgtgctgaccgcccatcagcctctacatcaccatctcttacaggagtatgagattgagaggagtttttttctccgaatgaagtgcgtgctggcaaagaggaatgcgggccttacttgttcaggttataaagttatccattgttcaggctatttaaagatccgccagtatatgctggacatgtcactgtatgacagctgttaccagatcgtggggctggtggccgtgggccaatcgctcccccccagtgcaatcacagagatcaaactatacagtaatatgtttatgtttagagctagtctggacttgaaactgatctttttggactcccgggtcaccgaagtgacaggctacgagccccaggatcttatagaaaagaccctgtaccaccacgttcacggatgtgacgttttccacctgagatacgcacaccatctcctactcgtgaaaggccaagtgaccactaagtattaccgattgttaagtaagagggggggttgggtgtgggtgcaatcgtatgccacagtcgtgcataactctagaagctcccgacctcattgcatcgtgagtgtgaactacgtattgacagaaatcgaatacaaagagcttcagctctctctggagcaagtgagtacagctaagtcccaggacagttggcggacagccctgtccacatcacaagaaacaaggaagctcgtcaagccaaagaatacgaaaatgaaaaccaagctgcgcacaaacccgtatcccccccagcagtactcttccttccagatggacaaattagaatgtggtcagctcggcaactggcgcgcctctccgcccgcatctgcagccgcccctccagagctgcagccccacagtgagtcttccgacctgctgtacaccccaagctattcacttccattctcatatcactatggccatttccccctggacagccacgtcttctcaagtaagaaaccaatgctccccgctaaatttgggcaacctcaagggtctccttgtgaagtagctaggtttttcctgagcacccttcccgcaagcggagagtgccagtggcactatgcgaacccgttggtgccttcctcaagcagcccggccaaaaaccctccagaaccgcctgcgaacacagcaagacacagcctcgtaccatcctacgaggcaccggccgcggccgtccgcagattcggagaggatacagcccctccatcttttccgtcctgtggtcactatagggaggagccggcgctcggccctgccaaggcagctagacaggccgcgagagacggagctcgcctcgctctcgccagggcggcccccgaatgctgcgctccccccacacctgaagcgcctggcgcaccagcccagctaccctttgtcctgctgaattaccatagagtattagcacgacgtggaccactggggggggcagctccagcagcatctggcctggcatgtgcccccggtgggcccgaggccgctacaggtgccttaagactgagacacccatccccagcagccactagcccacccggtgctcctttgccacattacctgggagcctccgtaatcatcacaaatggacgctag

SEQ ID NO: 205244 - DNA, 1713 bp, synthetic construct
  misc_feature 1..1713: note = Description of Artificial Sequence: Synthetic coding sequence
  source 1..1713: mol_type = other DNA
atgaaggagaagagcaagaacgccgccaagacccggcgggagaaggagaacggggagttttacgagttggctaaactgctccccctcccatctgctatcaccagccaactcgacaaggcttccattattcggctcaccacaagctaccttaagatgagagcagtctttccagagggcttaggtgatgcttggggacagccgagccgggccgggccactggatggtgtggcgaaggaactgggaagccaccttttacagacccttgatgggttcgtctttgtggttgcgagtgacggtaaaattatgtacatcagtgagacggcgtccgtgcacttaggcctgtctcaggtggagctgaccggaaacagcatctacgaatacattcacccaagcgatcatgatgagatgacagcggtcctcaccgcgcatcagcctcttcatcaccatctgctccaggaatacgagatagaacgaagcttctttctgaggatgaaatgtgtgttggccaagagaaacgcaggtctgacatgttctgggtacaaggtgattcactgttccgggtacttgaaaatccgacagtacatgctggatatgtccctttacgatagctgttatcagatcgttggcctcgtggcagtgggccagtctctgccaccaagcgccattaccgaaattaagctctactccaacatgttcatgttccgggcatctctggatctcaagttgatctttctagattctcgggtgaccgaggtgactggatacgagccacaagatttaatcgaaaaaactttataccaccatgtgcatggctgcgatgtgttccatctgcggtacgcccaccaccttctccttgtgaaaggacaggtaacaaccaaatactataggctcctctcaaagcgtggtggatgggtctgggtgcagtcttacgccacggtcgtgcataatagtcgctcttccaggccccactgtatcgtgtcagttaactatgtgttgaccgaaattgagtataaagagctacagcttagcctcgagcaggtgagtaccgctaaatcccaggattcttggagaacagcactctctacatcccaggaaactcggaagctggtgaagccgaagaacacaaagatgaagacaaagttgcggacaaacccttatcctccccaacaatactcaagttttcagatggataaactcgaatgcggccagctcggcaattggcgtgccagccccccagcctccgcagccgcacccccagagttgcaacctcacagcgaaagttccgacctgctctatactcccagctattcactcccattctcttaccattacggccacttccctctggactcccacgtatttagttctaaaaaacctatgctgcctgctaagttcgggcagccccagggttccccttgcgaagtagctaggttcttcctgtcgaccctgccagcctcaggggaatgtcagtggcactatgctaatccacttgtcccctctagcagtagccctgcaaagaaccccccggagcccccagccaacaccgcacgacactcactggtccctagttatgagggaggcagtggcctcctggtgggaaaagtagggggtctgaggaccgctggctcgcggagttcacatgggggaggatggcagatggagactgaaccaagtaggtttgggcagacctgtcccttgtcggccagcaagtag

SEQ ID NO: 205245 - DNA, 447 bp, synthetic construct
  misc_feature 1..447: note = Description of Artificial Sequence: Synthetic coding sequence
  source 1..447: mol_type = other DNA
atgttccggcggcccgtgctgcaggtgctgcggcagttcgtgcggcacgaatccgaaaccacaacctcattagtcctggaacgcagtctcaacagggtgcacttactggggcgggtcggccaggaccccgtgctccgccaagttgagggcaaaaatcccgtgacgatattctccttagccaccaacgagatgtggcgcagcggcgatagtgaagtttatcaactcggcgatgttagccagaagacgacttggcacagaatctccgtgtttagaccaggcctacgggacgtcgcgtatcagtacgtgaagaaagggagccggatctacttagagggcaaaatcgactacggagaatatatggataagaacaatgtgcgcaggcaagctaccacaataattgcagataacataattttcctgtcagaccagactaaggaaaaggaatag

SEQ ID NO: 205246 - DNA, 366 bp, synthetic construct
  misc_feature 1..366: note = Description of Artificial Sequence: Synthetic coding sequence
  source 1..366: mol_type = other DNA
atgttccggcggcccgtgctgcaggtgctgcggcagttcgtgcggcacgagtcagagaccacaacatccttggttctggagcgttctctcaatcgcgtgcacctgctagggagggtaggccaggaccccgtgctgcgtcaagtggagggcaagaatccggtgaccattttctccctggcaactaatgagatgtggcggagtggagatagcgaagtttaccagctgggagacgtgagtcaaaagacgacctggcaccgaataagtgtgttccgccccgggctgcgtgatgtggcatatcagtatgtcaaaaaaggctcccgcatttatctggaggggaaaatcgattacggagagtacatggattag

SEQ ID NO: 205247 - DNA, 447 bp, synthetic construct
  misc_feature 1..447: note = Description of Artificial Sequence: Synthetic coding sequence
  source 1..447: mol_type = other DNA
atgttccggcggcccgtgctgcaggtgctgcggcagttcgtgcggcatgaatcggaaacaaccacaagcctcgtgctagagaggagcctgaatcgcgtgcacctgctcgggagagtgggccaggatcccgtgctccgtcaggtggagggcaaaaatcccgtcactattttctccctcgccaccaacgaaatgtggcggtcaggcgattcagaagtttatcagctgggagatgtgtcccagaagacaacgtggcatcgaatttctgttttccgccctgggttgagggatgtcgcttatcagtacgtgaaaaaaggatccaggatttatctggagggaaaaatagattatggagagtatatggataagaacaacgttcggaggcaagcaacgaccatcatcgccgataatattatatttctgtcagaccaaactaaggagaaggaatag

SEQ ID NO: 205248 - DNA, 408 bp, synthetic construct
  misc_feature 1..408: note = Description of Artificial Sequence: Synthetic coding sequence
  source 1..408: mol_type = other DNA
atgttccggcggcccgtgctgcaggtgctgcggcagttcgtgcggcatgagtctgagactacgacttctctggtcctggagaggagtctgaatagggtgcatctgctgggccgtgtagggcaggaccccgttttacgacaggttgagggcaagaatcccgttaccatcttcagcctggccaccaacgaaatgtggcggagtggagattcagaggtgtatcagcttggcgatgttagtcagaaaaccacatggcatagaatctctgtgtttcgccccgggctgcgggatgttgcctaccaatatgtgaaaaaaggatccagaatttacttggaggggaagatcgattatggagagtacatggacaagaataacgtgcgtagacaagctaccacgatcatcgccgattag

SEQ ID NO: 205249 - DNA, 87 bp, synthetic construct
  misc_feature 1..87: note = Description of Artificial Sequence: Synthetic coding sequence
  source 1..87: mol_type = other DNA
atgttccggcggcccgtgctgcaggtgctgcggcagttcgtgcggcacgagagcgaaacgaccacatccctggttttggagagatag

SEQ ID NO: 205250 - DNA, 447 bp, synthetic construct
  misc_feature 1..447: note = Description of Artificial Sequence: Synthetic coding sequence
  source 1..447: mol_type = other DNA
atgttccggcggcccgtgctgcaggtgctgcggcagttcgtgcggcacgagtcggaaacaacaacgagtcttgtgctggagagatcccttaatcgggttcaccttctgggccgcgttggccaggaccccgtcctgcgccaggttgaggggaaaaatcctgtcaccatcttctcactagccaccaatgagatgtggcgatctggagattccgaggtttaccaattaggagacgtgtctcagaagaccacctggcacaggattagcgtgttccgccccggactaagggacgtggcgtatcagtatgtgaagaaagggtctaggatatacctggagggcaagatcgattatggtgaatatatggacaagaataacgtaagacgtcaagccaccactataatagctgacaacatcattttcctgtcagaccagacaaaggaaaaagaatag

SEQ ID NO: 205251 - DNA, 447 bp, synthetic construct
  misc_feature 1..447: note = Description of Artificial Sequence: Synthetic coding sequence
  source 1..447: mol_type = other DNA
atgttccggcggcccgtgctgcaggtgctgcggcagttcgtgcggcacgaaagcgagactacaaccagcctcgtgctggagcgatccctgaacagagtgcacttgctcggaagggttggccaggaccctgtgctcagacaagtcgagggtaaaaaccccgtcaccatcttttctctggctaccaacgaaatgtggcgaagcggagacagtgaggtgtaccagctaggagacgtgtcacagaagaccacatggcacagaataagtgtattccgccccgggttacgggatgtggcctatcaatacgtcaaaaagggctctcgcatctatctggaggggaaaattgattatggagaatatatggataagaacaatgtacggcgccaggccaccacaataatagcggataacattatctttctgagcgaccagactaaagaaaaggagtag

SEQ ID NO: 205252 - DNA, 447 bp, synthetic construct
  misc_feature 1..447: note = Description of Artificial Sequence: Synthetic coding sequence
  source 1..447: mol_type = other DNA
atgttccggcggcccgtgctgcaggtgctgcggcagttcgtgcggcacgaatccgaaacaactacttccctcgtcttagaaaggagtctgaaccgtgtccatctgctgggtagagtcgggcaagatccagtgttgagacaggtcgaagggaagaatccagtgaccattttctccctagctacaaacgagatgtggcggagcggcgactccgaggtttaccaactcggcgatgtgtcccagaagactacctggcaccgcatatctgtgtttcgaccaggcctgcgggacgttgcctatcaatacgtgaaaaaggggtcgcgcatctacctcgaggggaagatcgattatggagagtatatggacaaaaataacgtgcgcaggcaagctactactataatcgcggacaatatcattttcctgagcgatcaaactaaggaaaaggaatag

SEQ ID NO: 205253 - DNA, 1086 bp, synthetic construct
  misc_feature 1..1086: note = Description of Artificial Sequence: Synthetic coding sequence
  source 1..1086: mol_type = other DNA
atgtacggcaagggcaagagcaacagcagcgccgtgcccagcgactctcaggcacgcgaaaagctggcactgtacgtgtatgagtatttgttgcacgtgggtgcacagaagtcagcccagacctttctttcagagatccggtgggaaaaaaatattacgctgggcgaacctcctggattcctgcattcctggtggtgtgtgttctgggacctttactgcgccgctccagagaggcgcgaaacttgcgagcatagttctgaggcgaaagcatttcatgactactctgccgctgccgctcctagcccagttctaggcaacatcccacccggcgatggcatgcccgttggacccgtgccaccaggctttttccagccattcatgagcccccggtacccaggtggtccaagacccccactgagaatcccgaatcaggcactgggaggtgttccaggaagccagccactgctgccatccggcatggaccccactaggcagcaggggcatcctaacatgggcggaccgatgcagcggatgactccccccagaggtatggttccactgggcccccagaattatgggggagctatgcgtccgccactgaatgctctggggggcccagggatgcctggtatgaacatgggcccgggaggtggccgtccctggccgaatccgaccaacgccaattctatcccatacagttcagcgtctcccggtaattacgttggtccccccgggggaggggggccgccaggcacacccattatgccctccccagccgactcaacgaactcaggcgataatatgtacactctcatgaatgccgttcccccaggccccaaccgacccaactttccgatgggacctggcagtgatggtcccatgggcggactcgggggcatggagtcacaccatatgaatggcagtctcggaagcggagatatggatagcattagtaaaaactctccaaacaacatgagtctgagcaatcaaccaggcacccctcgagatgatggtgagatgggggggaattttttaaacccctttcagtccgagtcctactcacccagtatgactatgtctgtgtag

SEQ ID NO: 205254 - DNA, 945 bp, synthetic construct
  misc_feature 1..945: note = Description of Artificial Sequence: Synthetic coding sequence
  source 1..945: mol_type = other DNA
atgggcaagaacatcaccctgggcgagccccccggcttcctgcactcctggtggtgtgtgttttgggacctctactgcgctgcacctgaacgccgggagacatgcgaacatagttctgaagcgaaggcatttcacgattactccgcagctgccgcaccatcccctgtgctgggcaacattcctcctggagatggcatgcctgtaggacccgttcctcccggattttttcagcctttcatgtcccctcgttatcccggcggtccgcgcccacctcttcgcatccccaaccaggccctcgggggtgttccaggcagtcaaccactcctgccttccggaatggacccaacgcgccaacaggggcatcctaatatgggcggacctatgcagagaatgaccccaccccgagggatggttcctctggggccacagaattacggaggagctatgcggcctccattgaatgcacttggcggtcctggcatgccaggcatgaatatgggtccagggggaggtaggccatggccaaaccctacaaacgctaacagcataccttattcaagtgcctcccccggaaactacgtgggaccccccggcggcggcggacccccgggaacacccattatgcccagtcctgctgacagcactaatagcggcgataacatgtacactctaatgaatgccgtgccccccggaccaaataggccaaactttccgatgggccccgggtctgacggcccgatgggtgggttgggggggatggagagccaccacatgaacggctcactaggcagcggggacatggattctattagcaagaatagccccaataatatgagcctgtctaatcaaccaggcacaccccgggacgatggggaaatgggcgggaatttcctgaacccttttcagtctgaatcttattcaccttctatgacgatgtctgtttag

SEQ ID NO: 205255 - DNA, 1026 bp, synthetic construct
  misc_feature 1..1026: note = Description of Artificial Sequence: Synthetic coding sequence
  source 1..1026: mol_type = other DNA
atgtacggcaagggcaagagcaacagcagcgccgtgcccagcgactcccaggctagagagaagctggccctgtacgtgtacgaatatctgctacatgttggtgctcagaaatccgctcagacattccttagcgaaattagatgggagaagaatataaccttaggcgagccacctgggtttctccattcttggtggtgcgtgttctgggacctttattgcgccgcccccgaacggagggagacttgtgaacactcctccgaggctaaggcgtttcacgactactctgcagccgccgctccatctcccgtgctgggtaacatccctcctggcgacgggatgccagtgggccccgtgcccccaggcttttttcaggcccttggaggcgtgcctgggagtcagcccctgctccccagcggaatggaccccacacgacagcaggggcaccctaatatggggggacccatgcagagaatgacaccaccccgcggaatggttccactcggccctcagaactatgggggtgcgatgaggcctcctctgaacgccctgggcggtcccggtatgccaggcatgaacatgggcccaggcggcggacggccttggccaaatcccacgaatgctaatagtatcccttacagctctgcttctcctgggaattatgttggacccccaggggggggcggaccccctggcacgccaattatgccttcacccgccgattccactaacagcggagacaatatgtataccctaatgaacgccgtgccgccgggacctaatagacccaattttcctatggggcctggaagtgatggccctatgggcggtctcggcgggatggaaagccatcatatgaatggatctctgggctccggagatatggattcaatctctaaaaacagtccaaataacatgtctctttccaaccagcccgggactccccgtgacgatggggagatgggaggcaacttcctcaatccatttcagagcgaatcttattctccaagtatgaccatgtcagtttag

SEQ ID NO: 205256 - DNA, 1200 bp, synthetic construct
  misc_feature 1..1200: note = Description of Artificial Sequence: Synthetic coding sequence
  source 1..1200: mol_type = other DNA
atggccttctggggctggcgggccgccgccgccctgcggctgtggggtcgggtagtggagcgcgttgaggccggaggcggtgtggggccctttcaagcgtgcggatgtaggctcgtgcttggggggcgggacgacgtgtcagcaggactgaggggaagccacggggctcgcggcgagcctttggatccggcgagacccctgcaaagacctccccgcccggaagtaccacgcgcatttcgacgtcagccaagagccgctgccccttcattcttcttttctagcattaaggggggtcgccggtccattagttttagcgttggggcatcatcagtagtcggttctgggggatcctccgataaaggtaaattatccctccaggacgtggcagaactgatacgggccagggcctgtcagcgcgttgtggttatggtgggcgctggaatcagcacgccgtctgggatccctgattttcggagccccgggagtggcctgtatagtaacctgcagcaatacgatttgccctaccccgaggctatcttcgaactgccattcttttttcataacccaaagccctttttcaccctcgctaaagagttatacccagggaattataaacctaacgtgacacactacttcttgcggttgctacatgacaagggcctcctcctaaggttgtacacccaaaacatcgatggcctggagcgcgtgtctggaatccctgcatcaaagctggtagaagcccatggcacatttgccagcgctacatgcacggtttgtcaacgccccttccccggagaagatatccgcgccgacgtaatggccgaccgtgtaccaaggtgccccgtatgtacgggcgtcgttaaacctgatattgtgttctttggtgagcccctgccacagcgatttttgttacacgtagtagatttcccaatggcagacctactgctgatcctcgggaccagcctggaggtagagccgttcgccagtcttaccgaagccgtgagatcctcagtgcccagattgctcatcaaccgagatctcgttggtccactcgcctggcaccccagatcacgagacgtggcgcagctcggcgatgtggtccatggcgtagagagtctggtggagctgctcggttggaccgaggaaatgcgggacctggtccagcgggaaacgggaaagttggatgggcccgacaaatag

SEQ ID NO: 205257 - DNA, 957 bp, synthetic construct
  misc_feature 1..957: note = Description of Artificial Sequence: Synthetic coding sequence
  source 1..957: mol_type = other DNA
atggccttctggggctggcgggccgccgccgccctgcggctgtggggtagagttgtcgagagagtggaggctggtggtggggtcggccccttccaggcctgcgggtgtagacttgtgttgggcggccgtgatgatgacgtggccgaactgatccgagcacgagcttgccagcgcgtagtggtgatggtgggagccggtatttctactccatctggcatccctgatttcaggtcgcctggaagcgggttatacagcaacctgcagcagtacgatctaccctatcctgaagctattttcgagctgccattctttttccacaatcccaaacctttttttacccttgcaaaggagctgtatcctgggaactacaaacctaatgtgactcactattttctgcgtctcctgcatgataaggggttgctgctgcgcctttatacccagaatattgatggtcttgagcgggtgtcggggattcccgccagcaagttggtagaggcccacggaacattcgcgtccgccacttgcacagtctgtcaacggcctttccccggcgaggatataagagcagatgttatggcagatcgcgtcccacggtgccccgtgtgcactggcgtggtcaaacctgacatcgtgttttttggcgagccccttcctcagcggtttctcctacacgttgtggatttcccaatggccgacttgctgctcatacttgggacttctctagaagtggagccttttgcatctctcaccgaagcagtcagatcaagcgtgccccgactgcttattaatagagacctggtgggcccactggcatggcacccacggtctcgggacgtggcccagttaggcgatgtggtccacggggttgagtccctggtcgagctgctggggtggacggaggaaatgcgagacttggtgcagcgcgagaccggtaagttagacggcccagataagtag

SEQ ID NO: 205258 - DNA, 774 bp, synthetic construct
  misc_feature 1..774: note = Description of Artificial Sequence: Synthetic coding sequence
  source 1..774: mol_type = other DNA
atggtgggcgccggcatcagcacccccagcggcatccccgacttccggagcccaggctccggactctacagtaacttacagcagtacgatttgccctaccccgaggccatctttgaactcccattcttttttcataaccccaaaccattcttcacacttgctaaagagctataccctggcaactataagccaaacgttacacactactttcttaggctcctgcatgacaagggcctccttctgcgtctgtatacccagaacattgacggcctggaaagggtatcgggcattccagcctcaaaactagtggaggcacatggcacatttgcaagcgccacatgcacagtgtgtcagagacccttccccggagaggatatcagggcagatgtcatggccgatagagtgccacggtgtcctgtatgtaccggagtcgttaaacctgacatcgtcttttttggggagcccctgccacagagattccttctgcatgtagtggactttcctatggctgacctgctgctgatcctaggtaccagcctagaagtggaaccattcgcctctctgactgaggctgttaggagcagcgtgccccggctgttgatcaacagagacctcgtggggcccctggcttggcatcctcgcagcagggacgtagcacagctcggtgatgtagtgcatggagtggaaagcctggtcgaactgctgggatggactgaagaaatgagagacctcgtccagagggagacaggtaaactcgatggccctgataagtag

SEQ ID NO: 205259 - DNA, 945 bp, synthetic construct
  misc_feature 1..945: note = Description of Artificial Sequence: Synthetic coding sequence
  source 1..945: mol_type = other DNA
atgaagatgagcttcgccctgaccttccggagcgccaagggccggtggattgcaaacccttcacagccctgtagtaaagcaagcatcgggctctttgtacctgcgtccccgcccctcgacccagagaaagtgaaggaactgcagcggttcatcacactgtccaaacgcctcttggttatgacaggagccgggatatctaccgaatcaggcataccagattatcgcagcgaaaaagtgggcctatatgcgcgcaccgatcggagaccaattcaacatggcgattttgttcgaagcgctcccatcaggcagagatactgggccaggaacttcgtggggtggccccagttctcctctcatcagccaaatcctgcgcactgggcactcagtacatgggagaaactgggcaagctgtactggttggtcacacagaacgtcgacgccctgcacaccaaggccggctcgagacgattgactgagttacacggttgtatggacagagtcttgtgcttggattgcggcgaacagactccaaggggagttcttcaggagagatttcaggtgttgaatccgacgtggtcagcagaagcgcacgggctggcccctgacggtgacgtcttcctgtcagaagagcaggttcgttcctttcaggtgcccacttgtgtgcagtgtggcggccatcttaagcccgacgtggtgttcttcggggacaccgtaaaccctgataaagtcgacttcgtgcacaagagggtgaaggaagccgacagcttactcgtcgtgggctcgagtctccaggtatattcaggataccggttcatactcaccgcttgggagaaaaagctgcccatagctattctgaacatcggacctacacgatcggatgacctggcctgtctgaaactgaattcccgatgtggcgagctgctccctctcatcgacccttgctag

SEQ ID NO: 205260 - DNA, 879 bp, synthetic construct
  misc_feature 1..879: note = Description of Artificial Sequence: Synthetic coding sequence
  source 1..879: mol_type = other DNA
atgcggcccctgcagatcgtgcccagccggctgatcagccagctgtactgcggcctaaagccacccgccagtactcgcaatcaaatttgcctgaaaatggcgcgcccctcctcctccatggctgatttcaggaaatttttcgctaaggccaagcacatagtcatcatatccggagccggcgtgtccgctgaatccggagtccccacatttcgcggagccggtggctactggcggaaatggcaggctcaggaccttgctacacccctggctttcgctcacaacccatcacgtgtgtgggagttttaccattaccggagagaagtgatggggtcaaaggaacctaacgctggccaccgcgcaattgccgagtgtgaaaccaggttgggcaagcagggcaggcgggtggtcgtgatcacccagaacatcgatgagttgcatcggaaggctggaacaaaaaacttactggagattcatggatcgctcttcaagacaagatgcactagctgcggggtcgtggcagagaattacaagtcacccatctgcccagctctgagcggtaaaggctgtgaggaagctggctgtggggggttactgcgcccccacgtcgtgtggttcggcgagaatctcgaccccgccatcttggaggaggtggatagagagttagcacactgcgatttatgcctcgtggtggggacaagctcagtggtttaccccgcggccatgttcgccccgcaggtggccgccaggggagtgcccgtggccgagtttaatacagagacaaccccagccacaaacagattcagatttcacttccagggaccttgcggaaccaccctgcctgaggccctggcttgccacgagaatgagacagtgtcttag

SEQ ID NO: 205261 - DNA, 933 bp, synthetic construct
  misc_feature 1..933: note = Description of Artificial Sequence: Synthetic coding sequence
  source 1..933: mol_type = other DNA
atgcggcccctgcagatcgtgcccagccggctgatcagccagctgtattgcggtctgaaaccgcctgccagtacacgcaatcagatctgcctgaaaatggcccggccctcttccagcatggctgactttagaaagttctttgcaaaggctaagcacatagtaatcatctctggtgctggagtgagcgctgagagcggcgtaccaactttccgaggggctggtggatattggcgtaagtggcaggcacaagacctggccaccccgttagcattcgcacataatcccagtcgggtgtgggaattctaccattaccgtagggaagtgatgggctctaaagaacccaacgctggacatagagctatagctgaatgcgagactcggcttgggaaacaggggcgccgcgtggtggtgattacccagaacatcgacgagcttcacaggaaagctggaacaaagaatctgctagaaatccacggatctctgtttaagactagatgcacatcctgcggagtcgtcgctgagaattacaaatctccaatctgtccggcacttagtggaaaaggggccccagagccaggcacgcaggatgcttccatccctgtcgaaaagctgcccaggtgtgaagaggccggttgtggcgggttgttacggccccacgtagtgtggttcggcgaaaatctggaccctgcaatactcgaagaggtcgaccgggagctggcccactgtgacctttgcctcgtagtgggaacttcttctgtcgtctatcctgcagcaatgtttgctcctcaggttgcagctagaggcgtccccgtagccgagtttaataccgagacaacaccagcaaccaacagattcagattccatttccaaggcccttgcgggaccacgcttccagaagcgctggcttgtcatgaaaatgaaactgtgtcttag

SEQ ID NO: 205262 - DNA, 900 bp, synthetic construct
  misc_feature 1..900: note = Description of Artificial Sequence: Synthetic coding sequence
  source 1..900: mol_type = other DNA
atgcggcccctgcagatcgtgcccagccggctgatcagccagctgtactgtgggctgaaaccccccgctagtactaggaaccagatctgtctgaaaatggcccggccatcaagcagtatggccgatttccgcaaatttttcgcaaaggccaagcatatcgtgattattagcggcgccggggtatcagccgagtcgggggtgccgacttttcgcggggccggcgggtattggcggaagtggcaagcccaggatctggcaacccctctagcattcgcccataacccgtctcgtgtttgggaattttatcactaccggcgggaggtcatgggaagtaaagagcctaatgctgggcatcgggctatcgctgaatgtgagactagacttggtaagcagggcaggcgcgttgtggttatcacccagaacattgacgaattgcaccgtaaagccggaacaaagaatttattggaaatccatggctctctgttcaagaccaggtgtaccagttgtggcgttgtcgctgaaaattataaatcccctatatgccctgccctttcagggaagggagccccagaaccggggacacaggatgccagtatccccgtggagaagctgccccgctgcgaggaggctggctgtgggggcctgctccgcccccatgtggtgtggtttggcgaaaatctcgatccagcaatactcgaagaagtggatcgcgagctggcccattgtgacctgtgtctggtggtgggcacctcgtcagtggtgtatcccgcagccatgttcgcaccacaagtggcagcgcggggggtgcccgttgctgagttcaatactgaaaccacccctgctacaaatagattctcacatctcattagtatttctagtctgatcatcatcaaaaactag

SEQ ID NO: 205263 - DNA, 609 bp, synthetic construct
  misc_feature 1..609: note = Description of Artificial Sequence: Synthetic coding sequence
  source 1..609: mol_type = other DNA
atgggcagcaaggagcccaacgccggccaccgggccatcgccgagtgcgaaacacgcttgggcaaacagggtcgtagagtcgtggtgataactcagaacattgatgagctgcatcggaaggcaggcacaaagaatcttctggagatccatggctccctgttcaagactcggtgtacctcctgtggagtggtggcggagaactataagtcacccatttgccccgctctctccggcaagggagcacctgagccggggacccaggacgcgagtatccccgtagaaaaactccctagatgtgaagaggctggttgcggtggcctgctgcgccctcacgtggtgtggtttggggagaatctcgaccccgccatcctagaagaggttgaccgggagctcgcgcactgtgatctgtgcctggtagttgggacttccagcgtggtgtacccagcagctatgtttgccccccaggtggccgcacggggagtgcccgtagcggagttcaacacagagacaactcccgcgaccaatcgatttcgtttccattttcagggaccatgcggtaccactctgccggaggctctggcatgtcacgagaacgagactgtgagctag

SEQ ID NO: 205264 - DNA, 1203 bp, synthetic construct
  misc_feature 1..1203: note = Description of Artificial Sequence: Synthetic coding sequence
  source 1..1203: mol_type = other DNA
atggccgccggcggcctgagccggagcgagcggaaggccgccgagagggtgcgacgactgagggaggagcagcaacgcgaacgtctgcgacaggtgtccagaatcttgcgcaaggccgccgctgaacgatctgccgaggagggaaggctattagcagagagtgctgacttggtcacagagctccagggacgtagcagacgcagggagggcctgaagcgtcggcaggaagaggtttgcgacgaccccgaggaactccggggaaaagtgcgggaactagcctcagctgttaggaacgccaaatatttggtggtttacacgggcgccggtatatctaccgcagcctcgatcccagactaccgtgggcctaatggcgtttggaccctcctgcagaaagggcgtagtgtgtctgctgccgacctgagcgaggccgaacccactttgacacatatgtctatcactcgattgcacgagcagaagctcgtgcagcacgtggtgagtcagaattgtgacggcctgcatctgagatccggcctgccacgcacagccatctccgagctccacggcaacatgtacattgaagtgtgcacctcttgcgtgcccaacagagaatacgttcgggtctttgacgtcactgagcggaccgccttgcaccgacaccagactggccgtacctgtcacaaatgtggaacccaacttcgcgacactattgtccacttcggcgaacgcggtactctcggacagccactgaactgggaggccgcgactgaggcagccagccgagccgatactatcctttgcctgggatcaagcctcaaggtgctcaagaaataccctagactgtggtgtatgaccaagcccccctctagaaggccaaaattgtatatcgtgaaccttcagtggacccccaaagacgattgggcggccctcaaactacacggcaagtgtgacgacgtcatgcgcctgctaatggccgagctcggtctggagattcctgcctactccagatggcaggatcccatcttcagcctcgctacccccctgagagcaggtgaggagggatcacatagtcggaagtcactatgtagatctcgtgaagaagctcctcccggagaccgcggcgccccactctcgtcggcacccatactgggaggatggttcgggagagggtgtaccaagcgaaccaagcgcaaaaaagtgacatag

SEQ ID NO: 205265 - DNA, 963 bp, synthetic construct
  misc_feature 1..963: note = Description of Artificial Sequence: Synthetic coding sequence
  source 1..963: mol_type = other DNA
atgcccggcccccggcggcggagccccagcgcctgcccccaggtgtcacggatcctgcgcaaggctgcagccgagcgtagcgctgaagagggacgtctgctcgctgagtcagcagatctggtgaccgaactgcaaggccgttctcggagaagagaggggctgaagcgcagacaagaggaagtctgcgatgaccccgaagaactgcgaggtaaggtccgcgaactggcgagcgcggtgcggaatgcaaagtacctcgtagtttacacaggcgctggcatcagcactgcggcgtcaatccccgactacagaggacccaacggagtgtggactctattacagaagggtcggagtgtttccgccgccgatctttcagaggcagagccgacgctgacgcacatgtcgatcaccaggcttcacgagcagaagctggtacagcacgtcgtgtcgcagaactgtgacggcctgcacttaaggtctggcttgccgaggactgcgatatcggagctgcatggaaatatgtatatcgaggtgtgtactagttgcgtgcctaacagagaatacgtgcgggtgttcgatgttacggaaagaacggccctgcatcgacatcagacaggacgtacatgtcataaatgtggcactcagctccgggataccatcgtacacttcggagaaagaggcaccttaggacagcctctcaattgggaggctgcaaccgaagcggcgtctcgggcagacactatattgtgtctagggagttcacttaaggttctgaagaagtaccctcgtctgtggtgtatgaccaaaccaccctcacgccgcccgaagctgtacatcgttaacctccaatggaccccaaaagatgactgggccgccctaaagctgcacggcaaatgcgacgatgttatgcgactcttgatggccgaacttggactggaaatcccagcgtacagccgcgtgctatag

SEQ ID NO: 205266 - DNA, 855 bp, synthetic construct
  misc_feature 1..855: note = Description of Artificial Sequence: Synthetic coding sequence
  source 1..855: mol_type = other DNA
atgagcatgctgcccagcttcggcttcacccaggagcaggtggcctgcgtgtgcgaggtattgcagcagggcggaaatctggagagactggggaggtttctgtggagcctaccagcctgtgaccatctccacaaaaatgagagcgtcttaaaggccaaagccgtggtggcttttcacagaggtaattttcgggagttgtataaaattctggagagtcatcagtttagcccgcacaatcaccctaagctgcagcagctttggctgaaggcccactatgttgaggccgaaaagcttcgcggccggcccttaggagccgtggggaagtacagagtcagacgcaagttccccttgccgcggactatctgggacggggaggagacttcctactgctttaaggaaaagtctagaggtgtccttcgagaatggtacgcgcacaacccctacccgtctccacgtgagaaaagagagctggccgaagctactggcctgacaacaacgcaagtaagtaactggtttaaaaatagacgccagagagatcgagcggccgaagccaaggagcgggagaacaccgaaaacaacaatagttcttcaaacaagcagaaccagctgtctccactagagggaggcaagcctttgatgtcgagtagcgaagaggagttcagtcctcctcagtcccccgatcaaaattccgtgctccttttacaggggaatatgggtcatgcaagaagcagcaattacagcctgcctggtctcactgctagccagccttctcatggcctacagacccaccagcaccagctccaagactccctgttgggtcccttgacgtcaagcctggtggatctggggtcttag

SEQ ID NO: 205267 - DNA, 876 bp, synthetic construct
  misc_feature 1..876: note = Description of Artificial Sequence: Synthetic coding sequence
  source 1..876: mol_type = other DNA
atgagcatgctgcccaccttcggcttcacccaggagcaggtggcctgtgtgtgcgaggtgttacagcagggcggtaacatcgagaggctcggtcgattcctgtggtctcttcctgcatgcgaacatttgcataagaatgaaagtgttctgaaagccaaagccgtggtcgccttccatcgagggaactttcgcgagctatacaagatactagagtcccatcagttctccccacacaaccacgctaaactgcagcagttgtggcttaaggcccactatatagaagcagagaaactgagaggacgcccgctgggtgcggttggtaagtacagggtccgacgaaagtttccactgcccaggtccatctgggacggcgaagagacctcttactgttttaaggagaaaagcaggtctgtactgcgagagtggtatgcccacaatccatacccatcacctcgcgaaaaaagggagttggcggaagccaccggcctcactactacccaagtttcaaactggtttaaaaaccggagacagagagacagagcagcagaggccaaggagcgagaaaataatgaaaactctaactctaacagtcacaaccccctgaatggctcggggaaaagtgtcttgggatcgtccgaagacgaaaagacccccagcggcactccagatcattccagttcctcgccagcactactactctctcccccacctcctgggctgccctccctccactcactgggtcatccccctggtccttccgcggttccagttccagtgcctggtgggggcggggcagaccccttacagcaccatcatggcttacaggacagcattttaaaccctatgtctgctaacctcgttgatctggggtcgtag

SEQ ID NO: 205268 - DNA, 999 bp, synthetic construct
  misc_feature 1..999: note = Description of Artificial Sequence: Synthetic coding sequence
  source 1..999: mol_type = other DNA
atggtgttccggagccccctggacctgtacagcagccacttcctgctccccaacttcgctgactcgcaccataggagcatcctattagctagttccggcggtgggaatggggctggtgggggtggcggagctggcggaggtagcggtggaggaaatggcgctgggggaggcggagccggcggagcagggggcggcggcggcggcggcagcagagcccctcccgaggaattgagcatgttccagctgccaacgctgaatttctccccagagcaggtggcatccgtgtgtgaaactcttgaggagacaggtgatatcgaaagactgggccggttcctgtggagcctgcctgttgccccgggggcatgtgaggctatcaataaacacgagtccattttacgagctcgggccgtcgttgcttttcatacaggcaacttcagggatttgtatcacattcttgaaaaccataagtttaccaaggagagccatggaaaactgcaggccatgtggctcgaggctcattatcaggaagctgaaaaactccggggcaggcccctgggacctgtcgacaagtacagggtccgcaagaaattccctctgccccgaactatatgggacggtgaacaaaagacacactgcttcaaagagcggactaggagtctgctgagagagtggtacctgcaggacccttaccctaatccttctaaaaaacgggaacttgctcaggctaccggcctcacaccaacccaggttgggaattggtttaagaatcgcagacagcgggaccgtgccgccgcggcaaaaaaccgtctccagcaccaagccattggaccgtcagggatgagatctttagcggagcctggatgccctacccacggctccgctgagtcaccctctactgcagcttcgccaacaacaagcgtctcaagtctgacggaacgggcagacacgggtacctcaatattatccgtaacaagcagcgactcagagtgcgatgtgtag

SEQ ID NO: 205269 - DNA, 1020 bp, synthetic construct
  misc_feature 1..1020: note = Description of Artificial Sequence: Synthetic coding sequence
  source 1..1020: mol_type = other DNA
atgaactgggagctgctgctgtggctgctggtgctgtgcgccctgctactgcttttggtgcagcttctgcgcttcctcagggctgatggggaccttacactgttgtgggcagagtggcaggggcgaagaccagagtgggagcttaccgacatggtggtctgggtaaccggcgccagttctgggatcggtgaggaactggcataccaactgtcaaagctaggcgtatccctggttcttagcgctagacgcgtacatgagcttgagcgagttaagaggaggtgcctggagaacggaaacctgaaagagaaggatatcttagtcctgcccctggacttaactgacactggttcacacgaggcagctaccaaagcagtcttacaagagtttggacggattgatatcttagtcaacaacggagggatgagccaaagatctctctgtatggatactagcctcgacgtgtacagaaagttgatcgaattgaactatctgggaactgtcagcctgaccaaatgtgtgttgcctcatatgatcgagcggaagcagggtaagatcgtgaccgtaaactcgatcctgggcattatctcagtacctttgtccataggctactgcgcctccaagcacgccctgagaggctttttcaacggtctgaggaccgagctggccacatatcctggcattatcgtctctaacatttgcccggggcctgttcagtccaatatcgtggagaattcacttgctggggaggtaacaaaaactattggaaacaacggcgatcagagtcacaaaatgacgacttccagatgtgtccgcctaatgctgatctctatggccaacgatctgaaggaagtctggatctcagagcaaccattcctgcttgtcacctacttatggcaatacatgccgacttgggcatggtggatcactaataagatgggcaagaagcggatagagaatttcaagtcaggggtcgacgccgacagtagttatttcaagatctttaagacaaaacacgattag

SEQ ID NO: 205270 - DNA, 2220 bp, synthetic construct
  misc_feature 1..2220: note = Description of Artificial Sequence: Synthetic coding sequence
  source 1..2220: mol_type = other DNA
atggccaccctgcccgccgagcccagcgccggccccgccgccggcggggaggcagtggccgccgcagccgccaccgaagaggaggaggaggaagcccgtcagctgctgcagaccctccaggcagccgaaggagaggccgccgctgccgcgggggccggagcgggtgctgcagctgccggggcagagggcccagggtcccccggcgtccccggaagtcctcctgaggccgcatccgaaccgccaaccggacttaggttcagccctgagcaggtcgcctgcgtctgcgaagccctgctgcaggctgggcacgccggacgcctatcccgctttctaggggctctacctccagctgaaaggctcagaggatcggaccccgtactgcgggctcgggctctggtggccttccagcgtggcgaatatgccgagctctacagactgctcgagagtcggccattccccgctgcccaccatgccttcctgcaggacctctatctgagggcccggtaccacgaggccgaaagagctagagggcgagcccttggcgctgtcgacaagtacaggctgcgaaaaaagttcccgctgcccaagacaatctgggatggcgaggagactgtgtactgctttaaggagcgcagccgcgctgctctcaaagcttgctatagaggcaaccgctatcccacccctgacgaaaaaagacgcctggcaacactgaccgggctctccctgacgcaggtatccaattggttcaagaatcgccggcaacgggacaggacgggggccggcggcggagctccctgcaagagcgagagcgacggcaatcccacaaccgaggacgagtccagtcggtcccccgaagacctggaacgcggggcagcccccgtctctgctgaggccgccgcacaggggtctatcttcttagctggcacagggccgcctgcgccctgccccgctagctccagcatcctggtcaacggatcattcctcgcagcaagtggcagtccagctgtactgcttaacggtgggccagtcataattaacggtctagccctgggggaggcttccagcctgggaccactcttactcactggcggtggaggcgcaccccctccacagccttctcctcaaggcgcctctgagaccaagacatccctcgtgctcgatccccaaaccggggaagtgcgccttgaagaggcgcaatcggaagctccagagacaaagggagcacaagttgctgccccgggacccgcgctgggcgaagaggtgctgggtccactcgcgcaggtggttcctggcccacctacagctgccaccttcccattacctcctggaccggtgcccgccgtggcggcaccccaagtcgtgccattaagtccaccccccggctatcccacgggtctcagccctacttccccgctgctgaacctgccacaggtcgtaccaacttcgcaggtggttacccttccacaggccgtcggacccctccaactacttgctgccgggcccgggagtcccgtgaaagtggccgctgcggccggtccagcaaatgtgcatcttatcaactccggcgttggcgtgacggctctacagctgccctctgccaccgctccaggtaactttctcttagctaaccctgtgtcaggcagcccaatcgtgaccggggtcgccctccagcagggaaaaatcatattgaccgctacctttccaactagtatgttggtctcccaggtccttccccctgctcctggactcgccctgcctttgaagcccgagacagcgatttcggtaccggagggcggactacctgttgcacccagcccagcacttccggaggcacacgcccttggcacactcagtgcccagcagcctcccccagccgcggcaaccactagttcaacaagcctccccttttcaccggactcccctgggctcctgccgaattttccagcgccacctccagagggcttgatgctcagtccagcagcagtgccggtgtggtcagccggtctggagctttccgccggaaccgagggtctccttgaagccgagaaggggctaggtacacaggctcctcacaccgtcttaagacttcccgatcctgatcccgaaggattactgttaggtgcgaccgccggcggggaggttgatgagggcctggaggccgaggctaaagtcctgacgcagcttcagtccgtgcccgtagaagaacctctcgagttgtag

SEQ ID NO: 205271 - DNA, 741 bp, synthetic construct
  misc_feature 1..741: note = Description of Artificial Sequence: Synthetic coding sequence
  source 1..741: mol_type = other DNA
atgttccagctgcccatcctgaacttcagcccccagcaggtggccggggtgtgtgagactttggaagagtcaggagacgtagaaaggttggggcggttcttatggagcctgcctgtggctcccgccgcttgtgaggctctgaacaaaaacgaatcagtgctgcgcgcccgcgcaattgttgcctttcatggaggtaattatcgcgagctgtaccatattctggagaatcacaagtttaccaaggagtctcacgcgaagctgcaggcactctggttagaggcccactatcaggaggcagagaaacttcggggccggcctctggggcctgtggacaagtacagggtgcggaagaagttccctctccctcggacaatttgggacggagaacagaagacccactgctttaaggagcggactcgacatctactcagagaatggtatctacaagacccttacccaaatccctctaagaaacgggaactggcacaggctacagggctgaccccaacccaggtcggcaattggtttaaaaataggcgtcagcgagacagggcagcggccgctaagaaccggctgcagcagcaggtcctatcccaggggtccggccgggctcttagggctgaaggggacggaacacccgaagttctgggcgttgccacttcacccgccgcgtcactgtcctcaaaggctgctactagcgctataagtatcacttcctctgacagtgaatgcgacatatag

SEQ ID NO: 205272 - DNA, 360 bp, synthetic construct
  misc_feature 1..360: note = Description of Artificial Sequence: Synthetic coding sequence
  source 1..360: mol_type = other DNA
atgacccagcagggcgccgccctgcagaactacaacaacgagctggtcaaatgcatcgaggaactttgccagaaaagggaagagctgtgccgacaaatccaggaggaggaagatgaaaagcaaagactgcagaacgaggtgcggcagttgaccgagaaactcgcaagagtcaacgaaaatctggcacgcaagatcgcctcaaggaatgagttcgaccggaccattgcagaaacagaagctgcgtacctgaagatcctggagtcttcccaaaccctgctgtcagttctgaagcgggaggcaggcaacttgactaaagctaccgctccggaccagaagagctccggaggcagagacagttag

SEQ ID NO: 205273 - DNA, 666 bp, synthetic construct
  misc_feature 1..666: note = Description of Artificial Sequence: Synthetic coding sequence
  source 1..666: mol_type = other DNA
atgctgtggctgttccagagcctgctgttcgtgttctgcttcggcccgggccaactaagaaacatacaggttacaaaccactcccagctgtttcaaaacatgacatgtgagctgcacctgacatgcagtgtggaggacgccgatgacaatgtatcatttaggtgggaggctttagggaatacattaagctcacagccaaatcttaccgtctcctgggatcctcgcatttccagcgagcaggactacacgtgcattgccgagaatgctgtgtcaaacctttcattctcggtatccgcccagaaactctgtgaagacgtgaagattcagtacacggacaccaaaatgattttattcatggtcagcggcatctgtattgtgtttgggtttatcattcttctgctgctggttcttcgcaaaaggcgagattcactcagtctgtccacacagcggactcagggcccggcggagagtgcccgtaacctggaatatgtctccgtttcgcctaccaataataccgtttatgctagtgtgacccactcaaatagagaaaccgaaatatggactcctagagaaaacgacactattacgatttactctaccatcaaccattctaaagaatcgaaaccaactttttctcgtgctactgcgttagataatgtcgtgtag

SEQ ID NO: 205274 - DNA, 999 bp, synthetic construct
  misc_feature 1..999: note = Description of Artificial Sequence: Synthetic coding sequence
  source 1..999: mol_type = other DNA
atgctgtggctgttccagagcctgctgttcgtgttctgcttcggccctggcaacgtggtgtcacaatcaagcttgaccccactgatggtgaatggcatcctgggcgaatccgtgactctgcccctggagtttcccgctggcgagaaagttaactttatcacttggctttttaatgagacctctctggccttcatcgttccacacgagactaaaagcccagagattcacgttacaaatcccaagcaggggaagaggctcaactttacacagtcctattcattacaactgagcaatctgaaaatggaagacacaggatcctacagggcccagatcagcaccaagacgtctgccaagctttcatcctacaccctgagaatcctacggcagctgcgaaacatccaggttacgaatcatagtcagctcttccagaacatgacatgtgagctgcacttgacttgcagtgttgaggacgccgacgacaacgtttcattcagatgggaagcgctcggaaataccctgagcagtcagcctaatctcacagtgtcctgggatcctcggatttccagcgagcaggactacacttgcattgctgaaaacgccgtgtctaacctgtctttctctgttagcgcccaaaagctgtgcgaggacgtgaaaatccagtatacagacacgaaaatgatcctctttatggtgtccggcatttgcattgtgtttggctttataatactgctgctgctagtgctgcgaaaacgcagagactccctgagtctatctactcagagaacacaaggccctgccgaatctgccaggaacctcgagtatgtgtccgtgtcccccacgaataacaccgtgtacgccagcgtaacccattcaaacagggagaccgagatctggactccacgtgaaaacgacaccataaccatctatagcaccattaatcacagcaaggagtctaaaccaaccttctcacgggcaaccgcacttgataacgtcgtatag

SEQ ID NO: 205275 - DNA, 996 bp, synthetic construct
  misc_feature 1..996: note = Description of Artificial Sequence: Synthetic coding sequence
  source 1..996: mol_type = other DNA
atgctgtggctgttccagagcctgctgttcgtgttctgcttcggcccgggcaatgtcgtctctcagtctagccttactcctctgatggttaacggcatcttgggggaaagcgtgacactgcctttggagttccccgcaggcgaaaaagtcaacttcatcacatggcttttcaatgagacaagtctggccttcatcgtccctcacgaaactaagtcaccagaaattcacgttacgaaccctaagcaagggaaaaggcttaactttacacagagctacagtctccagctatccaacctgaaaatggaggacaccggctcatatagggcccagatcagcaccaagacttccgcgaagttatccagctacacacttagaattctgagacagctgcgcaatatacaggttaccaatcattcgcagctatttcagaacatgacctgcgagcttcacttgacatgtagtgttgaagacgcagatgataatgtaagtttccggtgggaggctctgggcaatacattgtcctcccaaccgaacttaactgtgtcctgggatccgagaatatccagcgaacaggattacacgtgcatcgcagaaaatgctgtgtccaaccttagtttctccgttagcgcgcagaaactgtgcgaggatgttaagatacaatacacagacactaagatgattctgttcatggtgtccgggatctgcatagtgtttggcttcataatcctccttctgctggtcctgaggaaacgcagggactccttgagcctttcgactcagcggactcaaggccccgagtctgcacgcaatctcgagtacgtaagcgtgagccctaccaataacacagtgtacgctagcgtgacccatagtaatcgggaaaccgagatctggacccccagagaaaacgatacaatcaccatctactcaaccattaaccattctaaagagtctaagccaaccttctcgcgcgccactgcactcgataacgtggtgtag

SEQ ID NO: 205276 - DNA, 891 bp, synthetic construct
  misc_feature 1..891: note = Description of Artificial Sequence: Synthetic coding sequence
  source 1..891: mol_type = other DNA
atggccggcagccccacctgcctgaccctgatctacatcctgtggcagctcacaggctcggcagcgagtggtccagtcaaggagctggtgggaagcgtcggtggagccgtcaccttccccctgaaatcaaaggtgaagcaggtggacagcattgtctggacttttaatacaacccccctggtgactattcaaccagaaggcggtaccatcatcgtgacccagaaccggaatcgggagagagtcgatttccccgatgggggttacagcctcaaactgagcaagctcaaaaagaacgacagcgggatctactatgttgggatctattctagttccctccagcagcctagcacccaagagtatgtgctacatgtctatgagcatctgagcaaacccaaggtgactatgggcttacagtcgaacaagaatgggacctgtgtgacgaatctgacatgttgtatggagcatggcgaggaggatgtgatatacacttggaaggccctgggacaagcagctaatgagtctcacaatgggtctatcctgcccataagctggaggtggggggagtctgatatgacattcatttgcgtggctcggaacccagtgtctcgaaactttagttccccaatcttggctcgtaaactgtgcgagggcgcagcggacgatcccgatagctccatggtcttactgtgtctgttgctcgtcccattgttgttgtcgctgtttgttttaggcctgtttctgtggtttttgaaaagggaaaggcaggaggagaacaaccctaaaggccgctcttcgaagtatggcctgctgcattgtggaaatactgagaaggatgggaagagcccattgaccgcgcacgacgcccggcatactaaggctatctgcctgtag

SEQ ID NO: 205277 - DNA, 687 bp, synthetic construct
  misc_feature 1..687: note = Description of Artificial Sequence: Synthetic coding sequence
  source 1..687: mol_type = other DNA
atggccggcagccccacctgcctgaccctgatctacatcctgtggcagctcaccgaacacctatctaagcctaaggtgacaatgggtttgcagtctaacaaaaatggcacgtgcgtgacaaacttaacatgttgcatggagcacggggaagaggacgtgatatatacgtggaaggcgctgggccaggccgccaacgagtcccataatggtagcattctgcccatttcttggagatggggggaaagcgacatgacattcatctgtgtcgccagaaatccagtaagtaggaacttctcctccccaattctcgctcgaaagctgtgtgagggggctgccgatgatcctgattcatcgatggttttgctgtgcctgctgctagtgccactgctgctgtccttattcgttttgggactgttcctttggttcctgaagcgtgagcgccaggaggagtatattgaggagaagaagcgagtggatatatgcagggagactccaaatatttgcccacactcaggagagaatacagaatacgacacaataccacacaccaatcgcaccattctcaaggaggaccctgccaataccgtgtactcaacagtcgagattcccaagaagatggagaatccgcacagcctgctgaccatgcccgatacccctaggctctttgcctatgagaacgtaatctag

SEQ ID NO: 205278 - DNA, 1008 bp, synthetic construct
  misc_feature 1..1008: note = Description of Artificial Sequence: Synthetic coding sequence
  source 1..1008: mol_type = other DNA
atggccggcagccccacctgcctgaccctgatctacatcctgtggcagctgaccggatccgctgcctccgggcctgtgaaggagttagtcggtagcgtcggcggcgccgttacgtttcctctaaagagcaaggtaaagcaggtcgattcgatcgtgtggacatttaatactaccccactggttactatccagcccgaaggcggtactatcatcgttacccaaaaccgcaaccgggaaagagtcgacttccctgatggtgggtattccctgaaactttccaagctaaaaaagaatgattccggcatctactatgtcggcatttattcttcttctctgcagcagccaagcacacaagaatatgtcctccatgtctacgagcatctcagcaagccaaaagtcacaatgggcttgcaatctaataaaaacggaacatgcgtgacgaatcttacgtgctgtatggagcacggagaagaagacgttatttacacctggaaggccctcgggcaggcagccaatgaatcccacaacggaagtattctgccaattagctggaggtggggagaatcagacatgacgtttatttgcgtggcacgtaaccctgtttcgagaaacttttcctccccaattctggcgaggaaactttgcgaaggcgccgctgacgacccggactcatcaatggttctgctgtgtcttcttctagtgccgctgctactgtccctgtttgtcctcggcctgttcctttggttcctcaagagggagcggcaggaagaatatatcgaagagaagaaaagggtggacatctgcagggagacaccaaacatatgcccccactctggcgaaaacacggagtatgatacaatcccccatactaatcgaactatcctgaaggaagaccccgctaatacagtgtacagtacggtcgagattcctaaaaagatggagaacccccactctctgctcaccatgccagatacgccgcggctatttgcttacgagaacgtgatctag

SEQ ID NO: 205279 - DNA, 615 bp, synthetic construct
  misc_feature 1..615: note = Description of Artificial Sequence: Synthetic coding sequence
  source 1..615: mol_type = other DNA
atggccggcagccccacctgcctgaccctgatctacatcctgtggcagctcactggaagcgccgcttcaggacccgtaaaggagcttgtgggatccgtcggaggcgctgtgacgtttcccctcaaatcaaaagtgaaacaagtcgattccatcgtctggacttttaacacgacgcccctggtaacaatccaacctgaggggggaactataatagttacacaaaaccgaaatcgggagagggttgacttcccagacggaggatattctctcaagttgtctaagctgaaaaagaatgattcggggatctactatgtaggtatttactcaagttccctgcagcagccatcaacacaagagtatgtactgcatgtgtatgaatatattgaggaaaagaagagggtggatatttgtcgtgagactcctaacatatgtccacattctggagagaacactgagtatgacacaatacctcataccaaccgcaccatccttaaggaggacccagccaacacagtttacagtactgtggagattccaaagaagatggagaatcctcacagcctgctgacaatgccagacactcctaggttgtttgcttacgagaatgtgatctag

SEQ ID NO: 205280 - DNA, 498 bp, synthetic construct
  misc_feature 1..498: note = Description of Artificial Sequence: Synthetic coding sequence
  source 1..498: mol_type = other DNA
atggccggcagccccacctgcctgaccctgatctacatcctgtggcagctgacagggagtgccgcgtccggtcccgtaaaggagcttgtggggagcgtggggggagcggtgactttccctctcaaaagtaaggttaagcaagtagatagtatcgtgtggaccttcaacactactcccctggtgacaatacaacccgaaggaggtaccattatcgtaacacagaatcggaatagagaacgagtggacttccctgatggtgggtacagtctgaaactttccaagctcaagaaaaatgattctggaatttattacgtcgggatctacagttcgtcacttcagcaaccttcgacccaggagtacgtcttgcacgtctatgaaaataatcccaagggtcgctcttcaaaatacggattattgcactgtggaaatactgagaaggacgggaaatcccccttgactgcacacgacgccaggcacaccaaggcaatctgtttgtag

SEQ ID NO: 205281 - DNA, 450 bp, synthetic construct
  misc_feature 1..450: note = Description of Artificial Sequence: Synthetic coding sequence
  source 1..450: mol_type = other DNA
atggccggcagccccacctgcctgaccctgatctacatcctgtggcagctgacggagcatctgtccaagccaaaagtcactatgggcctgcagagtaataagaatggcacttgtgtcacaaacctaacctgctgtatggagcatggtgaggaggatgtaatttacacatggaaggcacttggccaagctgcaaacgagagtcacaacgggagcatcttgcccatctcctggagatggggggagagcgatatgaccttcatatgcgttgcccgcaacccagtgagcagaaatttttcctctccgatccttgctcggaagctctgcgaagagaacaaccccaagggacggtcaagcaagtacggactgctgcactgcggcaatactgagaaagacggcaaaagtccgctaacagctcatgacgcacggcacacgaaagcaatttgtctctag

SEQ ID NO: 205282 - DNA, 567 bp, synthetic construct
  misc_feature 1..567: note = Description of Artificial Sequence: Synthetic coding sequence
  source 1..567: mol_type = other DNA
atggccggcagccccacctgcctgaccctgatctacatcctgtggcagctgacagagcatctctctaagcccaaggtgacaatgggcctccaaagtaataagaatggcacctgtgtgacaaatctcacctgctgtatggaacacggcgaggaggacgttatatatacctggaaggccctggggcaagctgccaacgagagccacaacggctctattctccccattagctggcgctggggggagtctgacatgaccttcatctgcgtggcacggaaccccgtcagccgtaatttttcatctcctatacttgcaagaaagctatgcgaggaatatatagaagagaaaaagagggtagatatctgcagagaaacacccaacatttgtccccactcaggcgagaatacggagtatgacaccatcccacatacaaacagaactattctcaaggaagatccagccaatacggtgtacagtaccgtcgagataccaaaaaagatggagaacccccattctctcctaactatgccggatacaccccgactgttcgcttatgaaaacgtgatttag

SEQ ID NO: 205283 - DNA, 858 bp, synthetic construct
  misc_feature 1..858: note = Description of Artificial Sequence: Synthetic coding sequence
  source 1..858: mol_type = other DNA
atggtgatgcggcccctgtggagcctgctgctgtgggaggccctgctcccgatcacagttactggagctcaagtgttgagtaaggttggcggtagcgtgctgctggtagcagctcggcctcccggcttccaagtgcgcgaggccatctggcggtcattatggccatctgaggagctcctggcaactttcttccgagggagccttgagacactgtatcacagtagatttcttgggcgcgcccaattgcactctaacttatcccttgaactgggacctctcgagtccggtgatagcggtaatttttccgtcctgatggtggacacgcgtggtcagccgtggacacagactctccagctgaaggtctacgatgcagtgccacggcccgtcgtgcaggtgttcattgcagtggaacgggacgcacagccctcaaagacttgtcaggtgttcctttcatgctgggctcctaacatctctgagatcacatactcgtggaggcgcgagacaactatggacttcgggatggaaccccatagtctatttacggatggccaggtgttgtcaatctcccttggccccggcgatagggatgttgcctactcctgcattgtgtctaatcccgtcagctgggacctggccacggtgacaccgtgggattcctgccatcacgaggccgcccccggaaaggcttcttataaggacgtcctgcttgtcgtggtgcccgtgtcactgctgctgatgctggtcacactgttttcggcatggcactggtgcccttgctcgggtaaaaagaagaaggacgtgcacgctgacagagtgggacctgaaaccgagaacccactggtgcaagacctgccatag

SEQ ID NO: 205284 - DNA, 531 bp, synthetic construct
  misc_feature 1..531: note = Description of Artificial Sequence: Synthetic coding sequence
  source 1..531: mol_type = other DNA
atggtgatgcggcccctgtggagcctgctgctgtgggaggacgccgtcccccgtccagtggtccaggtctttatcgcagtagaaagggacgcgcagcctagtaaaacctgtcaggtcttcttatcgtgttgggcacccaatatctcagagataacatactcttggcggagagaaacgacaatggacttcggtatggaaccgcattctttgttcaccgatggtcaggtcctgtccatatctcttggcccaggagatcgggatgtcgcgtactcatgcatcgtctcaaatcctgtctcctgggaccttgcaaccgttacaccctgggatagctgtcatcatgaggcagccccaggtaaagcatcctacaaggatgtgctgctcgtcgtcgttccggtatctttgctcctgatgctggtgaccctgttctccgcatggcactggtgcccctgtagcggaaaaaagaagaaggatgtgcatgccgacagggtgggccctgaaactgaaaaccctctcgtacaggatctcccttag

SEQ ID NO: 205285 - DNA, 444 bp, synthetic construct
  misc_feature 1..444: note = Description of Artificial Sequence: Synthetic coding sequence
  source 1..444: mol_type = other DNA
atgggcggccggcaccacctgcagcggcaggtgagcgagagcatgagcgcactgtttcaggcagttcggctagagagcgcctgggccgaccgcgttcggtatatggttgtcgtttacagcagcggcagacaagatacggaagagaacattctgctcggagttgacttcagctccaaggaatccgggttttctgtctccaccgcaggaaggatgcacatcttcaagccggtgtctgttcaagcgatgtggagcgctctccaggtcctgcacaaggcctgcgaagtggctagacgtcacaattacttcccgggtggcgtggcattaatttgggccacatactacgaaagttgcatttctagcgagcagtcctgcattaatgagtggaacgctatgcaggatctggagtccactcgacctgacagtccggcgctcttcgtcgattag

SEQ ID NO: 205286 - DNA, 2112 bp, synthetic construct
  misc_feature 1..2112: note = Description of Artificial Sequence: Synthetic coding sequence
  source 1..2112: mol_type = other DNA
atggcccgggcccggcgggccgtggtgggcagcgtgcgggacgtgtcaaccgctgccactaacctcttttactttacagacttctgtatcttcctccagcctacccactgtttttgctgccctgaggttagtagctccaactacctcagcgagagtttcttcatggtcaagggcgccgcactgtttctgcagcagggaagttctccccaaggacagcggagcctgcagcacccacacaaacatgcaggggaccttcctcagcacctgcaagtgatgataaacctattgcgatgcgaggacaggatcaaactggctgttagattggaatcagcctgggctgatcgcgtacgttacatggttgtcgtctatagttcgggacgccaagacacagaagaaaacattcttctgggggtggatttctcgtcaaaggaatctaagagctgtacaattgggatggtgcttcgcctatggtcagatactaagatccatttggatggcgatggcggtttcagcgtcagcactgcaggcaggatgcacatcttcaagcccgtgtcagttcaggcgatgtggtctgctttgcaagttctgcacaaggcttgcgaagtggctcgcaggcacaattactttcccggaggagtagcactgatctgggccacttactacgaaagctgcatctcatccgagcagtcatgcataaacgaatggaatgccatgcaggacctagagagcactagacccgactctcctgcactttttgtggacaagcctaccgagggcgaacgtactgaacggttgattaaagcaaagctcaggagcattatgatgagccaagatctggaaaacgtgacttcaaaggaaattagaaatgaactggagaaacagatgaattgcaacctcaaggagctgaaggagttcatagacaatgagatgctgctgatcttgggacagatggataagcccagcttgatattcgatcatctgtatctaggcagcgaatggaatgcgagcaatctcgaagagcttcagggtagtggagtagactatatccttaacgtgactagggaaatagacaacttctttccagggctgtttgcttatcataatatccgggtgtacgacgaagagacaacagaccttttagcccattggaatgaggcataccactttattaataaggccaagcgtaatcatagcaagtgtctggtccactgtaagatgggcgtgagcagatcggcctccactgtaatagcctatgccatgaaggaattcggttggccactggagaaggcttataactacgttaagcagaagcggagcatcacacgtcctaacgctggatttatgagacagctgagtgaatacgaaggtatccttgacgcttccaagcagagacacaacaaattatggcgacagcaaacagactcaagcttacaacaacccgtcgatgaccccgctggaccgggagacttccttcccgaaactcccgatgggacccccgagtctcagctgccattcttggacgacgcagctcagcccggtctaggccctcctctgccatgctgctttaggcgcctctccgatcctttattgccaagcccggaagatgaaacagggtccctggtgcacctggaagaccccgaaagagaggcgctccttgaagaggccgcccccccagctgaggtccacagacccgcccggcagccgcagcaagggtccggcctgtgtgaaaaagatgtcaagaaaaagctggagttcggatcaccaaagggacgaagcggatccttgctccaggttgaagaaactgagagagaagagggtctcggcgcgggacggtggggtcagctgcccactcaactggaccagaatctactgaactccgagaacttgaacaataattccaaacggtcgtgccccaatggcatggaagtgggaagagcacgtccggctgggtggcacactccaagcctgccaagccacagtaattggcctacctcagcatccgttgtgggtaccacgggtactcgacaccacactcagctcatcttcttctattgcctcctctgggccccttccagccatttacaaggaccggagggctcgtttactgggtag

SEQ ID NO: 205287 - DNA, 3150 bp, synthetic construct
  misc_feature 1..3150: note = Description of Artificial Sequence: Synthetic coding sequence
  source 1..3150: mol_type = other DNA
atggccctggtgaccctgcagcggagccccacccccagcgccgccagctcttctgcctccaattcggagttggaggccggctccgaagaagataggaaactgaacttgagcctctcagagtcatttttcatggttaagggcgccgcgcttttccttcaacaggggagtagcccccagggtcagaggtctctgcaacatcctcacaagcacgccggggatttaccacagcacctccaagtcatgatcaacctgctgagatgcgaggatcggatcaaactggcggtgcggctggagtctgcctgggccgaccgagtccgttatatggtggtggtgtactcttccgggcgacaggacactgaagagaacatcctactgggagtggactttagcagcaaagaatcgaaaagttgcaccattgggatggtgctgagactgtggagtgatacaaaaatacacctggatggagatggcggcttttccgtaagcacagcaggaaggatgcatatttttaaaccagtcagcgttcaggcgatgtggagtgctcttcaagtgctgcataaagcctgcgaagtagcaaggcgtcacaactactttccgggcggagtggccctgatctgggccacctattatgaaagctgcatctcctcagagcagtcctgtattaatgagtggaacgcgatgcaggatcttgagtctacacgacccgactcacctgctttgttcgttgataagccaacagaaggcgaacgcactgaacgactgattaaggccaaactgcgcagcatcatgatgtctcaagatctagagaatgtcacctctaaagagatcaggaacgagctcgagaagcagatgaattgcaatctcaaagagctgaaagaattcatcgataatgagatgctgctcatcctggggcagatggacaagccctcactgatttttgatcacctgtacctgggaagtgaatggaacgcgtctaacctcgaggagctgcaggggagtggggtggactatattctgaatgttactagagagattgataatttctttcctggcctctttgcctaccataacatccgagtctatgacgaagaaacgaccgatttgctggcgcactggaacgaggcctatcactttatcaataaagctaaaagaaaccactctaagtgcctggttcactgtaaaatgggcgtttcccgaagcgcaagtaccgtgatcgcatacgccatgaaggagtttggctggccattggaaaaggcctataattacgtgaagcagaagcggtcaatcacaagacctaacgcaggatttatgcggcagctttctgagtatgaaggcattttggacgccagtaaacagaggcataacaaactgtggcgccagcagactgattcctcgcttcagcagcctgttgacgatcccgccggtccgggcgattttctgcccgaaactcccgacggtacgcctgagtctcagctacccttcctggacgacgcagcgcagcccgggcttgggcctcctctcccatgttgctttaggcggctgtccgatccactcctgcccagccccgaggatgaaacgggtagcttagtccacctggaagatcccgagagagaagctttgcttgaagaagccgctccacctgccgaagttcaccggccagcccgacagccacagcagggctccggcctgtgtgagaaagacgtcaagaaaaagttggagtttggcagcccgaagggacgctcaggatcattactgcaggtagaggagaccgaaagagaagagggtctgggtgctggacggtgggggcagttgccgacacaactggaccagaatttgcttaacagcgagaatttaaataacaatagtaagagatcatgtcccaacggcatggaggatgatgctatctttggcatcttaaataaggtgaaaccatcctataagagttgcgccgactgtatgtaccctaccgcaagcggcgcacccgaagcgagtagagagagatgcgaagaccccaacgcccctgccatctgtacccagcccgccttcctgccccatatcacaagctctccagtggcacatttagcatccaggtccagggtgccagagaaaccagcatcgggcccaaccgagccgcctccttttttacctcctgcaggatctcggcgcgctgatacaagcgggcccggcgccggtgctgccctggaaccccctgccagcttgctggagcccagcagagagactccgaaagtgctgcctaagtccctgctgttaaagaacagccactgcgacaagaatcccccatctaccgaagtcgttataaaagaggaatccagtcctaaaaaggacatgaaacccgcaaaggatctccgcctgctgttctcaaacgaaagcgagaagccgaccacgaactcatacctcatgcagcaccaagagtcaatcatccagcttcaaaaggcaggtttagtgcggaaacatacaaaggaacttgagcgcctcaagtcagttcccgcagacccagcgcctccctcccgagacggtcccgccagtaggttagaggcatctatccctgaggagtcccaggatcccgccgccttgcacgagctgggcccactcgttatgcccagccaagcgggctcagatgaaaagtccgaagctgcacctgccagtttggagggcggctctctgaagtctccacctccattcttttaccgtcttgaccacaccagctcattcagcaaagatttcctcaagacaatttgctatacccccactagtagcagcatgtcctccaacctgacccgcagttcatcaagtgattcaattcatagtgtgcgggggaagccaggtctcgtgaagcaaagaacccaggaaatagagactcggttacggttggcaggcctgacagtttcctctccactcaaacggagtcactccctggccaaactgggcagtttgacttttagcacggaggatctcagcagtgaagctgaccccagcacggttgctgactcacaggatactacactcagcgaatccagcttcctccacgagccacaggggactccacgggaccctgcggccacatccaagccctcgggaaagcctgcacccgaaaacttgaaatcaccatcttggatgtccaaatcctag

SEQ ID NO: 205288 - DNA, 2214 bp, synthetic construct
  misc_feature 1..2214: note = Description of Artificial Sequence: Synthetic coding sequence
  source 1..2214: mol_type = other DNA
atgcggtgctacctgagctgggaccggtggaccagcccccccctgtcaagtattatcttcattagcgtggattacatcctcaacgtcaccagagagatagataacttttttcccggtctatttgcctatcacaacatccgagtgtacgatgaagaaacgactgacctgctggcgcactggaacgaagcataccacttcataaacaaggcaaagcgcaatcattcaaaatgtctcgttcactgtaaaatgggtgtcagcaggagcgcgtccaccgtgatcgcttacgctatgaaagaatttggatggcctctcgagaaagcgtacaattatgtgaaacaaaaacggtctataacaagacctaatgccgggttcatgcgccaactgagcgaatatgaggggatcctggatgcctctaagcagcggcacaacaaattgtggcggcagcagacggacagttcactccaacaacctgtcgatgatcccgccggccctggggactttctgccagagacccctgacgggacccccgaatctcagctgcccttcctggacgacgcagcccagcctggactgggcccaccccttccctgctgtttccggcgacttagtgatccactccttccgtcccccgaggacgaaaccgggagtctcgtgcatttagaggacccagagcgggaggccctgctggaggaggctgccccccccgcagaagtccacagacctgcaagacagccccagcagggctctggtctgtgcgagaaagatgttaagaagaaacttgagtttgggagccccaagggcagatccggttcgcttctgcaagtggaggagacagaacgggaagagggtctgggcgcgggaagatggggccagctcccaacgcagctggaccagaatcttctgaactcagaaaacttgaacaataactcaaaacgttcctgtcctaacggaatggaagatgatgctatctttggcattctgaataaagtgaaacccagctacaagtcctgcgccgactgcatgtacccaacagcctctggagcccccgaggcaagtagggaacgatgtgaagaccctaatgcacccgccatctgcacccaaccagcctttttgccccacatcacaagtagccctgtggctcacctcgcctccaggtcaagagttccagagaaaccagcaagtgggccaactgagccgcccccttttttgccacctgcaggaagtagaagggctgacactagcggtcccggcgccggggccgctttagagcccccagccagcctgttggaacccagcagggagactcccaaagttctcccgaagagtttgttactgaagaattcccactgcgacaaaaatcccccaagcacagaggtcgtcatcaaggaggagtcctctcccaagaaagatatgaaacctgccaaggacctcagactcttgtttagcaacgagagcgagaaacccactaccaattcttatctgatgcaacaccaggaatctatcatacagcttcagaaagctggactggtgcgcaaacacacgaaagaacttgagcggctgaagagtgtgcctgccgacccagccccaccatcgcgggatggaccagcctccaggctcgaagcctctattccggaagaaagccaggacccagcagcccttcacgagctgggcccactggtcatgcctagccaggctggctcagacgagaagtccgaagccgcccccgcatctttagagggcggtagcctgaagtccccacccccttttttctacagactggatcacacaagcagcttttccaaggactttcttaaaacaatttgttacacaccaacgtcttccagtatgagttccaatttaacacggagctcttcttccgactccatccactccgtgagaggcaagcctggactcgtgaaacagagaacacaagagatcgagacccggcttcggctggcaggtttaaccgtgagctcacctctgaaacggtctcactccctggctaagctgggtagtctcacgttctctaccgaggacctctcgtcagaagccgatccatcaaccgtcgctgacagccaggatacaacattgtctgagtcctcttttcttcacgaacctcagggaacaccacgagatcccgccgctacatccaaacctagcgggaagcccgctccagagaatctaaagtccccatcttggatgtcaaagtcgtag

SEQ ID NO: 205289 - DNA, 2079 bp, synthetic construct
  misc_feature 1..2079: note = Description of Artificial Sequence: Synthetic coding sequence
  source 1..2079: mol_type = other DNA
atggccctggtgaccctgcagcggagccccacccccagcgccgccagctcctcagcctccaactccgagcttgaggctgggtcagaggaggaccgcaaactcaacctatccttgagcgagagcttctttatggtgaagggagcggccctgtttctgcagcaggggagttcacctcaggggcagaggtcgttacaacacccacacaaacatgctggagacttgccccagcatctacaagtgatgattaacctgctcaggtgcgaggacagaatcaaattggccgtcaggttggaatccgcttgggccgacagggtcagatacatggtagtggtatattcttctggcagacaggacaccgaggagaatatcctgctgggtgttgacttttcatccaaagagagcaagagctgtaccattggaatggtcctacgtctatggagcgataccaaaattcacctagacggggacggaggattcagcgtcagtaccgcaggtagaatgcatattttcaagccggtcagcgtccaagccatgtggagcgctctccaagttctgcacaaggcttgcgaggtggcccgaaggcataattactttcctgggggtgtggccctcatatgggcgacctattatgagagttgcataagctcggagcagagctgcatcaacgagtggaacgcaatgcaggatttggagtctactcggccagactccccagctttgttcgtagataagccaaccgaaggggaaagaactgagagactcataaaggctaagctgaggagtattatgatgagccaggacctcgaaaacgttacatctaaggaaatacgaaatgaacttgagaaacagatgaactgtaacctgaaagaacttaaagagtttattgacaacgagatgctgcttatcttgggacaaatggacaaacccagtctgatcttcgaccacctgtatctggggtcagaatggaatgcatccaatctggaggagttgcaggggagcggggtggattacatcctgaacgtaactcgtgaaattgataatttctttcctggtctgttcgcatatcataatatcagagtgtatgacgaggagaccaccgatctgcttgctcactggaacgaagcataccattttattaacaaagcgaagcgaaaccatagcaaatgcctggtccattgtaaaatgggcgtaagtcggtcggcttctacagtgatcgcgtatgcaatgaaggaatttggctggcctctggagaaagcttacaactatgttaagcagaagcgctctattaccaggccaaatgcgggatttatgcgacagttgtcagagtatgaggggatcctggatgccagcaaacagaggcataacaagctatggaggcagcagaccgatagttcgctgcagcagcccgtagatgatcctgctgggccaggggatttcctgcccgaaacccccgacggcacccctgagtctcagctgccatttctggacgacgccgctcagccaggattgggcccccccctgccatgctgtttccgcagactgtcagacccgctgttgccctctccagaggatgagaccgggtctttggtacacctagaggatcctgaaagggaggccctgttggaggaggcagcccctccagctgaggtacaccgaccggcacgccagccccagcagggaagtgggctctgtgagaaggacgtgaagaagaagctggagttcggctctccgaaagggagaagcgggagcttgctacaggtagaagagactgagcgagaagagggcttgggggcaggtagatggggccagctgccaactcagcttgaccagaatctgctgaactcggaaaatcttaacaacaattccaagcgatcctgcccaaacggaatggaggtgggtagagctcgacctgccggatggcacactccgtccctaccatcccattcaaactggcctacctctgcctcagtagttgggaccacaggcacccggcatcatactcagctgatttttttttattgtctgctttgggcaccatccagccatctgcagggacccgaaggaagcttcacagggtag

SEQ ID NO: 205290 - DNA, 4272 bp, synthetic construct
  misc_feature 1..4272: note = Description of Artificial Sequence: Synthetic coding sequence
  source 1..4272: mol_type = other DNA
atggccctggtgaccgtgcagcggagccccacccccagcaccaccagcagtccgtgcgcaagcgaagccgattctggggaggaagagtgccgtagccagccccgcagtatcagcgagagtttccttacggtgaagggagccgccctgttcctgcccaggggaaatggctcctccacaccccgtatttcacaccggagaaacaaacacgcaggggatttacagcagcacctgcaagcaatgttcatcctcctccgaccagaggataatattaggctggctgtgaggctcgagagtacctaccagaaccgtacaaggtatatggtcgtggtatcgacaaatgggagacaggataccgaagagtctatcgttctcgggatggatttctcctctaacgactcttctacctgcacgatggggctcgtgctaccactctggtccgatactctgatccatctcgatggcgacgggggtttctccgtgtccaccgataatagagtgcatatatttaagcctgtctcggtacaggctatgtggtccgctctgcaatctctgcacaaggcttgtgaggtggctagggcacacaattactaccctgggagcctgttcttgacatgggtcagctattacgaatctcacattaactccgatcagtcttccgtgaacgagtggaacgccatgcaggatgtacagtcccatcgtcccgactcccccgcactatttacagatattcccaccgaaagagagcggacagagcgtctcatcaagaccaaactacgcgagatcatgatgcagaaagatcttgagaatatcacctccaaagagatcagaacagagctggagatgcagatggtatgcaatcttagagaatttaaggagtttatcgataatgagatgatcgtgatcttgggccagatggacagccccactcagattttcgagcatgtcttcctgggctcagagtggaacgcatccaatctggaagatctgcagaatagaggggtcaggtatatcctcaacgtcacacgtgagattgataatttctttccaggagtgttcgagtaccataacatccgagtgtacgatgaagaggcgacagacctactggcctattggaacgacacctacaaatttattagtaaagccaagaaacacggctccaagtgcctcgtgcactgtaagatgggtgtatcaaggagtgcaagtaccgtgatcgcctacgccatgaaagaatacggctggaacctggaccgggcctacgattacgtgaaagaacgccgtaccgtcactaaacccaatcctagctttatgcggcagctcgaagaataccagggcatcttgttggcctctaagcaaaggcacaataaactatggaggtcccattctgactccgacctgagtgaccaccacgaaccaatctgtaagccaggcttggagttgaacaaaaaggacatcacgacgtccgcagatcagattgccgaggtgaagactatggagtcccaccccccaatcccccctgtttttgtggagcacatggtgccccaagacgccaatcagaaggggctgtgcaccaaagagcgaatgatctgtctagagttcactagtagagagttccacgcaggccagatcgaagacgagttgaatctcaatgacatcaacgggtgttcaagcggatgctgtctgaacgaatctaagtttcctctcgacaattgtcatgcatcaaaggctctcatccagcctggccacgtacctgagatggctaataagttcccagatttaacggttgaggacctcgagaccgacgctctgaaagcagacatgaacgttcatctgcttccgatggaagagctcaccagcccactgaaggatccgcctatgagccctgatcctgagagtccttctcctcaaccaagttgtcaaaccgagatttctgactttagtaccgaccggatcgattttttttccgccttggagaaattcgttgagttgagtcaggagacgcggtcccgcagttttagccattctcgcatggaagaactcgggggagggcgcaacgagagttgtcggctttcagtggtagaggtggctccctctaaagtgactgctgatgaccaacgaagcagttctttatccaatacaccacacgcgtcggaggagagttcaatggacgaagagcagagtaaagcaatttctgaactggtatcaccagacatcttcatgcagtcccacagtgagaacgcaatcagcgtcaaagaaatagttaccgagatagagtcaatatctcagggggtgggacagatccagcttaaaggagacattttacctaatccatgtcacacaccaaaaaagaattcaatccatgagctgctcctcgaacgggcccagacgcctgaaaataagcccggccatatggagcaggacgaggacagctgcacggcacagcctgagcttgcaaaagacagtggaatgtgtaatcctgagggatgtcttacaacacattcctctatcgccgacctagaagagggtgagccagccgagggcgaacaagagttgcagggaagcggtatgcaccctggcgccaagtggtacccaggaagcgtgcggcgggccaccttagagttcgaagagcggctcaggcaggagcaagagcaccacggggccgcacccacctgtacatctcttagtacccggaaaaacagcaaaaatgactctagcgtcgccgacctggctccaaaagggaagagcgatgaggccccaccagagcatagctttgtgttgaaggaaccagaaatgtcgaaaggcaagggcaaatactcaggctccgaggctggtagcctgagtcacagcgagcagaacgcaactgtcccagcccctcgcgtcttagaatttgatcacctgccggatcctcaggagggccccgggtcagacactgggactcaacaggaaggggttttaaaggatctgaggaccgtgattccatatcaggaaagcgagactcaggctgtgccgcttccactgccaaagagggtggaaattattgagtacacccacattgtgacgtcccccaaccacaccggcccaggctcagagatcgcaactagcgagaagagtggagaacaggggctacgcaaggtgaatatggaaaagagtgtgactgtcctctgcaccttggatgaaaacctgaacagaacactggatcctaatcaggtgagtctgcacccacaggttctgcccctcccccacagttctagccccgagcataataggccaactgatcaccccacgtccatcctgtcatctccggaagatcgggggtcaagtctcagcaccgctctggagacggccgcgcccttcgtgtcacatactacacatctcctgtctgcgagtcttgattacctgcatccacagactatggttcacctcgagggattcaccgaacagtcttccaccacagacgaaccctcggccgaacaagtgtcatgggaagagtcccaggagtctcctcttagcagcggtagtgaggttccttataaagactcacagctgagcagtgcagacctgagtttaatttcaaaactcggggacaatacaggagagttacaggagaagatggacccactgccagttgcctgtcggcttccacactccagttcttctgaaaacatcaaatccctgagccattccccaggggttgtgaaggagagggccaaagaaattgagagtcgcgtggtgtttcaagccgggctcactaaacccagccagatgagaagatcagcttcactcgccaaactgggatacctggacttatgcaaagactgccttcccgagcgcgagcctgcttcttgcgagtccccgcaccttaaactcctgcagccattcttgagaacagattcgggcatgcatgcaatggaggatcaggagtcactcgagaatcccggagctccacataatcctgagccaaccaaatccttcgtggaacagctgacaactacagagtgcattgtgcagagcaagcctgtcgaaaggcctttggtgcaatacgcgaaagagtttgggtcttcacaacaatatctccttccccgggctggcctggagttaacttcctctgaaggggggttgcccgttctacagacccagggcctgcaatgtgcctgcccggctcccggtctggcagttgcgccgcgccagcagcacggcaggacccaccccctgcgccgcctcaagaaagccaatgacaagaagaggactactaacccattctacaacacgatgtag

SEQ ID NO: 205291 - DNA, 609 bp, synthetic construct
  misc_feature 1..609: note = Description of Artificial Sequence: Synthetic coding sequence
  source 1..609: mol_type = other DNA
atgaccctgagcaccctggcccggaagcggaaggcccccctggcctgcacctgtagcttgggagggccggatatgattccatatttctctgcgaatgccgtcataagccagaatgccatcaatcagctaattagtgaaagctttctcaccgtcaaaggcgctgctctgtttttacctagggggaacggcagttcgacgccacgcatttcgcatagaaggaacaaacatgctggcgacttacaacagcacctgcaggcgatgtttattctgctgcggccagaggacaatattagactcgctgtgcggctggagtccacttaccaaaacagaacacgctacatggtggtggtcagtactaacggacgccaggacaccgaagagtctattgtgttgggtatggattttagttccaatgatagctctacctgcacaatgggtctggtgctccctctctggagtgacactttaatccacttagacggagacggcggctttagcgtgagcactgacaaccgggtgcacattttcaaacctgtgagcgtccaagccatgtgggtagatcgggacagcagaaacaagcactgtgatgtactgttggtcgaagagtag

SEQ ID NO: 205292 - DNA, 1350 bp, synthetic construct
  misc_feature 1..1350: note = Description of Artificial Sequence: Synthetic coding sequence
  source 1..1350: mol_type = other DNA
atggccctggtgaccgtgcagcggagccccacccccagcaccaccagtagcccatgtgccagcgaggccgacagtggtgaagaggaatgtcggagtcaaccccgtagcatcagtgaaagtttcctcaccgtgaagggcgctgcgctcttcttgcctcgaggaaacggatcctctaccccacggatctcgcaccgccgtaataaacacgcgggtgatctccaacaacacctccaggccatgttcatcctcctgaggcctgaagacaatatcagactggctgtcaggctcgagagtacctatcaaaataggacaaggtatatggtagtagtctctacaaacggccgccaggatacggaagagtccatcgtgttaggcatggatttttcgagcaatgattctagcacctgtaccatgggcctggttttgcccttatggagtgacacactgattcatctagacggtgatgggggattctccgtatccacagataaccgcgtgcacattttcaagccggtgtccgtacaagcgatgtggagcgccttacagagcctccacaaggcttgtgaggtggctagagcacacaattactatcccgggtccctttttctcacctgggtgagttattatgagtcacacatcaactctgatcagtcgagcgtcaacgaatggaacgcaatgcaggacgtgcagagccataggcccgattccccagccctcttcacagacatccccaccgaacgggagcgcactgagaggctgattaaaacaaagctgcgggaaattatgatgcagaaagaccttgaaaacattacatccaaggaaattcgcaccgagctcgaaatgcagatggtatgcaacctgcgggagtttaaggagttcattgacaacgagatgatcgtgattctggggcaaatggatagtcccacgcagatctttgagcacgttttcctgggttctgagtggaatgcatcaaacctggaggacctgcaaaacagaggtgtgcgatacatcctaaacgtcactcgcgaaatagacaacttttttcctggtgtcttcgagtatcataacatccgcgtgtatgatgaagaggcgacagatctcctggcatactggaatgatacctacaaatttatttccaaagccaaaaaacatggctctaaatgcctcgtccactgtaagatgggtgttagcaggtcagcaagtaccgttatcgcctatgccatgaaggagtatgggtggaatctggatcgggcttatgactatgtaaaagagaggcggacggtgaccaagcccaacccgagttttatgcggcagctggaggagtatcagggaatcctacttgcccgctag

SEQ ID NO: 205293 - DNA, 4353 bp, synthetic construct
  misc_feature 1..4353: note = Description of Artificial Sequence: Synthetic coding sequence
  source 1..4353: mol_type = other DNA
atggccctggtgaccgtgcagcggagccccacccccagcaccaccagtagcccttgcgcatctagctctcaccttgaagatagtgagtccgccgccttgctctgctgtgaatgcgaagagtcagaaattttcaccgactctaacgaggccgactctggcgaggaggaatgtcgatcgcagcctcgaagcatcagtgagtctttccttacagtgaagggcgcagcactgttcctccctcgggggaacggcagtagcaccccccgcatcagtcaccgtcgcaacaagcatgctggggatctgcaacagcacctgcaggctatgtttatactgcttcggcccgaagataacattcgactagccgtaagattggagagcacttaccagaaccggactagatacatggtcgttgtaagcacgaacggccgccaggatactgaagagtctatagtcctgggcatggacttctcatccaatgacagctcgacgtgcacaatgggcctggttctgccactgtggtcggataccctcatccacctcgacggggatggcgggtttagtgttagcactgacaatcgcgtacatatctttaagccagtatctgtgcaggcaatgtggtcggctctgcagtctcttcataaggcctgcgaggtggctagagcccacaactactacccgggtagtctgtttctgacctgggtgtcttattatgagtctcacattaattctgatcagtccagcgtgaatgaatggaacgctatgcaagacgtgcagtcacaccggccagactctccagcactcttcaccgacatccccaccgagagggagagaaccgagcgcttgattaaaacaaaactgcgggagatcatgatgcagaaggacctcgagaacatcaccagcaaagaaatccggaccgaactcgaaatgcagatggtgtgtaacctgcgggaatttaaggaattcattgataatgagatgatcgtgatcctgggacaaatggatagccccacccagatcttcgaacatgtattccttggctctgaatggaatgcctctaatctcgaggacctccagaatcgcggcgttcggtacatcttaaatgtcactagggagatagacaatttttttccaggagtattcgaataccataatattcgagtttatgacgaagaagcgactgatctgctggcatattggaatgatacctataagtttatctccaaggccaagaaacacggttcgaaatgtctggtccattgtaagatgggcgtatcgcgctccgcatcaacggtcattgcctacgctatgaaggaatatggatggaatttggatagagcctacgactacgtgaaggaacggcgaactgttaccaaacccaatccctccttcatgcgtcaactcgaagagtatcagggtattcttttagcgtcaaaacagcggcataataaactgtggcgcagccatagtgacagtgatctgtcagatcatcacgaacccatatgtaagcctggcttggaactgaacaagaaagacattaccaccagcgcagaccagatcgccgaggtgaaaaccatggaatctcaccccccgatcccaccggtctttgtggaacatatggttccccaggacgcaaatcagaagggcctgtgcacgaaggaacgaatgatctgtctcgagttcacttctcgagaatttcacgccggccagatagaagacgagctcaacctcaacgacattaatgggtgcagctccggctgctgcttgaatgagagcaaattcccgctggataattgccacgcctcgaaagctctgatacagcctgggcacgtgccggagatggcaaacaagttccccgacctcaccgtcgaggatctcgagactgatgcacttaaagctgatatgaacgtgcacttgcttccgatggaggagttaacatcacctttgaaggaccctcctatgtcccccgatccagagagcccgagcccacagccctcctgccagacggagatttctgacttctcaacggaccgcatagatttcttttctgcacttgagaaattcgtggagctgtcgcaggaaacacgcagtagaagtttctcccatagcagaatggaggagctgggcggggggagaaatgaaagttgccggctatcagttgtcgaggtggccccttcaaaagtgacggccgacgaccagcggagtagctcactctccaatactccgcacgcgagcgaggagtccagcatggatgaggagcagtccaaggccattagcgaactggtgtcccccgacatatttatgcagagccactccgaaaatgccatttctgttaaagagattgtgacagagatcgagagtatttctcaaggtgtcgggcagattcaactaaaaggggacatcctgcccaatccctgccatacacccaagaagaattccatccacgagttgctcctggagagagcccaaactcccgagaataagccaggtcatatggaacaagacgaggactcctgtacggctcaacctgagctggccaaggatagcggtatgtgcaatccagaaggttgtctgacgacccactcttcaattgctgatctggaggagggtgagcccgccgagggcgaacaggagctgcaaggcagcgggatgcaccctggggccaagtggtatcccgggagtgtgaggcgggcgactctcgaatttgaggagcgcctgcgacaggagcaggaacaccacggtgcggccccaacatgtacctccctatccacgcgcaaaaatagtaaaaatgactcttcagtggcagacctcgcaccaaagggtaagtccgacgaggccccaccagagcatagcttcgttctcaaagaacccgaaatgtctaaaggtaagggtaagtactctggctcagaggctggctctctgtctcactcagaacagaatgcaacggtgccggctccacgggttttggaatttgaccacctgcctgatccgcaagagggccccggaagcgacacaggaacacagcaggagggtgtgctgaaggatctccgcaccgtcatcccttaccaagagtctgagacccaggccgtgccactgcccttgccaaaacgtgtagagattatcgagtacacacacattgtgactagtccaaaccatactgggccagggtcagagatcgccaccagcgagaaatctggagagcagggccttaggaaggtgaatatggaaaaaagtgtgactgtgctgtgcacgctggacgagaatctcaaccggactcttgatccaaatcaagtatccctgcatcctcaggttctccccctgccacatagtagctcccctgaacacaaccgccccacggatcatcctactagtatactcagctcccccgaagatcggggatcatccctgtccacagcgctcgagaccgccgcgccattcgtgagccatactactcatcttctctcggccagcctcgattacctccatccccagaccatggtacaccttgaaggcttcactgaacagagcagtaccacggacgagcccagtgctgaacaggtgtcatgggaggaaagtcaagagagtccactctcctctggctcagaggtcccttacaaggatagccaactatcatcagctgatctctcactgatcagtaaactcggtgacaacacaggtgagctccaggaaaagatggacccactgcctgtagcttgccgcttacctcattcttcctcctctgaaaacataaagtctttgagtcactctcccggagtggtgaaagagcgcgctaaggaaatcgaaagcagggtggtgtttcaggctggactaacaaagcctagtcagatgcggagatcagcatccctggccaagctgggttatctcgatctttgcaaggactgccttccagaacgggagcccgcatcgtgcgaatcaccccatctcaagctgctgcagccctttctcaggaccgatagcggcatgcacgcaatggaagaccaggagtctcttgaaaaccccggtgcccctcacaatcctgagccaactaagagcttcgtcgaacaactgacgacgactgagtgcatcgtccagtctaagccagtagagagaccactcgtacagtacgcgaaggaattcgggtcatctcagcagtatctactccccagagccggattggaattgacaagctccgagggtggcctccctgtgctgcagacacaagggctccagtgcgcttgccccgcgccaggtttggctgtggccccacgccaacagcacggtcgcacccacccgctccgtaggctgaagaaggcgaacgataaaaagagaaccacgaaccccttttacaatacaatgtag

SEQ ID NO: 205294 - DNA, 1980 bp, synthetic construct
  misc_feature 1..1980: note = Description of Artificial Sequence: Synthetic coding sequence
  source 1..1980: mol_type = other DNA
atggccctggtgaccgtgagccggagcccccccggcagcggcgccagtactccggttgggccctgggatcaggcagttcaaaggaggtccagattgcagagaaggcagtcatttgcagttctgcggggtgccgtgctcgggctgcaggacggcggggacaatgatgacgcagctgaggcttcctctgagcccaccgagaaggccccgtcagaagaggaacttcatggtgatcagacagactttggccaaggaagccagtcaccccaaaagcaggaggagcagcggcaacacctccacctaatggtacagttgctgagacctcaggacgatattagattggcagcgcagctggaggccccaaggccccctcggttacgctatctccttgtggtttcaacccgagagggtgaaggcttgtctcaggacgagaccgttttattgggagtcgactttccagatagctctagcccttcctgtaccttaggcctcgtcctgcccctatggtcagatacccaagtttacctcgacggtgacggaggcttctctgtgacttctgggggacagagccgaatctttaagcccatctccattcagacaatgtgggccactttgcaggtgctgcatcaagcatgcgaggctgcgctgggctcgggcctcgtaccaggaggctcggcgcttacatgggcttcacattatcaagagcgcctaaacagcgagcagtcgtgcctcaatgagtggaccgctatggctgacctggagagtctacggcccccaagtgcagagcctggaggtagctccgagcaggaacaaatggagcaagctattagagcagaattgtggaaagttctggacgtctcagacctggagtccgtgacttcgaaggagatacgccaggcactggagttaaggcttggcctccctcttcaacaataccgggatttcattgacaatcagatgctccttctcgtagctcaacgtgaccgcgcttcccgcatattcccacacctgtacctggggagcgaatggaatgccgctaacctggaggagctgcagcggaatagggtgacacacatcttgaacatggctcgcgagatagataacttctacccagaaaggtttacgtaccataatgtgaggctgtgggatgaagaatccgcccagctgctgcctcattggaaggagacccaccgtttcatcgaggcggcccgggcacaaggtacacacgtgttggttcactgcaagatgggagtatcccgcagcgcagccactgtgttggcttacgctatgaagcagtacgaatgcagtctggagcaagctctgcggcacgtccaggaattaagacccattgctagacctaatcctggatttctgcgccagctccaaatctaccagggtattttgactgcgagccgccagagtcacgtgtgggaacagaaagtgggaggcgtctcgcccgaagagcaccctgcgccagaagtttcaaccccattcccccctctaccacccgaacctgagggagggggggaagagaaggtcgtgggcatggaggagtcccaggcagcaccaaaggaagagccggggccaagaccaaggattaacttgcgtggtgtcatgaggagtatctcactccttgaaccaagcctggagttggagagcaccagtgagacctcagatatgcccgaagtctttagcagccatgaatcttctcatgaggagccactgcagccgtttccacagcttgcccggacaaaaggtggccagcaggtcgacagaggcccacagcccgcactgaagtctaggcagtctgttgtcactctgcagggcagcgctgtagtcgcaaacagaacacaggcttttcaggaacaggagcaggggcaggggcagggccagggcgagccgtgcatttcaagcacgcccagattccgaaaagtagtacggcaagcgtctgtccacgacagtggagaggaaggcgaggcctag

SEQ ID NO: 205295 - DNA, 2091 bp, synthetic construct
  misc_feature 1..2091: note = Description of Artificial Sequence: Synthetic coding sequence
  source 1..2091: mol_type = other DNA
atgctgctgtggatcctgctgctggagaccagcctgtgcttcgccgccggaaatgtgacaggtgacgtgtgtaaggaaaagatctgttcgtgtaatgagatcgaaggcgatctccacgttgactgcgaaaaaaagggattcaccagtcttcagagattcacagcaccaacttcccagttctaccacttgtttcttcatggaaattccctaactcgcttatttccgaacgagttcgctaacttttacaacgcagtctctctccatatggaaaacaacggcctgcacgagattgttcctggagcattcctaggcctccaactggtgaaacggttgcacattaataacaacaagataaagtcattccgcaagcagacctttctgggcctggatgatctggagtacctccaggcggattttaacctgttaagggatattgacccaggagccttccaggatctgaacaaactggaggtgctaatcctgaatgataatttgatttccaccctgcctgctaatgtatttcagtacgttccgattactcacctggacctgagggggaatcgactgaaaaccctaccatacgaagaagtcttagaacagatccccggaatcgccgagatcctgcttgaggataatccatgggactgcacttgtgacctcctatcactgaaagagtggttagaaaacatcccaaaaaacgctttaataggacgcgtggtatgcgaggctccaacccgccttcaaggaaaggatcttaacgagactactgaacaagacctctgccctctgaagaaccgggtggattcttcactccctgctcccccggcccaggaggagacttttgcacccggaccgctccccacccccttcaagaccaatgggcaggaagaccatgctactcctggatccgctcccaacggcgggacgaaaatccctggcaattggcaaataaagattcggcccactgctgccatcgctactggcagctcccggaacaagccactcgccaacagcctgccatgcccaggcgggtgtagctgcgaccatattccaggtagcggcctgaaaatgaattgcaataaccgtaatgtcagctcgctggcagatctgaagcctaaactgtccaatgtacaggaattgttcttacgggataacaaaattcactcaatacggaagagccactttgtcgactacaagaatctgatcctcttagacctgggcaataataatattgctaccgtcgaaaataatactttcaagaatctcctggatttgcgttggctgtatatggattctaactatctcgacaccctgagtagagagaaatttgcaggcttgcagaatttggaatatttaaatgtcgagtacaatgccattcaattaatactacccggtacatttaacgctatgcctaaattaaggatcctgatcctgaataataacttactgaggtctcttcccgtcgatgtgtttgcaggggtcagtctgtctaaactttcccttcataacaattactttatgtatctcccggtcgccggggtgctggatcaattaacaagcataatccagatcgatcttcatggcaatccctgggaatgcagttgtactatcgtgccttttaaacagtgggcggagaggctcgggtcagaggtgcttatgagcgacctcaaatgcgagactccagtcaacttctttagaaaggacttcatgctcctttcaaacgacgagatttgtcctcagctttatgctcgaatatccccgacactgaccagtcactcgaagaatagtaccggcctggctgagaccggcactcactcaaacagttacctggatactagtcgggtatcaatttccgtcctggttccaggtctcctactcgtgttcgtgacatctgcttttaccgtcgtggggatgctggtgtttatcctgagaaataggaaacgctctaagcgccgcgatgccaactccagcgcttccgaaataaacagcctacagactgtgtgtgatagctcctattggcacaatggcccctataatgcggacggagctcatcgggtgtacgactgtggtagtcacagtctatccgattag

SEQ ID NO: 205296 - DNA, 2175 bp, synthetic construct
  misc_feature 1..2175: note = Description of Artificial Sequence: Synthetic coding sequence
  source 1..2175: mol_type = other DNA
atgctgagcggcgtgtggttcctgagcgtgctgaccgtggccggcatcctgcagacagagtctcgaaagaccgcgaaggatatttgtaagattagatgcctctgcgaagaaaaggagaacgtgctgaacatcaactgcgaaaataaaggcttcacgaccgtgtctctgctgcagccaccacagtaccggatctatcaactatttttaaacgggaacctgttaacccgactgtaccccaatgagttcgtgaattatagcaatgccgttacactgcatctcggcaacaacggccttcaggaaatcaggactggcgccttttcaggtctcaaaactttgaaaaggctccacctgaacaacaataagctcgaaatcctgcgggaggatacatttctgggattggaaagtttggagtatctccaagccgactacaattacatttccgctatagaggccggggcattcagcaagctcaacaagctgaaagtgctgattctcaatgacaatctgcttctatccttgccaagcaacgtgttcagattcgtgctgctcactcacctggatctccgggggaataggctcaaggtgatgccgttcgcaggcgttttagaacacataggagggatcatggagatccagctcgaagaaaatccgtggaattgtacctgcgacctgctgccattgaaggcttggctggacaccatcactgtgtttgtgggagagattgtctgtgaaacccctttccgactccatgggaaagacgtgactcaactaaccagacaggacctgtgtccacgtaagtctgcctccgacagctctcaacgcggcagccacgctgatactcacgttcagcgcctgtctcctaccatgaatcctgcactgaaccccacccgagccccgaaagcatctcgccctcccaagatgcgcaaccgcccaactccgagggtaaccgtctctaaagacaggcagtcctttggcccgattatggtgtatcagaccaagtcacctgtccccctcacctgtccttcttcttgcgtgtgcacttctcagtcatctgacaacgggcttaacgttaactgtcaagaaagaaagtttacaaacattagcgacctgcaaccaaaacccacttcacctaaaaagctttacctcaccggaaattacctgcaaacagtgtacaagaatgacctcctggagtattcctccctagacttacttcacctcgggaacaaccgaattgcagtgatacaggagggggcttttaccaatctcacatctctccgccgtttatatttaaatggaaattacctcgaggtgctctacccttctatgtttgatggcttgcaatctttgcagtacctgtatcttgaatacaacgttattaaagaaataaagccactgacattcgatgccctgatcaatcttcagctgctttttctgaacaacaatttgctcaggtctctgcctgataacatttttggagggacagctctcactaggctgaacctgaggaataaccacttctctcatctgcctgtgaagggggtgctcgaccagctacctgctttcattcagatcgatctgcaggagaatccgtgggattgtacctgtgatataatgggtcttaaagactggactgagcatgccaactctccggtgataatcaatgaagtcacctgcgaatctccggccaaacacgcgggagagatcctgaaatttctggggagagaggctatctgccccgacagccccaatctttccgacgggacagtgctctccatgaaccacaacactgacacgccacggtccttatccgtatctccttcttcctaccctgaattacatacagaagttccattaagtgtgctaattttaggcctcctggtggtgtttatattgtctgtctgcttcggcgccggcctgttcgtatttgtgctcaaacggaggaagggggtgccatccgtgccacgcaataccaacaatcttgacgttagctccttccagctccagtacggatcctataatacagagactcacgataagaccgacggccacgtttataactatatcccacctccagtgggacagatgtgccagaatcctatttacatgcagaaagaaggtgaccccgtggcatactacaggaacctgcaagaattttcctactctaacctggaatag

SEQ ID NO: 205297 - DNA, 2538 bp, synthetic construct
  misc_feature 1..2538: note = Description of Artificial Sequence: Synthetic coding sequence
  source 1..2538: mol_type = other DNA
atgctgagcggcgtgtggttcctgagcgtgctgaccgtggccggcatcctgcagactgaatcgaggaagaccgcgaaagacatctgtaaaattcgctgtctctgtgaagagaaggaaaatgtactgaatataaattgtgagaacaagggctttactactgtgtctctcctgcaacccccgcagtataggatctatcagctgtttttaaacggtaacctgctaactagactgtacccgaatgagtttgttaattacagtaatgctgtgacactgcaccttggaaacaatggtttgcaagagatcagaactggcgccttttctggcttaaaaactctgaagaggctgcaccttaacaataataagctcgaaattctgcgcgaagatacattcttgggcctggaaagtctcgaatacttacaggccgactacaattatatcagcgctatcgaggccggagcgttcagcaaactcaacaagctcaaggtcctgatcctcaatgacaacttgctgctctccctgccctccaatgtctttagattcgtgttgctgacccatttagatctgcgaggaaacagactaaaggtgatgccattcgccggagtgttggaacatatcggaggcatcatggaaatccagctggaggaaaatccctggaactgtacctgtgatctgctgccacttaaggcctggctggacacaattacggttttcgtgggtgagattgtttgtgaaacgccatttaggctgcacgggaaagacgttacccagttgacccgccaggacctttgccctcgcaaaagtgcatccgactcttctcagcggggctcgcacgctgacacccacgtccaacgcttgtcgccaactatgaatcccgctcttaatcccaccagagcacccaaggcgtctcgccctccgaagatgcgcaatcggcccaccccaagggttaccgtgtctaaggatcggcagtcattcggacctattatggtctaccagaccaagagccccgtaccacttacctgccctagtagctgtgtgtgcacctctcagtcctcagataatggtctgaatgtaaattgccaggaaaggaagtttacaaatatatcagaccttcagcccaaacccacgagcccaaagaagctttaccttaccggaaattacctgcaaacagtgtacaaaaatgatctgctcgaatattcgtccttggacctccttcacttggggaataatagaattgcagtcatccaggaaggcgcctttaccaatttgacttcactccggcgtctgtatctgaatggcaattacctggaagtcttgtacccatcaatgttcgatggccttcagtctttacagtacctgtacctggaatataatgtgatcaaggagatcaaacccctgacgttcgacgctctgattaaccttcagctgctgttcctaaacaataatttgctgagatctctccctgataacatcttcggagggacagccctgacacgcttgaacctgagaaataaccatttttcccacctccctgtaaagggtgtcttagatcagctgccggcttttattcagattgatctgcaggaaaatccttgggactgtacctgtgatattatgggcttgaaagactggacagagcacgcaaattcccccgtgataattaacgaagtgacctgtgagagccctgccaagcatgcaggtgaaatcttgaagtttctgggtcgcgaggccatctgtcccgatagccccaatctcagtgatggtacagtgctctcgatgaaccacaataccgacacacctcggtcattaagcgtgtccccctcatcttaccctgaactgcataccgaagtccctttgagtgtcttaattctgggactccttgttgtgtttatcctatccgtatgctttggggctggcctgtttgtttttgtcctgaagcggcggaaaggagtcccctccgtacccagaaacacaaacaacctggacgtcagttcctttcagctgcagtacgggtcctacaatacagaaactcatgacaagacggacggtcacgtctacaactatataccccctccagtggggcaaatgtgtcagaatcccatatacatgcagaaagagggcgatcccgtcgcgtattacaggaatctccaagaatttagctactctaatctggaggaaaaaaaggaagagcccgccacgcctgcttacactatatctgccactgagctgctcgagaagcaggcgacaccccgggaacccgagttactgtatcaaaacattgctgaaagggtgaaagagctgccttcagctggattggtgcattataacttttgcacactgccaaagaggcagtttgctccctcctacgagtcaaggcgccagaatcaggatcgaatcaataaaacagtgctatacggtacgcctcggaagtgctttgtgggccagtccaaacccaatcacccactgctgcaggccaaaccacagtccgaaccagactacctggaggtcctggagaaacagaccgcaatctctcagctgtag

SEQ ID NO: 205298 - DNA, 2538 bp, synthetic construct
  misc_feature 1..2538: note = Description of Artificial Sequence: Synthetic coding sequence
  source 1..2538: mol_type = other DNA
atgctgagcggcgtgtggttcctgagcgtgctgaccgtggccggcatcttacagaccgagtcccggaaaacagcaaaggacatctgcaaaattcggtgcctgtgtgaagagaaggaaaatgtccttaatatcaactgcgaaaataagggatttactacagtgtctctccttcagcctcctcaataccggatctaccaactgtttctgaatggcaaccttctgacgcgtttatatccgaacgagtttgtgaactacagcaacgccgtgactctgcacctcgggaataacggcctacaagaaatccgtactggggccttctccggactcaagaccctgaaaaggctgcatctgaacaacaacaagctggagattctcagggaagataccttcttgggcctggaaagcctcgagtacctgcaggccgattataactacatcagtgccattgaagcaggagcttttagcaagctgaataagctgaaagtgctgatccttaacgataacctgttgctaagtctgccaagcaatgtcttccgctttgtgctcctcacccatcttgatctccgtggaaatcggcttaaggtgatgccctttgctggcgtgctggagcatatcgggggcatcatggaaatacaactggaagagaacccatggaactgtacatgcgaccttctccctcttaaggcatggctggataccataactgtgttcgtgggagagatcgtctgtgaaacgccctttcgactgcatggaaaggatgttacacaacttactaggcaagacctgtgcccgcgcaaatccgcctctgatagctctcagagaggcagtcacgctgacacacacgtgcaacggctctctccaactatgaaccccgccctcaaccccaccagggcaccaaaagcatcccggccaccgaaaatgcgcaacagacccacaccacgggtgaccgtctccaaggacagacagtcgttcgggcctatcatggtctaccagacaaaatcacccgtgcctctcacctgtccctctagttgcgtgtgtacttcacagtctagcgataatggacttaatgtaaattgccaggaaagaaagtttaccaacatcagcgacttacaaccgaagcctacttcaccgaagaagctctacctgaccggaaattatctccagactgtgtataagaatgacctgctggaatattcttccctcgatctgcttcatttgggaaataatcgaatcgctgtgattcaggagggggcattcactaacctcacatcactgcgacgattgtatctgaacgggaattatctggaggtactctacccctcaatgttcgacgggctgcaatcattacagtatctgtacctggaatacaatgtgataaaggagatcaagccactgaccttcgatgcactgataaatctgcagctgctgtttctcaataacaatttgctgcgtagcttacccgataatattttcggcgggactgcactgacgcgactgaacctgcggaacaaccacttctctcatctgcctgtgaagggtgtgctggaccagctaccggccttcattcagatcgatcttcaggaaaatccttgggactgtacctgcgacattatgggactgaaagactggaccgaacatgccaattcaccagtgatcataaatgaagtcacctgtgaatcgccggccaagcacgcgggtgagatactgaaatttctgggtcgcgaagcaatctgtcctgattcacccaatctgagtgatggcaccgtactgtctatgaaccacaatactgataccccccgttcactttcagtgtccccatcctcttacccagagttgcacaccgaggtgccattatctgtcctgattctgggactcttggtggtgtttattttgagtgtctgctttggagccgggctattcgtgttcgttctcaaacgtcgtaagggagttccgtcagtcccacggaatactaacaacctggacgtcagcagcttccagctgcagtacgggtcctacaataccgaaacacatgataaaacggatgggcacgtatacaactacatccctccccccgtgggccagatgtgtcaaaaccccatctatatgcagaaggaaggcgaccctgttgcctattacaggaatttacaggaattcagttattctaatctggaggagaagaaggaagaaccagcgactccagcgtacactatatctgccaccgagctcctggaaaagcaagcaaccccacgggaaccggagctactataccaaaatattgccgagcgcgtaaaagagctgccatctgccgggctcgttcactataacttctgcacactgcccaagagacaatttgcaccctcatatgaaagccgtagacagaaccaggaccggatcaacaagacagtgttgtatgggacgcccagaaaatgtttcgtggggcaaagtaagcccaaccacccgctgctgcaagctaaacctcagtctgagccggattacttggaggtgctggaaaagcaaaccgccattagtcagctatag

SEQ ID NO: 205299 - DNA, 2538 bp, synthetic construct
  misc_feature 1..2538: note = Description of Artificial Sequence: Synthetic coding sequence
  source 1..2538: mol_type = other DNA
atgctgagcggcgtgtggttcctgagcgtgctgaccgtggccggcattctgcaaacagagtccagaaaaaccgcaaaggatatatgcaaaattagatgcctctgcgaagagaaggaaaatgtactaaacattaactgtgagaataaagggtttactactgtgtccctgctgcaacccccccagtaccggatctatcagttattcctgaacggtaatctcctgactcgcctctatcctaacgaattcgtgaactacagcaatgccgttaccctacacctgggcaacaacggactgcaggagatccgcacaggagcgttttcggggctcaagacccttaagcgcttacacttgaacaacaataagctcgagatcttgcgggaggacaccttcttaggtttagagagcctggaatatcttcaggcggattataactacatcagtgcgatagaggcaggggcctttagtaagctcaacaagttaaaggtcttaattctgaacgacaacctgctgctgtccctcccgagcaatgttttccgttttgtcttgctcactcacctcgacctcagaggtaacagactcaaagtgatgccctttgcgggagtgctggagcacatcggtggaattatggaaatccaactagaagagaatccctggaattgcacctgcgatctgctcccactgaaagcgtggctggatacgatcactgtatttgtcggcgagattgtgtgcgagacaccgttccgcctccacggcaaggacgtgactcagctgaccagacaggatctctgtcctagaaagtcagcgtccgatagtagtcaaagggggtcacatgccgacacacatgtacagagactgagtcccacaatgaatcctgcgttgaatcccacgagggcccctaaggcatcccggcctcctaaaatgagaaaccggcctacccctcgagtgacagtctcaaaagaccggcagagctttggcccgatcatggtctaccagaccaaaagcccggtaccgttgacatgccctagctcttgtgtctgcacatcccagtcttctgacaatggcctgaatgtgaattgccaagagcgaaaattcaccaacatctccgacctgcagcctaagcctacatctcccaaaaaactctacctgactggcaactacctgcagactgtttataagaacgacctcctagaatatagctcccttgacctgttgcacctaggcaacaaccgcatagccgtgatccaggagggcgccttcaccaacctcacctcgctgcgccgtctctacctaaacggaaattatctggaggtcctgtacccttccatgtttgacggcctgcagtctctgcagtacctgtacttggagtataatgtgatcaaggaaattaaacccttgaccttcgacgctctcatcaatttgcaattactcttcctgaataataaccttttaagatctcttcctgataacatttttggagggaccgcactgacgcgattgaatttgaggaacaaccacttctcacacctccctgtcaagggcgtgttggaccagctcccagcatttatccagattgacctgcaagaaaacccctgggactgcacgtgtgacatcatgggcttgaaggactggactgagcacgccaattcacctgttatcatcaacgaggttacgtgtgaaagccccgcgaagcacgccggggagatcctcaagtttctgggacgggaagctatttgtccagacagtcctaatctgtcagacggcacagtgctgagtatgaaccacaacactgacacgcccaggagtctgtcagtgtcccctagtagttacccagagttgcatacggaagtccctcttagcgtcctgatcctcggattactagtcgtgttcattcttagcgtatgctttggcgccgggctgtttgtctttgtcttgaagaggcgtaaaggcgtgcctagcgttccaaggaataccaacaatcttgacgtcagcagtttccagctccaatatggcagctacaacactgagactcatgacaaaacagatgggcatgtctacaactacattcctccccccgtgggccaaatgtgccagaaccctatctacatgcaaaaagagggggaccccgtggcctactaccgaaatctgcaggaattctcctatagcaatctcgaagagaaaaaagaagaaccggctacacctgcctatacaatctctgccactgagctcctggagaagcaggcgaccccacgggaaccagaactcctgtaccagaacatcgctgaaagagttaaagagcttccttctgctggcctggtgcactataatttctgtacccttccaaagcgtcagtttgcacctagttacgaatcccgtcggcagaatcaggatcgcattaacaagaccgtcctctacggtacacccaggaagtgctttgtcggtcagtccaaacctaaccatcctctgcttcaggctaaacctcagagtgagcctgactacttggaagtgttggagaagcagaccgccataagtcagctatag

SEQ ID NO: 205300 - DNA, 2538 bp, synthetic construct
  misc_feature 1..2538: note = Description of Artificial Sequence: Synthetic coding sequence
  source 1..2538: mol_type = other DNA
atgctgagcggcgtgtggttcctgagcgtgctgaccgtggccggcattcttcagacagagagcaggaaaacagcaaaggatatttgcaagatacggtgcctgtgcgaagagaaggaaaacgtcctaaacattaattgcgagaacaaaggctttactactgtaagtctgcttcagcctccccagtatcggatttaccagcttttcctaaacgggaacctgctgacccgactgtacccgaatgaatttgtgaactattccaatgcggtgactctccacctggggaataacgggctacaagagattagaaccggggctttcagcgggctcaagacgctaaaaagactgcacctgaataacaataaactggaaatcctgcgggaggacaccttcctcggtctcgaatccctcgaataccttcaggctgattataactacattagcgccattgaagccggtgcattttcaaagctcaacaagctgaaagtgctgatcctgaatgacaacctgctgctgtcattaccaagtaatgttttcagatttgtcttattgactcatctggaccttcgagggaacaggctgaaggtgatgccattcgccggagttctcgagcacatcggggggatcatggaaatacagcttgaagagaacccttggaattgcacatgtgatttgctgcccttgaaggcttggttggacacaataactgtgtttgtgggagaaatcgtgtgtgaaacacccttcaggctacacggtaaggatgtgacccagttaactagacaggatttatgccctcgcaagtccgcgagtgatagctcacaaaggggtagtcatgcggatacacacgtccagagactgtcacctacgatgaaccctgcactgaatcctaccagagcccctaaagccagcaggccgccgaagatgagaaaccgaccaacacctcgggtcaccgtgagcaaagatagacagtctttcggccctattatggtgtatcagaccaagtctcccgtgcccctaacgtgcccctcaagttgcgtgtgcacgtctcagtcaagcgataatggcttgaatgtcaattgtcaggaacgtaaatttaccaatattagtgaccttcagcctaagcccacctctcctaagaagctgtacctgacaggaaattacttgcaaaccgtttataagaacgacttgctagagtactcttcactcgatctcctgcatttaggaaacaatagaattgctgttatccaggaaggagctttcacaaatttgacaagtcttcgacgcctctacctcaacggtaactatttagaggttttataccctagtatgtttgacgggcttcagagcctacagtatttgtacctggaatacaacgtcattaaggagatcaagccattgacattcgacgccctaattaatctgcaactacttttcttaaataataacctgttgcggagtttgccggataatatcttcggtggaaccgccctgacacgcctgaatctccggaataaccacttttcccatctgccggtcaagggggtcctggatcaactgccagcatttattcagatagacctgcaggaaaatccatgggattgtacttgcgatataatgggccttaaagattggaccgagcatgccaacagtccagtcataatcaatgaagtgacttgcgagtctccggccaaacacgctggcgagatcctgaaattcctgggccgagaggcgatatgcccagactcccctaatctcagtgacggtactgtactctccatgaaccacaataccgacacaccccgttctctgtcagtgagtccaagttcataccccgagctccacactgaagtcccactcagcgtcctaatactcggcctgctggtcgttttcattctaagcgtctgctttggcgctggccttttcgtttttgtcttaaaacgccggaagggagtgccgtccgtcccccggaacactaataatctggacgttagcagtttccagctgcagtacggcagctacaacaccgaaacccacgacaagacagacggccacgtttacaattacatcccaccacccgtcgggcagatgtgccagaatcccatttacatgcagaaagagggagaccccgtcgcttattaccgcaacctgcaggaattttcctatagtaaccttgaagagaaaaaagaggaacccgcaactccggcatacacaatctccgccaccgaactgctcgagaagcaggccaccccgagggagcctgaacttctataccagaatatcgctgaaagagtgaaagaactgcctagtgccgggctggtgcattacaacttttgcactttacccaagaggcagtttgccccatcctacgaatccaggcgtcagaatcaagaccggatcaacaagaccgtcctatacggaacccccagaaaatgtttcgttggtcagagtaagccaaatcatccactcttacaggctaagccccaatccgaaccagactacttagaagtgttggaaaagcaaaccgccataagtcaactgtag

SEQ ID NO: 205301 - DNA, 2538 bp, synthetic construct
  misc_feature 1..2538: note = Description of Artificial Sequence: Synthetic coding sequence
  source 1..2538: mol_type = other DNA
atgctgagcggcgtgtggttcctgagcgtgctgaccgtggccggcatccttcaaacggagtcaagaaaaaccgcaaaggacatttgcaaaatcaggtgcctgtgtgaggagaaggaaaacgttctgaatattaactgtgagaataaaggcttcaccacagtcagcctgctgcagcccccccagtatagaatataccagctgttcctgaatgggaacttactgaccaggctctatcccaacgagttcgtcaactattctaatgctgtgaccctccacctgggtaacaatggactgcaggagattcgcacaggggcttttagcggcttaaaaacactgaagagacttcatctcaacaacaataaactcgagatcctcagggaggatacttttctgggactcgagtcgctcgaatacctgcaggccgactataactacatctcagccattgaggccggggccttttccaagctgaacaagctgaaggtgctcatcctcaatgacaacctgctgttatccctgccttcgaatgtgttccgctttgtgctactaacccacctagatctgcgcggtaaccgactgaaggtgatgcccttcgccggagttttggaacacatcgggggaattatggaaatccagctggaagagaacccctggaactgcacatgtgatctgctgccactgaaggcctggttggacaccatcaccgtgttcgttggggaaatagtgtgcgagacaccctttaggttacacggtaaagatgtaacacaactgacgaggcaggacctctgccctcggaaatccgctagtgattcaagtcaaagaggatcacatgccgacacccacgtccaacgcctgagtccaacaatgaatcccgcattaaatcccaccagagctcctaaagctagcagacctcctaaaatgagaaaccgaccaacgcctcgtgtgactgtatctaaggaccgccaatcttttggacccataatggtctaccagactaagtctcccgtgccgttaacctgcccttcctcctgcgtgtgtacatcgcaaagcagtgacaacgggctcaacgtgaactgtcaggagcggaagttcacaaatattagtgacctgcaaccgaagcccacttctccaaaaaagctgtatcttacaggcaattaccttcaaacagtgtacaagaatgacctgctggaatacagtagtctagacctacttcatctgggcaacaacaggattgcagtcattcaggagggggcgttcacaaacctcacatctctcagacgtctttacctgaatggcaactatttggaggttctgtatcccagtatgtttgacggcttgcagagtctgcagtatctgtacctcgagtataatgtaatcaaggagataaagccccttacttttgatgcgctcataaatctgcagctgttgttccttaataataatttactgcgttccctccccgataacatctttggcggcacagccttgacgagattgaatctgagaaataaccacttctcccaccttcccgtcaagggagttctggaccagttgccagctttcattcagattgatctgcaggaaaacccttgggattgtacctgtgacattatggggttgaaggactggacagagcatgctaactcacccgtgattattaacgaagtgacatgtgaatcccccgcaaaacacgcaggagagatcctaaagttcctggggagggaggcaatctgtcctgacagcccaaacctgtccgatgggactgtcctgtctatgaatcataacacagatactcccaggtccctgtcagtctcaccatcatcttatcctgaactgcataccgaagttcctctgtccgtgctgatcctgggccttctcgtcgtctttattttatcggtttgctttggagcgggcttgttcgtgttcgtgctcaaaagaagaaaaggggtcccctctgtgccgaggaacacaaataacttggatgtctccagcttccaactacagtacgggagctacaacacagagactcatgataaaacagacggccatgtgtacaattacatccctcccccggtagggcagatgtgtcagaatcccatctacatgcaaaaagagggggatcctgttgcctattaccggaacttacaggagttctcctattcaaatctcgaggaaaagaaggaagagccggcgacccctgcctataccatatcagccaccgaattgctcgagaagcaggctacaccaagggaacccgaactactgtatcagaacattgcggagagagttaaggaattaccctcagccggcctggtacactataatttctgtaccctccctaagcgacagtttgcacccagctacgagtccagacgccagaatcaagaccggattaataagacagttctttacggcacgcccagaaagtgcttcgtgggccagagcaaacccaatcaccccctgttgcaggcgaagccacagtctgagcctgattacctggaagtcctggaaaaacagacggctatcagccagttgtag

SEQ ID NO: 205302 - DNA, 2934 bp, synthetic construct
  misc_feature 1..2934: note = Description of Artificial Sequence: Synthetic coding sequence
  source 1..2934: mol_type = other DNA
atgaagcccagcatcgccgagatgctgcaccggggccggatgctgtggatcatcttgttgtcgaccatcgctctagggtggactactccgattcccctgattgaagatagcgaggaaatcgatgagccctgctttgacccctgttactgcgaagttaaggagagtctcttccacattcactgtgactcaaagggctttaccaacatcagccagattacagagttctggtcgagaccctttaaactttatctccagcggaatagtatgcggaagttgtatacaaattccttcctccatctcaataacgcagtgagtataaacttgggaaacaacgctctacaggatatccagaccggagcttttaacggcctgaagatactgaagagactttacctccacgagaataagctagacgtattcaggaatgataccttcctgggtttggaatctttggaatatctccaggcagactacaatgtcatcaagagaattgagtccggggctttcaggaatttgagcaaactgcgcgtactcatcctcaacgacaatctcatccctatgctgcctacgaatttgttcaaggccgtgtcccttacacacctcgatttaagaggaaaccgcctgaaagtgctcttttatagagggatgctagatcacattgggcgctccctgatggagcttcagctcgaagaaaatccttggaactgcacatgtgaaatcgtgcagctgaaatcctggcttgagcggattccctacactgctctagtgggggacattacctgtgaaactccattccactttcatggaaaggacctaagagaaattaggaagaccgagctctgtccacttctctcggacagcgaagtggaggctagcttagggataccacattctagctcctccaaggagaacgcctggcccaccaaaccctcttccatgctctcctccgtccactttaccgcttcctccgtggaatacaagagctctaacaagcagcctaagcccaccaaacagccgcggacaccaaggccaccctccacctcccaggcactttatcccggcccgaaccaaccaccaattgcgccataccagacccgtccgcccattcccatcatctgtccaaccgggtgcacttgtaatcttcatatcaacgacctcgggctgactgtgaattgcaaggaacggggattcaataatatctctgagttactcccacgaccgcttaacgccaaaaagctctacctctcgtcgaacctgatccagaagatttaccggagcgacttctggaacttttcctctttagaccttctgcacctcgggaacaataggattagctacgtgcaggacggcgccttcatcaacctccctaacttgaagagcctctttctcaatgggaatgacatagagaagcttacccctggtatgttcagaggccttcagagcctacactacctgtattttgagtttaacgtgatccgggagatccagcccgctgctttctccttaatgcccaacctgaagctgctgtttttaaataacaacctgctgcggaccttgccaaccgatgcctttgctgggacatctctggcccgcctaaacctccgcaagaattattttctttatctgcctgtcgccggtgtcttggagcacttgaacgctattgtgcagatcgacctcaatgagaatccatgggattgcacctgcgacttagttccattcaaacagtggattgagacgattagtagtgtttcagtcgttggcgatgtgctgtgtcggtctcccgagaatctgactcaccgtgatgtgagaactattgagctcgaagtactctgcccagagatgctgcatgtcgcgcccgctggagagtcgccggcccaacccggcgattctcaccttattggagcccccaccagcgcttctccatacgagtttagtcctccaggaggccccgtgcctctgtctgtgttaatccttagcttgctggtgctttttttctctgcagtgttcgtggctgccggtttgtttgcctacgtgctgcggcggcgtcggaagaagctaccttttagaagcaaaagacaggagggtgtggacctgaccggtattcagatgcagtgccaccggctattcgaggatggcggcggtggaggcggaggcagtggcggtggcgggaggccaaccctctcctcacctgagaaggccccccccgttggccacgtttatgagtatatcccacaccctgtaacccaaatgtgtaataatccaatttataaacctagagaagaggaagaggtggcggtgtctagtgcacaggaagcaggtagtgccgagcgagggggccccggtacccaaccccctggaatgggtgaggccctccttggtagcgagcaattcgccgagaccccgaaagagaaccacagtaattacagaacactcctggagaaagagaaagagtgggccctggcggtctcgagctcacaacttaatacaatcgttaccgtgaaccaccatcacccccatcaccctgccgtgggcggggtcagcggagtggtcggcggaacggggggcgatctagccggtttccggcatcacgagaagaatgggggcgtcgtgttattccctcccgggggtggttgcgggtctggtagcatgctgctcgaccgggagaggccacagccagccccctgtacagtgggattcgttgattgtctgtacggcaccgtgcctaagctgaaagagctgcacgtgcacccaccaggcatgcagtatccagatctccagcaggatgcgcgtcttaaagagacattacttttttcagccggaaagggattcacagaccaccagacccagaaatctgattatctggaactgagggccaagctgcaaactaagcccgattacctcgaagtgctcgaaaaaactacttacagattttag

SEQ ID NO: 205303 - DNA, 2934 bp, synthetic construct
  misc_feature 1..2934: note = Description of Artificial Sequence: Synthetic coding sequence
  source 1..2934: mol_type = other DNA
atgaagcccagcatcgccgagatgctgcaccggggccggatgctgtggatcatactgttatcaaccattgctcttggctggactactcccatcccactgatcgaagatagcgaagaaatcgacgagccatgtttcgatccttgctattgtgaagtaaaagagtccctgttccacattcattgcgatagtaaaggcttcaccaacataagccagattactgaattttggtcacgtccctttaagctctatcttcagagaaacagcatgcgcaagctgtatactaacagctttctgcacttaaacaacgctgtgtctattaacctgggcaataatgctctacaagacatacagactggcgcattcaacgggctgaagatcctcaagcgattgtatctgcacgagaacaagttggacgtgttcagaaatgacacgtttttgggtctggaatctctggagtatctacaagcagactacaacgtcatcaaacggatcgagagtggtgcctttagaaatctgtccaagcttagggtcctgattctgaacgataacctgattcctatgctccccactaacctcttcaaagctgtctctctgacgcaccttgacctgcgagggaaccgcctgaaggttctcttctaccgagggatgctggaccatatcggaagaagtctcatggagttacagctcgaggagaatccatggaactgcacctgtgaaatcgtgcagctgaaatcttggttggaaaggatcccttacacggccctagttggagacattacatgcgaaacaccctttcactttcatggaaaagatctgcgcgaaattcggaagactgaactatgcccactgctgtcagattcagaggtagaggcctctctggggatcccacattccagtagttccaaagagaacgcttggcccacgaagccatcatccatgctttccagtgtacattttactgcaagctccgtagagtacaaaagtagtaataaacagcctaagcctacaaagcagcctagaactccccgtccaccttcaacgtctcaagcattgtacccagggcctaatcaacctccgatcgccccctatcaaaccaggcctcctattcccatcatctgccccacaggctgtacctgcaatttacacatcaacgacctaggactcacagtcaattgcaaggagagaggcttcaataatatcagcgaacttctgccacggcctctgaacgctaagaaactgtacctctcttcaaaccttatccagaaaatctatcgctccgacttctggaacttttcctcactggatctcctgcatctcgggaacaaccggatatcatatgtccaggacggagccttcatcaacctgcccaatctgaaaagcttgttcctgaacgggaacgacatcgaaaaattaaccccaggaatgtttcgcgggttacagagcctgcactacttgtattttgagtttaatgtcattagagagatccagccagccgccttttccctaatgccaaatctcaagctcctgtttctgaacaacaacctgctccggacacttccaactgatgcatttgccggcacctccctggcgaggctgaatctgagaaaaaattattttctctatctgccagtggctggcgtgttggagcatcttaatgccatcgtgcagattgacctgaacgagaacccctgggattgcacatgtgatctagtgcctttcaaacaatggattgaaactattagctctgtatcagtggtgggagacgttttatgccgatcaccggagaatctgacacatcgagatgtccgcactatcgagctggaagtgctttgtcccgaaatgttgcatgtcgctcccgccggagaaagccccgcacagcctggagactcgcatctgattggcgccccgacctcagcatccccatacgaattttcaccgcctggcgggcctgtcccactgtccgttcttatcctgagcctacttgtcctgttcttcagcgccgtgtttgtagccgcggggctgtttgcatatgtgctgagaaggcggcgaaagaaactgccatttaggtctaaaagacaggaaggagtggatctgactggtatacagatgcagtgccacaggctgttcgaggatgggggcgggggaggtggtggtagcggcgggggtgggcgacctacactgagcagccccgaaaaagccccccccgtgggccacgtctatgagtacatcccgcaccccgtcactcagatgtgcaacaatccaatttacaagcctcgggaggaagaggaggttgcagtctcatccgcgcaggaggctggctcagctgaaaggggaggaccgggtacacagcctccaggaatgggagaggctctactggggagtgagcaatttgccgaaaccccaaaggaaaatcattcaaattatcgtacgctgcttgaaaaagaaaaagagtgggcgctggctgtgtcttcctcccagttaaatacaatagttactgtgaaccaccatcaccctcatcatccggcagtgggcggcgttagtggcgtggtgggcggcacgggcggggacctggcaggcttccgccaccacgaaaaaaacggcggggtcgtgctgttccccccgggcggtggatgtggctccgggagtatgctgttagacagagagcgtccccagcctgccccatgtaccgtgggatttgttgattgcctgtatggaaccgtgcctaagttgaaggagctgcacgtccatccccctggaatgcaataccctgatcttcagcaagacgccaggctgaaagagactctgcttttctccgcaggaaaaggtttcacagaccatcagacccagaaatccgattacctcgagctgagagcaaagttgcagaccaagcctgactatctagaggtgctcgaaaaaaccacctatagattctag

SEQ ID NO: 205304 - DNA, 492 bp, synthetic construct
  misc_feature 1..492: note = Description of Artificial Sequence: Synthetic coding sequence
  source 1..492: mol_type = other DNA
atgaagcccagcatcgccgagatgctgcaccggggccggatgctgtggattattctgctctccacgatcgcactggggtggacaacacctatccctctgatcgaagactccgaagagatcgatgagccgtgctttgatccctgctactgcgaggtgaaagagtccctgttccatatccactgtgattctaagggcttcactaatatcagtcagattactgaattttggtcaaggcctttcaagctctatctgcagcgtaactccatgaggaaactctacaccaactcctttcttcaccttaataatgcagtttccatcaatcttggtaacaatgcattacaggatatacagactggagccttcaacgggctgaagattctcaaacgcctctatctccacgagaacaagcttgatgtcttccggaacgatacctttctgggactggagtccctggagtacctccaggctgattacaacgttataaagcgctag

SEQ ID NO: 205305 - DNA, 2514 bp, synthetic construct
  misc_feature 1..2514: note = Description of Artificial Sequence: Synthetic coding sequence
  source 1..2514: mol_type = other DNA
atgttcctgtggctgttcctgatcctgagcgccctgatcagcagcaccaatgctgattcagatatctctgtggagatctgtaacgtgtgctcctgcgtgtccgtggagaatgtcctctatgttaactgtgagaaggttagcgtatatcgaccgaatcaattgaagcctccttggtctaacttttaccacctaaatttccagaacaacttcttgaatatcttgtatccaaatacgttcttgaacttctcacatgccgtttctctccatctgggaaataataaattgcaaaatatcgaagggggcgccttccttggactttctgctctcaaacaactgcatcttaataacaacgagctcaagatcctgcgtgcagatacatttctggggatcgaaaatctggagtatctgcaagccgattacaacttgatcaagtacattgaacgaggcgcctttaacaaactgcacaaactcaaggttctgattctgaacgataatctcatctccttcctgcctgacaatatcttcaggttcgctagcttaacccatttggacatcaggggtaaccgcatccaaaaactgccttatataggggttctagagcacatcgggcgcgtagtcgagctgcagctggaagacaacccatggaactgttcctgtgatctgttaccgttgaaggcttggctggaaaatatgccatacaacatatacattggtgaagccatttgcgagactcccagcgatctgtatggtcgcctgctcaaggaaaccaacaagcaggaactgtgccccatggggaccggtagtgattttgacgttagaattctgcccccatctcaattggagaatggctacactacaccaaatgggcatacaacgcaaacttccctgcatagactggtcacaaagccaccaaaaaccacaaatccatctaagatcagtggcatcgtggcagggaaagcactttccaatcgcaacttgtcccaaattgtgtcctatcagactcgggtaccccccttaactccatgcccggctccatgcttttgtaagacacacccatccgatcttgggttgagtgtgaactgtcaggagaaaaacatccagtcaatgtcagaactgattccaaagcctttgaacgccaagaagttacatgtgaatggaaattctatcaaggatgttgatgttagcgatttcaccgacttcgaaggtctggacctgctgcacctcggaagtaaccagattactgtgataaaaggtgacgtattccacaacctgacaaatctgaggagactctacctgaacggtaaccagatagagcggctctatccagaaatttttagcggcctacataacttacagtacctgtatctggaatacaacttgatcaaggagatttcagcagggactttcgactcgatgcctaaccttcaactgttgtacctgaataacaacttgcttaaatctcttcctgtgtacattttttccggggctcccctcgcgcgccttaatctgcgtaataataagtttatgtacttgccagtttctggagtgctggaccagctccagtcgttaacgcagatcgacctcgaaggaaacccctgggactgcacttgtgatctcgtagcactcaagctgtgggtggagaagttgagcgatggtatcgtggtcaaagagctgaaatgcgaaactcccgtgcaattcgccaacattgaactgaaaagtctgaagaatgagattctgtgtccaaagctgctgaacaagccttcagctccttttacatcaccagcacccgcgattactttcacaacacccctggggcccatccgctcccccccaggcggccccgtgcctttgagtatcctgattctgtctattctggtagtactgattcttacagtcttcgtggccttctgcctgctggtgttcgtgctgcggcggaataaaaaaccgacagtaaagcatgagggcctgggaaatcccgattgtgggtctatgcagctgcagctacgaaaacatgaccataagacaaataaaaaggatggcctttcaaccgaggctttcattccccaaaccatcgaacagatgtccaagtcccacacctgcggtctgaaggagagtgagaccggattcatgttttctgatcctcctggacagaaagtggtcatgaggaacgtagctgacaaagagaaggatttactgcacgtggacactcggaaacggctgtctaccattgatgagctcgatgaactatttcccagccgcgactctaatgtgtttatccagaatttccttgagtcaaagaaggagtataattcaatcggggtctcagggtttgagatacgttatccagaaaaacaaccagacaaaaaatccaagaaaagcctgattggtgggaatcattccaagatcgtggttgaacagagaaagtccgagtatttcgagctgaaggccaaactgcagtcatcacccgactatctccaggtgctggaagagcagacagcacttaataaaatttag

SEQ ID NO: 205306 - DNA, 2514 bp, synthetic construct
  misc_feature 1..2514: note = Description of Artificial Sequence: Synthetic coding sequence
  source 1..2514: mol_type = other DNA
atgttcctgtggctgttcctgatcctgagcgccctgatcagcagcacaaacgccgattctgacatctccgtcgaaatttgtaatgtgtgttcctgcgtgtctgtggaaaacgtgctctacgtgaactgcgagaaagtaagcgtgtatagaccgaatcagctcaagccgccctggagtaatttttatcacctgaacttccagaataactttctcaacattctgtatccaaacacattcctgaacttctctcatgccgtaagcctccatctgggtaataataaattgcaaaacatagaagggggcgcctttctgggcctgtcggctcttaagcaactgcacctcaacaataacgaactcaaaatcttaagggccgatacttttctgggcattgagaaccttgaatacttacaggccgactacaacctgatcaagtatattgaacggggcgcattcaataagctacacaagctgaaggtgcttatactcaatgacaatcttatatcttttctccctgacaatatattcaggttcgcctctctgacacacctggatatcagggggaatcggatccagaaactgccctacataggcgttctcgagcacattgggagagtggttgagcttcagttagaggacaacccttggaattgcagttgcgatttactgccactgaaggcctggttggaaaacatgccgtacaatatctatatcggggaagcgatttgcgaaacgcccagcgacctgtacgggcggttactgaaggaaacgaacaaacaggagctgtgtccaatgggcactggttctgactttgatgtaagaatcctgcccccctcccagttggagaatgggtacacgacccctaacgggcacaccactcaaaccagcctgcacagacttgtgaccaagccacccaagactacgaaccccagtaagatatccgggattgtagctggcaaggctctaagcaacaggaacctatctcagatcgtaagctatcagactagggtgcctccactaacaccctgccccgcaccctgtttttgtaaaactcatccttcagacctgggattaagcgtgaactgtcaagagaagaatattcagagcatgagcgagcttatccccaaacctctcaatgcgaaaaagctgcacgtaaacggaaattcaattaaggatgtagacgtgagcgactttactgactttgaggggctggacctgctccacctcggtagtaatcagatcaccgttatcaaaggcgacgtctttcacaatctgactaatctgcggcggctgtatctgaatggaaaccaaattgaaaggctatatcccgagatcttttccggcctacacaatctacagtatttatacttggagtacaacctgatcaaagaaatttcagctggtacatttgatagcatgcctaacctgcaactcctgtacttgaataacaacctcttgaaatcactccccgtgtatattttctcaggagcacctctggcccggctcaacctgagaaacaacaaatttatgtatctgcctgtctcgggcgtcctggaccaacttcagagcctgactcagattgaccttgagggtaacccatgggactgtacgtgcgatcttgttgccctgaaattatgggtggagaaactgtctgacggcatcgtagtgaaggagctgaagtgcgaaacccctgtgcagttcgcgaatatagaactcaagagtctcaagaacgaaatcctgtgccccaagctgctcaataaacccagcgcgccttttacctcacctgcaccagccatcaccttcacaacccctctcggacctatccgttctccaccgggtgggcccgtccctctgtccatcctcattctgtcgattctggtagtactgattcttacggttttcgttgccttttgcctcctggttttcgtactgagacgaaacaaaaagcctacggtaaaacatgagggtctggggaatcctgattgtggttccatgcagctgcaactgcgcaaacatgaccacaagaccaataaaaaggatgggctgtcgaccgaagccttcatcccacaaactatcgagcagatgtccaagtctcatacttgtggcctgaaggagagtgagacaggttttatgttttccgatccacccggacagaaagttgttatgaggaatgtcgctgacaaagaaaaagatctcctgcatgtagatactaggaagagattaagtacaatagatgaactggacgaattattccccagcagggattcgaacgtttttattcagaattttctggaaagtaagaaagagtataacagcataggcgtctctggtttcgagatcaggtaccccgaaaagcagcccgacaagaagtccaagaagagcttgatagggggcaaccattccaagatcgtggtggagcagcgaaaatccgagtatttcgaactgaaagcaaagttacagtcgtcaccggactacctgcaggttctggaggaacagacagccctcaacaaaatttag

SEQ ID NO: 205307 - DNA, 2514 bp, synthetic construct
  misc_feature 1..2514: note = Description of Artificial Sequence: Synthetic coding sequence
  source 1..2514: mol_type = other DNA
atgttcctgtggctgttcctgatcctgagcgccctgatcagcagcactaatgcagacagcgacatctctgtcgagatctgcaatgtgtgcagctgcgtgagcgtcgaaaacgtcctgtatgttaattgtgagaaagtgagcgtctatcgtcctaaccagctcaagcccccctggtctaatttctatcacttgaactttcagaataacttcttgaatatcctgtaccccaatacattcctgaatttcagccacgctgtttctctgcatttggggaataataagttacagaatatcgagggtggagcttttctaggcctgtccgccctcaaacagttacacttgaacaataacgagctcaagatactgcgggctgacacgttcttgggtatagagaacctcgaatacctccaagccgattataaccttatcaagtacatcgaaagaggtgctttcaacaagctgcacaagctcaaggttctgatcttgaatgataatcttatcagttttcttccggacaacatatttcggtttgcttctttaacccacctggacattagggggaacaggattcagaaactcccttatataggggtcctcgagcacatcgggcgggttgtcgaattgcagctagaggataacccctggaattgctcgtgcgacctgctccccctgaaggcatggttggagaatatgccatataacatttatataggcgaagctatctgtgaaactccctcagatctgtatggcaggctgctgaaggaaacaaataagcaggaactgtgccctatgggaaccgggagcgacttcgacgtcaggatactccctccctcacaattagaaaatggttacaccacgcccaacgggcacacgacacaaacatccctccataggctggtgacaaaacccccaaagactaccaacccatcaaaaatcagcggaatagtcgcgggtaaggccctcagcaataggaatctcagtcaaatcgtgtcttaccaaacccgggtacctcccctgaccccatgcccagcgccctgcttctgcaaaactcacccctccgacttggggctcagtgtgaattgtcaggaaaagaatatacagtctatgtccgaactgattccgaaacccctaaacgctaagaagctccacgtcaatggtaattcgatcaaagatgttgatgtgtcagattttaccgactttgaaggtctggacttgctccatctggggagcaatcagatcacggtcattaagggggacgtgtttcacaacctgacaaatctgcggcgcttgtatctaaacggcaatcagattgaaaggctgtatccagaaattttctcaggtctgcataatctgcagtatctgtatctggagtataatttgattaaggagatctccgccgggaccttcgattcgatgcccaacctacagttgctgtatcttaacaacaacctcctgaaatcactgccagtatatatcttcagtggagcaccacttgccaggctgaatctgcgcaacaataaattcatgtacctgcctgtgagcggcgtgctcgatcagttacagtccttgacacaaatcgacttggaggggaacccctgggattgcacttgcgacctggtagccttgaagctgtgggtcgaaaaactatctgacggtatcgtggtcaaagagctgaagtgtgaaaccccagtacagtttgccaacatagagctcaaatcattaaagaacgaaatcttatgtccgaaattattaaacaaaccatctgccccttttacctcaccagccccagccattacttttacgacacccctaggtccaataagatcaccccccggaggccctgtccctctttctatactgattctatccattctggtggtgctcattttaaccgttttcgtcgctttttgtcttctcgtcttcgtgctcaggcggaacaaaaaacctactgtaaagcatgaggggctgggaaaccccgattgtggctccatgcaactccagctgaggaagcacgatcataaaacaaacaaaaaggatggactcagcacagaagccttcattccacagacaatcgaacagatgtcaaagagtcacacgtgtggcctcaaggagagtgagactggtttcatgttctctgaccctcctgggcagaaggtggttatgagaaacgttgctgataaggaaaaagatctgcttcacgtggacacccggaaacgcctgtcaacaattgacgagttagacgaactgtttccgagccgggactccaatgtattcattcagaatttcctcgagagcaagaaggaatataattccataggggtaagtggcttcgaaattcgataccctgaaaaacaacctgataaaaaaagcaagaagagtttgattggcggtaatcattccaaaatcgtggtcgagcaacgaaaatcagaatactttgagctcaaggccaaactgcaaagctccccagattacttgcaggtgctggaggaacagaccgcgttgaacaagatttag

SEQ ID NO: 205308 - DNA, 2877 bp, synthetic construct
  misc_feature 1..2877: note = Description of Artificial Sequence: Synthetic coding sequence
  source 1..2877: mol_type = other DNA
atgcacacctgctgcccccccgtgaccctggagcaggacctgcaccgaaagatgcattcttggatgttacaaaccttagcctttgctgtgacttcactcgtgctctcatgcgctgagacaatcgactattacggtgaaatctgcgataatgcctgcccttgtgaggagaaggatggcattctgaccgtcagctgcgaaaacaggggtataatctccctatccgagatctcacctccccgttttcctatttaccacctgctgttatccggaaacctccttaatcggttgtaccctaacgagtttgtaaattacaccggagcttcaatcctgcacctgggatccaatgtgatccaggacatagagaccggcgcatttcacgggctgaggggcctgcggcggctgcacctgaataataataaactggaactcctacgtgacgacactttcctcggtctcgaaaacctcgaatacctgcaggtcgattataattacatatccgtgatcgagcccaacgcgttcggaaagctacatctcctgcaagtgctgatcctgaatgacaacctgctatctagtttaccaaataatctgtttaggttcgtgcctttaacccatctcgatctgaggggcaaccggctgaagctgcttccctatgtaggcctactgcagcacatggataaagttgtcgaacttcagctggaggagaatccctggaactgttcttgtgaattgatctcactcaaagactggctcgattccatttcttactctgccctggtaggagatgtcgtgtgtgagactccattccgccttcatggcagagatttagatgaagtctcaaagcaggagctatgcccaagaagactcatttccgactatgaaatgagaccccagacaccattgtccacaaccggctatttgcacaccacacctgcttcagtgaacagcgtggcaacatcctcttcagccgtttacaagccccctctcaagcccccgaagggaacccgccaaccgaacaagcctcgcgttcggcctacatccagacagcccagtaaggatcttgggtactccaactacggcccgtccatcgcttatcagacaaagtccccagtccctctagagtgtcctacggcctgctcatgcaacctccagatcagcgatcttggtctgaatgttaactgccaggagaggaaaatcgaatcaatcgccgagctgcagccaaagccgtacaaccctaaaaagatgtacctgaccgagaattatatcgcagttgtacgcagaacagattttctggaggcaaccggcctcgacctgctgcatctgggcaacaaccggatatctatgatacaggatagagcttttggtgacctgaccaatcttaggaggctgtatttgaatggtaatagaattgagcgtctgtccccggagcttttttatgggttacaaagcctccaatatctgttcctccagtataatctcattagggaaatccaaagtggaacatttgaccctgtacccaaccttcagcttctctttctcaacaacaacctacttcaagcgatgcctagcggcgtgttcagcgggctcaccctcctccggctgaatcttcgctccaatcacttcacatccctccccgtgtcaggagtgttagatcagctcaaatctctcattcaaatcgacctacacgacaatccttgggattgcacatgtgacatagttgggatgaagctgtgggttgagcagttgaaagttggagtcttggttgacgaggtcatttgcaaggcacctaaaaaatttgccgaaacagatatgcgttcgatcaagagcgaacttctctgtccagactacagcgacgtggtcgtgagtactccgacccctagttctatccaggtcccggccaggacttctgcggtgacacctgccgtgcgtctgaactcaacgggggccccggcttccctgggcgcaggaggtggggcctcctctgtgccattgagtgttctgattcttagcttactcctggtgtttatcatgtccgtgttcgtggccgctggacttttcgtcctggtcatgaaaaggagaaagaagaaccaatccgaccatacatctaccaataactcagacgtgagtagctttaatatgcaatactctgtctatgggggcggaggtgggacaggggggcatccgcatgctcacgtgcatcatcgaggccctgccctgccgaaagtgaaaacacctgcaggtcacgtgtatgaatacattcctcaccccctgggccatatgtgcaaaaatccaatctacaggagcagggaggggaatagcgtggaggactataaggacctgcatgagttgaaggttacttattcatcaaaccatcatctccaacaacagcagcagcctccccctcctccgcagcaacctcaacagcaacccccgccgcagcttcaattgcagcctggggaggaagaaaggagagagtctcatcatcttcggtcccctgcatacagcgtcagcacgattgagcccagggaagacctgttatcacctgtgcaagatgccgacaggttttaccgaggcatcctcgagcccgacaaacactgcagcaccacccctgctggtaattctcttccagagtacccaaagttcccttgttctcctgctgcttacacattcagtccgaattacgatctgcggagacctcaccagtatctccaccccggcgcaggggactcccggctgcgtgaacccgtcctgtacagccccccctccgccgtatttgtggagccaaacagaaacgagtatcttgaactgaaggccaagctgaacgtggaaccagactatcttgaggttctcgaaaagcagacaacattttctcaattttag

SEQ ID NO: 205309 - DNA, 2154 bp, synthetic construct
  misc_feature 1..2154: note = Description of Artificial Sequence: Synthetic coding sequence
  source 1..2154: mol_type = other DNA
atgggcgccggcaagcaccgggagggcggcggcggcgaccccacctcgctgaacggctgcgccgatcttattcagcggcggaccgaaatttctcgggacctggatgaggtctcaaaacaggagctctgtccacgccgcctgattagtgactatgagatgcgtccccagacacccctctcaacaacagggtacttgcataccacgcccgcctctgtgaacagcgtagccactagctccagtgcagtgtataaaccccccctgaaacctcctaaaggcacccgacagcccaacaaacctagagttaggcccacatcacgacagccctctaaagatctgggatattcaaattacgggccttccatcgcgtatcaaacgaagtcccctgtgccactggaatgtcctactgcatgcagctgcaatcttcagatcagcgatttgggtctgaacgtcaactgccaggagcggaagattgaatctatcgccgagctgcagcccaagccatacaaccctaagaaaatgtatctgaccgagaactacattgcagttgtgagaaggaccgactttctggaagcaaccggtctcgatcttttgcacttggggaacaatcgaatctcaatgatccaggatcgagcctttggggaccttaccaacttgagacggctgtatctgaatgggaacagaatagaaaggctgtctccagagctgttttacggactccagtcccttcagtatctgtttctgcagtacaatcttattagagagattcagagtggcaccttcgatcctgttccaaacttgcagctcttgttcctcaacaacaacctactgcaggccatgccatctggtgtgttctcaggactgaccttactgcgccttaacctcaggagtaaccatttcacttctctgcctgtgagtggcgtgctagaccagctgaaatccctgatccagatagacctacatgataatccctgggattgcacttgcgatatagttgggatgaagctatgggtagagcagctgaaggtcggcgtgcttgtggacgaagtgatttgtaaggcccctaagaaatttgccgagaccgacatgcgcagcatcaaatccgagctgctttgccctgactatagtgatgtagtagtgtcaactcctactcctagctctatccaggtgccggcccgcacatctgccgtgacccctgctgtaaggctcaatagtacgggcgctccagcgtccttgggcgctgggggcggtgctagttccgtcccgctgtcggtccttattctgagccttttgttagttttcatcatgtctgtcttcgtggcagcgggcttgttcgtgctcgtgatgaaaagacggaagaagaatcagtctgaccataccagcactaataactcagacgtttcctcctttaacatgcagtactccgtgtacgggggtggcggtggcacaggtggccatccgcacgctcatgtacaccatcggggacctgctctacctaaagttaagacaccagctggacacgtatacgaatacattccccatccacttggtcatatgtgtaagaatccgatctacagatccagagagggtaactccgtcgaagactacaaggacctgcacgagctcaaggtgacttactcatccaaccaccacttgcagcaacagcaacagccgccccctccgccgcagcagccacagcaacagccacctcctcagcttcagctgcagcccggagaagaggagcgaagggagagccaccatctgcgcagccctgcctatagcgtcagcacaattgagccaagggaggacctgctctcccccgtgcaagacgccgatagattctatcgtgggatcctcgagcccgataaacactgttcgactacgccagccgggaattcgttgcctgagtatcctaagttcccttgctcccctgccgcttatactttttctcctaactatgacctcaggcgtccccatcaatacctgcatcctggagccggcgattccaggctgcgtgaacccgtcttatacagccctcctagcgccgtgttcgtggaaccaaatcggaacgaatacctcgaactcaaggccaagctcaatgtggagccagattacctggaggtgttggagaaacagactactttcagccagttctag

SEQ ID NO: 205310 - DNA, 2526 bp, synthetic construct
  misc_feature 1..2526: note = Description of Artificial Sequence: Synthetic coding sequence
  source 1..2526: mol_type = other DNA
atgaagctgtggatccacctgttctacagcagcctgctggcctgcattagcctgcactcacaaacaccagtgcttagttcaagaggatcctgcgactctttgtgtaactgcgaagagaaggacggtaccatgctgatcaattgcgaagctaagggaatcaaaatggtgagcgagatcagcgtcccaccatcgcgcccctttcaactgtcccttttgaacaacggcttaaccatgctccacacaaatgacttctcaggcctgaccaatgccatctcaattcatctggggttcaacaatatcgccgacatcgagataggtgctttcaatggccttggtctcctcaaacagctccatattaatcataacagcctggaaatcctgaaggaagatacttttcacggtctggagaatctagaatttctgcaggcagataacaactttatcaccgtcatcgagccctccgcctttagcaaactgaatcgtcttaaggtgctcatcctgaacgataacgctatcgaatctctccccccaaatatctttcgtttcgtcccactgacacaccttgatcttagaggaaaccagctgcagacactcccctatgtgggctttttggagcatatcggccgtatcttggacctgcagctagaagacaataagtgggcttgcaattgtgatctgcttcagctgaagacatggcttgagaatatgccaccccagtctataatcggagacgttgtatgtaacagtccccctttttttaagggaagtatcctctcacggctgaagaaggaaagcatctgcccaaccccacctgtttacgaggaacatgaggatccttctggctctttacaccttgccgctacatcctccatcaacgactcgagaatgagcactaagaccactagcattctgaagctgcctaccaaggcccccggtctgatcccttatatcacaaaaccaagtactcagctacctggcccctactgtccaattccttgcaactgtaaagtcctcagtcctagcggcctgctgatacattgccaggaacggaatatagagagcctgtctgatctaagacctccgccacagaatccccgcaagttgattctagccggaaatatcatccacagcttaatgaagagcgacttggtggagtacttcacattggagatgctgcacctggggaataatagaatagaggtgttggaagaaggaagtttcatgaatctgaccaggctgcagaaattgtacctgaacggcaatcacctgaccaaacttagcaaaggcatgttcctcggcctccacaatctcgaatatctgtatttggaatataatgctattaaggaaatactgcctgggactttcaatccaatgccaaagttgaaggtgctctatctgaataacaatcttttgcaggtgctacctcctcatatcttcagcggtgtgccactgaccaaggtcaatctaaagaccaaccagtttacacacctacctgtgagcaatattctcgatgacctggatttgcttacccagatcgacttagaagacaatccttgggactgctcgtgtgatcttgtcggactacaacagtggatccagaagctttctaagaacacagttaccgacgatattttgtgtaccagtcccggtcacttagataagaaagaactgaaggctctgaacagcgagatcttgtgccctggactagtaaacaatcccagtatgcctacccaaacatcatacttgatggtcaccacccctgctactaccacgaatactgccgacactatactgaggagcctgacagacgccgttccactctcagtgcttatcttggggctgcttataatgtttatcactattgtcttctgcgcagcaggaatcgtcgtgcttgtgctgcacaggcgacggcgatataaaaaaaagcaagtggacgagcagatgcgtgacaacagcccagtgcatctgcagtattcaatgtacgggcacaagactacacaccatactactgaaagacccagtgcatcactttatgaacagcatatggttagcccaatggtgcacgtgtatcggtccccaagctttgggcccaaacatttggaggaggaggaagagaggaatgagaaagagggtagcgatgccaagcacctccaacgttctcttttggaacaagagaatcatagcccactgaccggctcaaacatgaaatataaaacgactaaccagtcaactgaattcctgtctttccaggacgcctcttccctgtaccgcaatatcctagagaaagagcgggaactgcaacaactgggtattacggagtacttgcggaagaatatcgcacagttgcaaccagatatggaagcacattacccaggtgcccatgaggaactgaaacttatggagacactcatgtattccaggcccaggaaggtgctggtggaacagactaagaacgagtacttcgaactgaaggctaacttgcatgctgagcccgactatctggaggttctcgaacagcagacatag

SEQ ID NO: 205311 - DNA, 4578 bp, synthetic construct
  misc_feature 1..4578: note = Description of Artificial Sequence: Synthetic coding sequence
  source 1..4578: mol_type = other DNA
atgcggggcgtgggctggcagatgctgagcctgagcctgggcctggtgttggcaatcctgaataaggtggctccacaggcctgtcctgcgcagtgctcttgtagtggttctactgtggactgccacggattagccttacggtcagtaccacggaacataccacgaaatacagagagactggacttgaatgggaacaacatcactcgtatcaccaagacagattttgccggattgcgacacttgagggtgctgcagctcatggagaacaagatctcgaccatagaaagaggagcctttcaagacttgaaggagctcgaaaggttacgccttaatcgcaatcacctccagctgttcccagagctcttatttcttggcaccgctaagctgtataggctggacctgtccgagaaccaaatccaggcaattcctcgaaaggcttttcgaggcgccgtcgacatcaaaaatcttcagttggattataaccaaatatcatgcatcgaagacggtgctttcagagccctacgggatttggaagtgctgactctcaataataacaatattacccggctgagcgtggcctcattcaaccacatgcccaagcttaggaccttccgactgcatagtaataatttatactgtgactgccacctagcctggctgagcgattggctgcgacagcgcccccgcgtgggcttgtacacccagtgcatgggccccagccatctccgggggcacaacgtggccgaagtgcagaagagggaatttgtctgcagtggcaagggagagggccaccagtcgtttatggccccttcatgcagcgtactgcactgtccagccgcttgtacttgctctaacaatattgttgactgtcggggtaaaggtctgactgagattcccaccaacctcccggagactatcactgagatcagactggaacagaacactataaaggttataccacccggggccttttctccttacaagaagctccgacggatagacttgtcgaacaaccagatctcggaactggctcctgatgccttccaaggattacgttcacttaacagtctcgtactgtatggcaataagataacagagctgcctaaatccttgtttgaaggtctgttttcacttcagctcctgttattaaatgcgaacaaaatcaactgtctgcgcgtcgacgctttccaggatctgcataacctgaaccttctgagtctttacgataataagctccagactattgcaaaaggaacctttagccccctccgtgcaatccagacaatgcatctggctcagaatccctttatctgcgactgccatctgaaatggctggccgattacctccacacaaatcctattgaaaccagtggggcgaggtgtacctccccacggcgcctggcaaacaagcgcattgggcaaattaaatctaaaaagttcaggtgctccgggaccgaggactatagatccaagctgagcggcgattgtttcgccgacctggcctgcccagagaagtgccgttgtgaaggtacgacagtcgactgtagcaaccaaaagctcaacaagatcccggaacacataccgcaatatactgccgaactgcgcctgaataacaacgaatttaccgtactcgaggcaaccggaatttttaagaagctaccccagcttagaaaaattaatttttcaaataataagatcactgatattgaggaaggggccttcgagggagcctcgggggttaacgaaatcctactgacaagtaaccgtttagagaacgtgcaacacaagatgtttaaaggcctcgagtcattgaagactttaatgctgagatcaaatagaatcacctgtgtcggtaatgatagttttatcggtttgtcttccgtaaggctactgtccctctacgacaatcagatcaccactgtagccccgggcgcatttgataccctccatagcctctccacgctcaatctcctggccaatccgttcaactgtaactgctacctagcatggctgggggagtggctccggaagaagaggattgttactggaaatcctagatgtcaaaagccgtattttctaaaggaaatacctatccaggacgttgctatccaggactttacatgcgacgatgggaacgatgacaactcatgctcccctctgagtcgttgcccaaccgagtgcacatgtctggacaccgtggtgcgctgtagcaataaaggcctcaaagtgctacccaaggggattccaagagatgtgacagagctttatctggacggcaatcagtttacactggttcctaaagaattaagcaattataagcatctaaccctaattgatctctccaataaccggatcagcaccctgagtaatcagtcatttagcaatatgacgcagttgctaaccctcatcctttcctataatcgcctgcggtgtattccacccagaacattcgatggactcaagagtttacggctgctctctcttcatgggaacgacatatcggtagttccggagggagcttttaacgacctgagtgccctgtctcacttggctatcggcgccaatccattatattgtgactgcaatatgcagtggttgtccgactgggttaagtccgagtataaagagccaggaattgcacggtgtgctggaccaggcgagatggccgacaaactgctgctgaccaccccgtctaagaagtttacctgtcagggtcccgttgatgtgaacatactcgcaaaatgtaatccttgtttgtctaatccgtgcaaaaacgacggaacttgcaatagcgatccggttgacttctaccggtgcacatgcccttatgggtttaaaggacaagattgtgatgtgcctattcacgcctgcattagtaacccttgtaaacacggtggtacctgccacctgaaagagggcgaagaggatggcttttggtgcatttgcgccgacggctttgaaggagaaaactgtgaggtgaatgttgacgactgcgaagataacgattgcgagaacaactctacctgcgttgacgggattaacaactacacatgtctgtgtccaccagagtatacaggagaactgtgcgaggaaaaattggacttttgtgcccaggacttgaacccttgccaacatgactccaaatgtatcctgactccaaaaggcttcaaatgcgactgcactccgggctacgtaggggagcactgcgatatcgatttcgatgattgtcaggataacaaatgtaagaatggcgcccactgcactgatgcggtaaatggatatacctgcatctgtccggagggctatagtggattattttgtgaattttcccctccaatggtattacctcgcacgagcccctgcgataattttgattgccagaacggggctcagtgtatcgtccgtatcaacgagcctatctgccagtgcctgcctggataccagggcgaaaagtgtgagaagctggttagcgtcaacttcatcaacaaggaaagttatctgcagatacctagcgcaaaggtgagaccacagacaaatatcaccctgcaaattgctacagacgaggacagtggcatccttctctataagggggacaaagatcatatcgccgtcgagctgtaccggggccgcgtgagggcctcctacgatacaggttcacacccagcatctgccatatatagtgttgagacaattaatgacgggaactttcacatcgtggagttgctagctcttgaccaatctttatcactgtccgttgacggcggtaaccctaagatcattacaaacttaagcaaacagagtacccttaattttgatagccctctctacgtaggagggatgcctggcaagtctaacgtggcatcactgagacaggctcctggccagaacggcaccagcttccatggctgcatccgtaatctgtacattaacagtgaactgcaggatttccaaaaagtgcctatgcagaccggcatcctgccgggctgcgaaccatgccacaagaaagtttgcgcccacggcacatgccaaccatcttctcaggccgggttcacgtgtgaatgtcaagagggatggatgggcccgttgtgtgatcagcgaacaaatgacccttgccttgggaacaagtgtgtgcatggcacctgtctccctattaacgccttttcttattcctgtaagtgcctcgaggggcatggcggagtgctttgtgatgaagaggaagatctgtttaacccatgccaggctataaaatgtaagcatggcaagtgtcgactcagtgggttaggacagccttactgcgagtgctctagtggatacaccggcgactcatgcgaccgcgagatatcttgtaggggggaacggatcagagactactatcagaaacagcagggctacgctgcctgccaaactacaaagaaagtttccagattagaatgccgaggtgggtgcgccggggggcagtgctgtgggccactgcgcagtaagcgaagaaaatattcttttgagtgtacagacggctcctcgttcgtggacgaagtggagaaggtcgttaagtgcgggtgcacacgctgcgtttcctag

SEQ ID NO: 205312 - DNA, 4566 bp, synthetic construct
  misc_feature 1..4566: note = Description of Artificial Sequence: Synthetic coding sequence
  source 1..4566: mol_type = other DNA
atgcggggcgtgggctggcagatgctgagcctgagcctgggcctggtgttggcgatcctgaataaggttgctcctcaggcctgcccagcacaatgcagttgttccggaagcactgtcgactgtcacggcttggctctgcgatcagtccccaggaacatcccccggaacactgagcgacttgacctgaatggtaataacattacccgcatcactaagacagatttcgcgggtctccgacatctccgcgttttacaactgatggagaacaagatctccactatcgagaggggcgcttttcaggatctcaaagagctggagcgactgcgattaaaccgtaaccatcttcagctgtttcctgaactgctctttctgggaacagcaaagttgtatcggctggatttgagcgagaaccagattcaggctatccccaggaaagccttccgtggagcagtggatatcaagaatctccagttggattacaatcagatctcttgtatcgaagacggggccttccgagcactgagagatttggaagtgctaaccctaaataataacaacatcaccaggttatccgtagcaagttttaaccatatgccgaaattgagaaccttcaggctccattctaacaatctttattgtgattgccatctggcttggttgagcgattggctccgacagaggccccgtgtaggcctgtatacccaatgtatgggtccctcgcatctgcgcggccataacgtagcggaggtgcagaaaagggagttcgtgtgtagcggacaccagagcttcatggcgccaagctgttctgtactgcattgtcctgccgcgtgcacttgttccaacaacattgtggactgcagaggcaaaggacttaccgagattccgacaaatctgcctgagaccatcaccgagataagacttgaacagaacactatcaaagtcataccccccggagccttttccccttataagaagcttcgtcggattgatttaagcaacaaccaaataagtgaactggctcctgatgcctttcagggcctaagatcactgaactcactagttctatacgggaacaagattaccgagctcccaaagtcactattcgaggggcttttcagcctgcagctgctgctcttgaacgcgaacaagataaattgcctgcgggttgacgcctttcaagatctgcataatctgaatctgctttccctgtatgacaataaacttcagaccattgctaaaggcaccttcagtcctctccgggccatccaaacaatgcacctggcccagaacccatttatctgcgactgccatttgaagtggctagcagattacctgcacaccaatccaatagaaactagtggcgcaagatgcacgtctcctagaagactagcgaataagcggatcgggcagattaaaagtaagaagttccgctgcagcggcaccgaggattaccgcagcaaacttagcggcgattgcttcgccgacttggcctgccccgagaaatgccgctgcgaaggcacaacagtggattgcagcaaccaaaagctgaataagatacccgagcacattccgcaatacactgctgagctgcggctcaacaataacgaatttaccgttctggaagctactggcatcttcaagaagctgcctcaactacgtaagattaatttcagcaacaacaaaatcacagacatcgaggagggcgcattcgagggagcgagtggcgtgaacgagattttattaacaagcaatagactcgaaaacgttcaacacaagatgtttaaggggctggagagtctaaaaacactgatgctgagatccaatcgcatcacctgcgtcggtaatgatagcttcatcggcctgtcgtctgtcaggctgttgtccctgtacgataaccagattactacagtcgcacccggggccttcgacactctccacagcttgtccacactaaatctgctcgcgaacccctttaattgtaattgttaccttgcatggctgggagaatggctaaggaagaagcgcatcgtcactggcaatcctcgctgtcagaagccttacttccttaaagagatccctatccaggacgttgctatccaggacttcacatgtgatgatgggaacgacgacaactcctgcagtcctctcagccgctgccccacagagtgcacttgtctggatacagttgtacgctgctctaacaagggactgaaagtgctgccgaaaggaattcctagggacgtaacagaactctacctggacggaaaccagtttacactcgtcccgaaagagctcagcaattacaagcacctaactctgattgatctatctaacaaccggatatcgacactgtctaatcagtcgtttagcaatatgacacagctattgactttgatcctaagctacaaccgacttagatgtatccccccgcgaaccttcgacggactgaagtccctgcgtctgctgagccttcatggcaacgacataagcgttgtgcctgaaggagcgttcaatgatctgagcgcattatcgcacctggccataggtgctaaccccctttactgtgactgcaacatgcagtggctgtcagactgggtcaagagtgaatacaaagagcccggcatagctaggtgtgccgggcctggcgaaatggctgacaagctactcctgaccaccccctctaagaaattcacttgtcaagggccggttgacgttaacatcttagccaaatgcaatccatgtctgagcaatccctgtaaaaacgatggaacttgcaactctgacccggtggacttctataggtgtacctgtccttacggctttaaagggcaggattgcgacgtcccaattcacgcgtgcatctccaacccgtgcaaacatgggggaacttgccacctgaaggaaggggaggaagacggcttttggtgtatatgcgcggacggctttgaaggtgagaattgtgaagtgaatgtggatgattgcgaggataacgactgtgagaacaattcaacttgcgtggacgggatcaataactatacatgcctttgtcccccagagtataccggcgaactgtgcgaggagaagctggacttctgtgcccaggatctgaatccttgccaacatgattccaaatgtattctcacaccaaagggttttaagtgtgattgcacgccaggctacgtgggggaacactgcgatatcgactttgacgactgccaggacaataagtgtaaaaacggcgctcattgcacagacgccgttaatgggtatacctgcatatgcccagaaggctactcaggtctgttctgcgagttttctccaccgatggtgcttcctcgtaccagcccttgtgacaattttgattgtcagaatggtgctcaatgtattgttcgcattaatgaaccaatctgtcagtgtctaccaggttaccagggtgagaaatgcgaaaaactggtttccgtgaattttattaacaaagagtcctatctacaaattccatctgccaaagtgcgaccacaaaccaatatcactctgcagattgcaacagatgaagattccgggattttgttgtataagggcgataaagaccacattgcagtggagctgtatcggggccgcgtccgggcctcctacgacactggttcccaccctgcgagcgccatttattctgtggaaacaatcaatgacgggaacttccacatcgtggaactcctcgccttagaccaaagtctgtctctgtctgttgatggcggcaacccaaaaattattaccaacctgtcaaaacaaagtaccctaaactttgacagtccattgtacgtgggtgggatgcccggcaaatctaatgtggcctccctgcggcaggcaccagggcagaacgggacaagcttccatgggtgcattagaaatctgtacatcaactctgaattgcaagacttccagaaggtgccgatgcaaacagggattcttcccggttgcgagccctgtcacaaaaaggtgtgcgcccacgggacgtgccagccctcctcacaggccggctttacttgcgagtgccaggagggctggatgggacctctgtgcgaccagagaaccaatgatccatgtctgggtaacaaatgtgtgcacggtacctgcttacccattaacgccttctcctactcctgcaagtgcctcgagggacatggcggagtgctgtgcgatgaagaggaggatctcttcaacccatgccaagctattaaatgtaaacacggcaaatgtcgtctgtccggtttgggacagccatactgtgagtgctctagcggctacactggtgattcctgtgatcgggagattagctgccggggggagcggataagagactactaccagaagcagcagggctacgctgcctgccagacgaccaaaaaggtgtcaaggttagagtgccgcggcggatgcgccggcggccagtgctgcgggccgttaagaagcaagcgacgcaaatattcattcgaatgcaccgacggatcctcttttgtggatgaggtggaaaaagtggtgaaatgcggatgcacaaggtgcgtgagttag

SEQ ID NO: 205313 - DNA, 4578 bp, synthetic construct
  misc_feature 1..4578: note = Description of Artificial Sequence: Synthetic coding sequence
  source 1..4578: mol_type = other DNA
atgcggggcgtgggctggcagatgctgagcctgagcctgggcctggtgttggcaatattgaacaaagtcgcccctcaggcgtgtcctgcccaatgttcctgttccggcagtactgtcgattgtcatggtctggctctgaggtcagtccctagaaatataccacgcaacacggaacgacttgacttgaatgggaacaacataacccgaataactaagaccgattttgctggtctgcggcacttaagagtgcttcagttgatggaaaacaagatcagcacaattgaaagaggagctttccaagatctgaaggaactggagcgtttgagactaaacaggaatcaccttcagctgtttccagaactactgttccttggtaccgccaagctgtacagactggacctcagtgaaaatcagatccaggccatcccacgtaaggctttcagaggcgccgtagatattaaaaacctacagctcgactacaaccagattagctgtatagaggatggcgccttccgtgcactcagagatctggaggttttaacccttaacaataacaatataacacgcctgagtgtggctagctttaatcatatgcctaaactgcgcaccttccgacttcatagcaacaacctctattgcgattgtcaccttgcatggctctcagactggctccgccagcgtcctagagtggggctctatacacagtgtatgggcccctcacacctgcgtggccacaacgtggcagaggtgcagaaacgcgagtttgtgtgctccgacgaagaggagggccaccaatcttttatggcccctagctgctccgtgcttcattgcccggctgcctgcacttgttcaaataacattgtcgattgtcgggggaagggcttgaccgaaattccaactaacttaccagagacgatcacagagatccgattagaacagaatacaatcaaggttattcctccaggtgcctttagcccttataaaaaacttcggcgaattgatctttcaaataatcagatctccgaattggcccctgacgcatttcagggactgcgaagcctgaactctctcgtgctgtatggaaataagatcacagaattgccaaagtcgttgtttgaagggttatttagcttacagctcttactgttgaacgccaacaagatcaattgtctgagagtcgatgccttccaggatcttcataatctgaacctcctatcactgtacgataacaaactccagacaatagccaaaggcacattcagtccactgagagccatccagacaatgcacctcgctcagaaccccttcatctgtgactgccatctgaagtggttggcagattaccttcacaccaaccctatcgaaactagcggagcgagatgtacctcgccacggaggttggctaataagaggatcggtcagattaagtcaaagaaatttaggtgttccggaaccgaggactacagatctaagctaagcggcgactgttttgcagacctcgcttgccccgaaaagtgtcggtgcgaaggaaccaccgtggattgctcgaatcaaaaacttaacaagatccctgagcacattccccaatacactgcggagctcaggttaaacaataacgagtttacagtcttagaagctactgggattttcaagaaacttcctcagctgagaaagattaatttctctaataacaaaatcaccgatatcgaggaaggggctttcgaaggtgcgagcggcgtcaacgagatcctgctgacctcgaaccgcctggagaatgtacagcacaagatgttcaaaggtctcgagagcctcaaaacactcatgctgaggtccaatcggataacatgtgtcgggaatgactccttcataggactgtcaagtgttcgcttgctgtcattgtacgataaccagatcacaacagtcgcaccgggggcttttgacaccctacatagcctctctaccctcaacctacttgccaatccatttaattgcaattgctacctggcgtggctgggcgagtggttacggaagaaaaggatcgtcaccgggaaccctagatgtcagaaaccctacttcctgaaggaaattcccattcaggatgttgctattcaagattttacatgcgacgatggcaatgacgataacagctgctcgcctctaagtaggtgtccaaccgagtgtacctgcctggataccgttgtgaggtgctcaaacaaggggctgaaagtgctgcccaaggggattccacgcgacgttacggagctctacctcgatgggaaccagttcaccctggttcccaaagagctgtccaactataagcatctcactttaattgacttgagtaacaaccgcatctccaccctgagcaaccaaagtttttcaaacatgacacagctcctcaccctgattctctcctataaccgcttgcggtgtataccccccaggacatttgacggcctgaaatccttaagactgttatctttgcacggcaatgacatctctgtggtgcccgaaggagcctttaatgacttgtcagcattgagccacctcgcaattggcgcaaacccattatattgcgattgtaacatgcaatggctttctgactgggttaaatctgagtacaaagaacccgggattgctcggtgtgctggtcctggagagatggccgataagctactccttaccaccccttctaaaaaattcacatgtcaaggacctgtggatgttaacatcctggccaagtgcaacccttgcctgagcaatccctgcaaaaatgacgggacatgcaatagcgaccccgttgacttctatagatgcacctgtccttacggattcaaggggcaggactgtgacgtcccgatacacgcgtgcatttcaaatccctgtaaacacgggggcacatgtcacctgaaggaaggcgaggaggatggattctggtgcatctgtgcagatgggtttgaaggggagaattgtgaagttaatgtcgacgattgtgaagacaacgactgtgagaataactccacatgtgtggatggcatcaataactatacctgcctttgcccgcctgaatatacaggagaactgtgtgaggaaaagctcgacttctgcgcgcaggatcttaatccctgtcagcatgattcaaagtgtatacttacacccaaaggcttcaagtgtgactgtactcctggctatgtcggggaacattgcgacatcgacttcgatgattgccaggacaataaatgcaagaatggagcacactgcaccgatgcagtgaatggctatacctgcatttgccccgagggttacagtggcctgttttgtgagttctcgccacctatggtcctaccacgtacatctccgtgtgataatttcgattgccaaaacggggcgcagtgcatcgtgagaatcaacgaaccaatttgtcagtgcctgcccggttatcaaggagagaaatgcgagaaactggttagtgtcaacttcataaataaagaaagttacctgcagatccctagtgccaaagtgaggccacagacaaatataacattacagatcgccacggacgaggattccggcattcttctgtacaagggggataaagatcacatcgctgtggaactatatcgtggaagagtccgcgcttcttatgatacaggttcccaccctgcctccgccatttacagcgtagaaaccatcaacgacggaaactttcatatcgtggagcttttagcacttgaccagagtctctccttgtctgtggacggaggaaaccctaagatcataactaacctctctaagcagtcaacattgaatttcgacagccctctgtatgtgggcggcatgcctggaaagtcaaacgtcgccagcctgcgccaggcccccggccagaacgggacatcatttcatgggtgtatccgcaacctctacataaactcagaattacaggacttccagaaggtgcctatgcagaccgggatcctccccggttgtgagccttgtcataagaaggtgtgcgcccatgggacgtgtcaacctagctcacaggctggtttcacttgcgagtgccaggaaggatggatggggccgctgtgtgaccagaggacaaatgatccatgccttggtaataagtgcgttcacggcacgtgcttgccaataaatgctttttcttattcgtgcaaatgtctcgagggccatggaggcgtgctctgtgatgaggaggaggacttgttcaacccgtgtcaagccatcaagtgtaagcacgggaagtgccgcttgagcggactcgggcagccatactgcgagtgttcctctggctacaccggcgactcctgcgatcgcgagatctcgtgtagaggagagcggatccgggattactaccaaaaacagcaagggtacgctgcgtgtcagacaactaaaaaggtgagcaggctggagtgcagaggcgggtgtgctgggggccagtgctgcggtcctctccgatccaaaagacgaaaatacagctttgagtgtaccgacggcagctctttcgtcgatgaggtcgagaaagtcgttaagtgtgggtgtacccgatgcgtcagctag

SEQ ID NO: 205314 - DNA, 4590 bp, synthetic construct
  misc_feature 1..4590: note = Description of Artificial Sequence: Synthetic coding sequence
  source 1..4590: mol_type = other DNA
atgcggggcgtgggctggcagatgctgagcctgagcctgggcctggtgctggccattcttaacaaagtggctccccaggcttgtcctgcgcaatgctcctgctccgggagcacggtggattgccatggcttagcccttcgctcagttccccggaatataccccggaataccgagcggctggatctgaacggaaacaacatcacccgcatcacgaaaacagatttcgctgggttacggcatctgcgggtgttgcaactgatggagaataagatctcgacgatcgaaaggggtgcatttcaggatctgaaggagctagagcgtttgagactgaatagaaatcatctacagttgttcccagagctcctcttcctcggtacagccaaactctacagactggacctgtctgagaatcagattcaggcaattccccggaaagctttcaggggtgccgttgatattaagaacctccaactggattataatcagatttcctgtatcgaagacggagcatttcgtgccctgagggacttagaagttctgacgttgaacaacaacaacataactaggttgagcgtggctagcttcaaccacatgcccaaactccggaccttccggctgcattccaacaacctgtattgcgactgtcacctagcttggctatccgattggctgagacagaggcccagagtcgggttatacacccaatgcatggggcctagccatttacgtgggcacaacgtagccgaggtgcagaaacgggagttcgtatgcagcgggcatcagagcttcatggccccgtcttgttctgtgttgcactgtcccgctgcttgtacatgtagcaacaatattgtggactgtcggggcaagggcctcaccgagattccgaccaatttgcccgaaactataaccgagattcgcttggaacaaaatactatcaaagttattccaccaggtgcatttagcccatacaagaagttgcggcgaatcgacctcagcaataatcagatttctgagctggctcctgacgccttccagggcctgagatctttaaattcactggtgttatatggcaacaagattaccgagctgcctaagagcctttttgaggggctcttttcgctgcaactgttactgctaaatgccaacaagatcaactgcttaagagtggatgcatttcaagatcttcacaatctcaatcttctgtccctctatgacaataaactccagacaattgctaagggcaccttcagcccgctacgggccatccagacaatgcacctggcccagaatcctttcatttgcgactgccatctcaagtggttggcagattacttgcatacaaatcccatcgagactagcggcgcccggtgcacgagtcctcgtcgcctggcaaacaagagaattgggcagatcaagtccaagaagtttcgatgctcagccaaggaacagtattttattccgggcaccgaggattaccgaagcaaactgagtggcgactgtttcgctgacttggcctgtccagagaaatgccgctgcgaggggaccacagtggactgcagcaatcaaaagttgaacaagatcccagagcatatcccccagtacaccgccgagttgcgattgaataataacgagtttacagtcttagaggcgactggtatcttcaaaaaattaccacaactccggaaaattaacttttctaacaataagattaccgatattgaagaaggtgcattcgaaggagcgtcaggggtgaacgaaatcctgttgactagcaacagattggaaaatgtccagcacaagatgtttaagggcctggagtctcttaagacgctgatgctccgttctaatcggatcacttgtgttggaaacgattcattcattggtttgagttcagtgcgattgctttctttgtacgacaatcagatcaccaccgtggcccccggtgccttcgacacacttcattcacttagcactctcaacctgctggccaacccgttcaactgtaattgctacctcgcctggctgggcgaatggctgcgaaagaagagaatcgtgacggggaaccctcgatgccaaaagccgtatttcctgaaagaaatccctattcaggatgtcgccatacaggactttacatgtgatgacgggaatgacgataattcctgtagccccctgtcacgttgcccgacggagtgtacctgcctcgatacagtggtgaggtgttccaacaaagggcttaaagtcctgccaaagggtattccacgcgatgtcacagaactttatttagacggtaaccagtttaccttagtgccaaaggagctctcgaattacaaacatctcaccttgatcgatttgtccaataacagaatcagcacacttagtaatcaaagcttttcaaatatgactcagctattaacactcatcctgtcatataatagattgagatgtattccccctcgcaccttcgatggcctcaagtccttgaggctgctgtccctgcatggcaatgatatatcagtcgtgcccgagggggcatttaacgatctgagcgcacttagccatttggctattggcgcgaaccctctctactgtgactgcaacatgcagtggctctctgactgggtcaaaagcgaatacaaggaaccgggcatcgcgcggtgcgccggaccaggggagatggccgataaactgttactgacaactccaagcaagaagtttacctgtcagggcccagtggacgttaatattctcgcaaaatgcaatccttgtctttcaaacccatgtaagaacgacggcacatgcaacagcgatcctgtggatttttatagatgcacatgtccctacggcttcaaggggcaggactgcgacgtgccgatccatgcctgtataagcaacccatgtaaacacggaggcacatgccacttgaaagagggagaagaggacggtttttggtgtatctgtgcagatggctttgagggagagaactgtgaagtcaatgtggacgactgcgaggacaacgattgcgaaaacaactctacatgtgtcgacgggattaacaattatacctgcctctgccctcctgagtacaccggtgagctgtgcgaagaaaagctcgacttttgtgctcaggacctgaatccttgtcaacatgacagcaagtgcatcctgacccccaaaggtttcaaatgcgactgtacaccaggatacgtgggcgaacactgtgatatcgacttcgatgattgccaggataataagtgtaagaacggggcgcactgcacagatgccgtgaacggttacacctgtatttgccctgaagggtacagtggcctgttttgtgagtttagcccccctatggtgcttccacggaccagcccctgtgacaacttcgactgtcagaatggcgctcagtgcatagtgcgcattaatgaacctatatgccagtgtctccccggatatcaaggggagaagtgcgagaaattagtgagcgtgaatttcataaataaagagtcttacttgcagatcccaagtgctaaggttaggccacagacaaatattactcttcagattgctacagatgaagattcaggcattctgctctacaaaggggacaaagaccatatagcagtggaactctaccggggacgcgtgcgtgcgagttatgacacgggaagccatcccgcctctgctatctacagtgtggaaacaatcaacgacggcaacttccacattgtcgaactgctggccttagaccaaagcttgagtctaagtgtggacgggggaaatcctaagattataaccaacctgtcgaagcaaagcacattgaatttcgacagccccttgtacgtgggcggaatgcctggcaagtctaatgtggctagtctcaggcaggctccaggccagaatggaacttctttccatggatgcattaggaatttatatatcaacagcgaacttcaggactttcagaaagtccctatgcagacagggattttacctggctgcgagccttgccacaaaaaggtgtgtgctcatgggacttgccaaccgtcctctcaggccggcttcacgtgtgaatgtcaggaaggttggatgggtccactttgcgaccaaaggacgaacgacccgtgcttaggtaacaagtgcgtacacgggacctgcctgccaatcaatgctttttcctacagctgtaagtgcctggagggacatgggggggtgttatgcgacgaggaagaagacctgttcaatccgtgccaagcaattaagtgcaagcatggcaaatgtcgactgtccggactggggcagccctattgcgagtgttcaagcggatacactggtgattcttgtgacagggagatctcttgcagaggcgaaagaataagagactactatcaaaaacagcaggggtatgccgcatgccagactactaaaaaggtgtcacgtctggagtgccgcggtggttgtgcggggggccaatgttgtgggcctctcaggtccaagcgacgaaaatacagcttcgagtgcactgatgggtccagcttcgtggacgaagtggaaaaagtcgttaaatgtggatgcactcgctgcgtcagctag

SEQ ID NO: 205315 - DNA, 4419 bp, synthetic construct
  misc_feature 1..4419: note = Description of Artificial Sequence: Synthetic coding sequence
  source 1..4419: mol_type = other DNA
atggcccccggctgggccggcgtgggcgccgccgtgcgggcccggctggcactcgcattggccctggccagtgtcctgagcggaccccccgccgtcgcatgccctaccaagtgcacttgttcggccgccagtgttgattgccacggactgggcctcagagccgtgcctcgcggaattccccgcaacgctgagaggttagatctggatcggaataacatcactcggattacgaaaatggacttcgccggactgaagaatctgcgggtccttcatctggaggacaaccaggtctctgtgatcgaacgcggggcgttccaggacctgaaacagctggaacggctcaggctgaacaagaacaagctacaggtgctccccgaactgctatttcagtcaaccccgaagcttactcgcctcgacctgagcgaaaatcaaatccagggaattcctcgcaaagcattcagggggataactgatgtgaaaaacttacagttggataacaaccatatctcttgtatcgaggacggggctttccgagccctccgcgatctggagatccttactctgaataacaacaacatcagccggattctagttacaagcttcaatcacatgcccaaaatccgtactcttagactccatagtaatcatttgtattgtgactgtcacttggcctggctctcggactggctgcgccagcggcggaccgttggtcagtttacgctctgcatggcacccgtccaccttcgagggttcaatgtcgcggacgtccagaaaaaagagtacgtctgcccagccccacattcagagccacctagttgtaatgccaacagtataagttgcccttctccctgtacatgtagtaataacatcgttgattgtcggggcaaaggtctcatggagattccagcgaacctccccgagggaatcgtggagatacggcttgagcagaactccattaaagccatccccgccggcgcctttacccagtataaaaaacttaagcgtattgacatttcaaagaatcagatttcagacattgctcctgacgccttccagggactgaaatctctgacatctctcgtgctttatggcaataaaataacagagatcgtgaaagggctgtttgacgggttggtctctctccaactcttgctcctcaacgctaacaagatcaattgtctcagagtgaataccttccaggatctgcagaacctcaacctcttgtccctttacgataacaagctgcagaccataagcaaggggctcttcgctcctctgcaatctattcagacccttcacctggcccagaatcccttcgtgtgtgactgccacctgaaatggttggcggactacctccaggataatccaatcgagacatctggcgcaagatgttcttcaccccggcgcctcgctaacaagcgaattagccagatcaaatccaaaaagtttcggtgcagcggcagcgaagattacagatcgcgtttcagttccgagtgctttatggatctggtctgtccggagaagtgccgctgcgagggcactatcgtagattgcagcaaccagaagctggttaggataccgagccatctccctgaatacgtaacagatctgaggctgaatgataatgaggtcagtgtgctggaggctacaggcatcttcaaaaaattgcccaacctcaggaaaattaacttgagtaataataaaatcaaggaggtgcgcgagggagctttcgacggcgctgcgtcagtccaagagctgatgctaacgggcaaccagttggagaccgtgcatgggcgggtgtttcgagggttatccggactgaagacattaatgctgagatcaaaccttattggctgtgtgagcaatgatacatttgccgggctgtcttccgtacggctactatcactctacgataatcggattaccacgataacgcccggggcttttaccactttggtatccctttcaaccatcaacctcctgagcaatccttttaactgcaactgccacctcgcatggttaggaaagtggttaaggaagcgtcgcatcgtgtccggcaatccaaggtgtcagaaacctttctttctgaaggagatacccattcaggatgtggctatccaagacttcacatgcgacggcaacgaggagtccagttgtcaactgagtcccagatgtccagaacagtgtacgtgcatggaaacggtcgtgagatgcagcaacaaaggcctgcgggcgctaccgcgaggaatgcctaaggatgtaacagaactgtatctggaagggaatcacttaaccgcggtcccaagggagctgagcgcgctccgacatttgaccctcattgatctgtcaaataacagtatctcaatgttgacaaattacaccttctccaacatgagtcacctatcaaccttgatactgtcatataataggctacgttgcatccctgttcatgcgttcaatggacttcgatccctgcgggtgctcaccctgcacgggaatgacatcagctctgtgcccgaaggttcctttaatgatttgaccagcctatcccatttggccttgggcacgaaccccttgcattgcgattgctcgcttcggtggctcagcgagtgggtcaaggcaggttataaagagcccggcattgcccgctgtagctcgccagaacctatggcggatcgcttacttctcacaacacccacacacaggttccagtgtaagggccccgtagatatcaatattgtggccaaatgtaatgcctgcctgtcctctccctgtaagaataatgggacatgcacccaagatcccgtcgagctgtaccgttgcgcttgtccatactcttataagggtaaagactgtaccgtgcccattaatacttgcatccaaaacccatgccaacatggcgggacctgtcacctctcagattctcacaaagatggtttttcgtgcagctgccccctgggctttgaagggcagcggtgtgagattaatcccgacgactgtgaagacaatgactgtgagaacaacgcaacctgtgtggacgggattaacaattacgtgtgcatttgtccacccaactacaccggcgaactatgcgatgaagtgatcgaccattgtgttcccgaacttaatctatgccaacacgaggctaagtgtattccccttgataagggattcagttgtgagtgtgtgccagggtactctggcaagttgtgtgagactgataatgatgattgtgtggcacataaatgtcgccacggggctcagtgcgtagatacaattaatggatacacatgcacttgcccccaggggttcagtggacctttctgcgagcatccacctcccatggtactgctacagacctcaccgtgtgatcaatacgaatgtcagaatggcgctcaatgcatcgtggtgcagcaggaacccacgtgtcgctgccccccaggatttgccggtcctagatgtgaaaagcttattacagtgaatttcgtgggaaaggactcctacgtggagctagcaagtgccaaggtaaggccacaggctaacatctccctccaagtggctaccgacaaggataatggtattctcctttataaaggggacaacgacccactggcactggaactttatcagggacacgtccgactggtctacgactcactgtcctctcccccaaccactgtttacagtgttgagactgtgaatgatggccagttccactctgttgagctcgtcactctcaatcagaccctcaatttggtagtcgacaaggggacgccaaagtccttgggaaagctgcagaagcagccagccgtaggaataaattcgcctctgtacctcggagggatccccacaagcactggtctgtccgctctgcgacagggaaccgacaggccgttgggcggcttccacgggtgcattcacgaggtacggatcaataatgagctccaagatttcaaggccttaccgcctcagtccctcggggtgtccccgggatgcaagagttgcaccgtgtgtaagcatggcctctgtcgcagtgtggaaaaggacagtgtagtctgtgaatgtcgccccgggtggaccggtccactgtgcgatcaggaggcaagggacccatgcctgggccatcgctgtcatcatgggaaatgcgtcgcaactggcactagctacatgtgcaagtgcgcagaagggtatgggggagacctctgtgataataagaatgatagtgccaacgcctgctcggcatttaaatgccaccatggccaatgtcacatctcagaccagggtgaaccgtactgcttatgtcaaccaggattctcgggcgagcactgccagcaggtatttcgagcacaggtttttcaatcgtctcttccaggaaattgctcttggagttgttggcctccccggccccctatgccatag

SEQ ID NO: 205316 - DNA, 4572 bp, synthetic construct
  misc_feature 1..4572: note = Description of Artificial Sequence: Synthetic coding sequence
  source 1..4572: mol_type = other DNA
atggcccccggctgggccggcgtgggcgccgccgtgcgggcccggcttgccctggctcttgcgttggcttctgtgctctccggacctcccgccgttgcctgccctactaaatgtacgtgcagcgctgcttccgtagactgccatggacttggacttagagcagtgcctagaggaattcccaggaacgctgagcgattagatttggatcgaaataacatcacacgtattaccaaaatggatttcgctggtctgaagaaccttagagttctccatctggaagataaccaggtgagcgtgatcgagagaggcgcctttcaggacctgaaacagctagagcggttgcgtttgaacaaaaataaactccaggtattgcctgaactgctctttcagagtacacctaaactgacacgtttagatctcagtgagaaccagatacaggggatcccacgaaaggccttcaggggcatcacagacgtgaaaaacctgcagctggataataatcacattagttgtatcgaagatggtgcatttcgcgctctccgagacctggagattctgaccctgaacaataacaacatttcccggattctggttaccagtttcaatcacatgcccaaaatccgaacgttaagactccacagcaatcatctgtactgcgactgtcatttggcatggctttctgattggctcaggcagcgacggaccgtaggacaatttacactgtgtatggccccagtccacctgcgagggtttaacgtggcagatgtacaaaaaaaggagtatgtgtgcccagccccccactccgagccaccgagttgcaacgccaattccatctcctgccctagtccctgcacttgcagtaataacattgtcgactgccgggggaagggcctcatggagatccctgcaaatctgcccgaagggatagtggaaatcagactcgaacaaaatagcatcaaggctataccagccggggccttcacccagtacaaaaagttaaagagaattgatatctccaagaaccagattagcgacatagctcctgatgcgttccaaggcctcaagtctctgacctctttagtgctctacggcaataagataaccgaaatagtgaaaggcctcttcgacgggctggtgtcgttacagctgctgcttctcaatgcaaacaagattaattgcctgagagtgaacactttccaggacctgcagaatctcaacctcctcagcctgtatgataataagctgcagaccatcagcaaggggttgttcgcgccgttgcaatcgattcaaacgttgcacctggcccaaaatcctttcgtctgcgactgtcacctgaaatggctggccgactacctgcaggacaaccctattgagacttccggagccagatgtagttccccaaggcgactggcaaataagagaatttctcagataaaatccaagaaatttaggtgtagcggctctgaagattacaggtctcgattcagctccgagtgcttcatggacctggtgtgcccggaaaagtgcaggtgtgaaggaaccatcgtcgactgcagcaatcagaaactggtcaggattccttcacacctccccgaatacgtgacagacctgcgcctgaatgataacgaggtgagcgtgctggaagcaaccgggatatttaaaaagcttccaaaccttcggaagatcaacctctccaacaacaagattaaggaagtgcgcgaaggtgcttttgacggggctgcctcagtccaagagttgatgctgacaggaaaccagctggagacagtccatgggcgcgtattcagaggcctgagcggccttaagacactaatgctccgtagcaacttaatcggatgtgtcagcaatgacaccttcgccgggctaagtagtgttcggctgttgtccttgtatgataatcgcattaccacaataacgccgggtgcattcactacactggtgagtctgtccaccattaacctgttgtctaacccctttaattgtaattgtcatctggcctggctgggaaagtggttgaggaagagaaggatcgtttcaggtaatcccaggtgccagaagccttttttccttaaagagatcccaatccaggatgtcgctattcaagatttcacatgcgatggcaacgaggagtcatcctgtcagctcagtccacggtgccccgaacagtgcacatgtatggaaacagtcgtgcggtgcagcaacaaggggttaagggcgctcccacggggtatgccaaaagacgtcactgaattgtatcttgagggaaaccatctgaccgccgtgcctagagagctgagcgctctgcggcatcttaccttaatcgacctgtccaacaatagtatctctatgttgaccaattacacctttagcaacatgagccatttgtctacactgatcctttcatacaaccggctgagatgcattccagtacacgccttcaacggcctccgaagcctgagggtcctgactttgcacggaaatgatatcagcagcgtgccagaagggagttttaatgatctcaccagtctgagccacttggccctaggtacaaaccctcttcattgtgattgttccctccggtggctgagcgaatgggtgaaggcgggatacaaggaacccggaattgcaaggtgcagctcaccggagccgatggccgacaggctcctcctgactactcccacacatagattccagtgcaagggacccgtggacataaatattgtggctaaatgtaacgcatgccttagcagtccatgcaagaacaacggcacttgcacccaagacccagtggaactctatcggtgcgcctgtccttattcctacaagggaaaggattgtactgtgcccatcaacacgtgcatccaaaatccctgccagcacggggggacctgtcacttatcagactcacacaaggatggtttttcgtgttcctgtccgttgggatttgagggacaaagatgcgagatcaatccagacgactgtgaagacaacgactgtgagaacaatgccacatgtgttgacggaatcaacaattacgtatgcatttgccccccgaattatactggggagctgtgcgacgaagtcattgatcactgcgttccagagttgaatctctgtcagcacgaggcgaagtgtattcccttggataagggcttctcgtgtgagtgcgtaccagggtacagcggaaagctgtgcgagaccgacaacgacgactgcgtggcacacaaatgccgccacggcgcccagtgtgtggacacaattaacggctacacgtgtacatgcccacagggctttagcggccccttctgcgagcatccccctccaatggtgctcctacaaacctccccttgcgaccaatatgagtgtcagaatggagcacagtgcatcgtggtgcagcaggaacccacctgccggtgcccccctggattcgcggggccaagatgcgaaaagctaattactgtaaactttgtagggaaagactcttatgttgaactagctagcgcaaaagtgcgtccacaagctaacatcagcttacaagtggcaacagataaggataatggaatcttgttgtataagggagataatgaccccctggcactggagctgtaccagggccatgttagactcgtgtatgatagcttatcttcacctcccacaactgtgtactctgtggagacagtgaacgatggccagtttcattccgttgagttggtgacactcaaccagacactgaacctggttgtcgacaaagggacgcccaaatccctaggcaaacttcaaaaacagccagcagtgggaattaacagtccactgtatctaggagggatccccacatcaactggactatctgccctacgccagggcactgaccgcccactcgggggcttccatggatgtattcacgaggtgagaattaataacgagctgcaggatttcaaagctctgcctccccagagcctgggagtgtctccgggatgtaaatcctgcacggtgtgtaagcatggtctttgtagaagtgtggaaaaagactcagtcgtctgtgagtgtcgaccggggtggactggccctttgtgcgaccaagaagccagggacccttgtttggggcaccgatgtcaccatggtaaatgcgtggccaccgggacttcatacatgtgcaaatgcgccgagggctatgggggcgacctgtgcgataataagaatgacagtgctaatgcctgttctgcctttaagtgtcatcacgggcagtgtcatatttctgaccagggtgaaccatactgtttgtgtcagcctgggtttagcggcgagcactgccagcaggagaatccctgtctaggccaggtagttcgggaagtgatccgcagacagaaaggttacgcctcttgcgccaccgcctcaaaggtgcccattatggaatgccgcgggggttgcggtccccagtgctgtcagcccacccggagtaagagacggaagtatgtcttccagtgcacggacggatctagctttgtggaggaggtcgaacgccacctagagtgtgggtgcctcgcctgcagctag

SEQ ID NO: 205317 - DNA, 3258 bp, synthetic construct
  misc_feature 1..3258: note = Description of Artificial Sequence: Synthetic coding sequence
  source 1..3258: mol_type = other DNA
atgagcacccccagccggttcaagaaggacaaggagatcatcgccgagtacgaatcgcaagtgaaggagatcagggcgcagcttgtggagcagcagaagtgcttggaacagcagaccgaaatgagggtccagctcctgcaagacctccaagacttttttagaaaaaaggctgaaatagaaactgaatactctcgaaatctggagaagctggccgagcgctttatggcaaaaacaaggagtactaaggatcaccagcagtataaaaaagatcagaatttgttgtcaccagtcaactgctggtacctgttgctgaaccaggtgcgccgcgaaagcaaggatcacgccacactgtccgacatctatctcaacaatgtgatcatgaggttcatgcaaatttccgaggacagtaccagaatgttcaagaaatccaaagagatagctttccagctgcacgaggacctgatgaaagtcctcaacgaactgtacacagtaatgaagacttaccacatgtaccatgctgaaagcatctccgcagaatctaaattgaaagaagctgagaagcaggaggagaagcagatcggaaggagtggtgaccctgtcttccacatccggttagaagagagacaccagcgtcgctccagcgtaaaaaagattgagaagatgaaagagaagaggcaggccaagtactcagaaaataaactcaaaagtattaaggcaagaaatgagtacctactgactcttgaagccaccaatgcttctgtgttcaagtactatatccatgacttgtccgaccttatagactgctgtgacctgggctaccatgcttccctgaaccgcgccctccgtacctacctatccgctgagtacaacctggaaaccagccggcatgaggggctcgatattattgagaatgccgtggataatctcgagccacggagtgataagcagcgcttcatggagatgtatcctgcggccttttgtccccccatgaaatttgaatttcagtcccacatgggcgacgaggtctgccaggtaagcgcccagcagcctgttcaggctgagctgatgctgaggtaccagcaactgcagagtcgcctggccactctaaaaatagaaaacgaagaggttaagaagacaactgaggccaccctccagacaatacaagatatggtgaccatagaagactatgacgtcagtgagtgctttcagcactcacgcagcacagagtctgtcaagagcacagtttctgaaacttatttgtctaagcccagcattgctaaacgccgggccaaccagcaggagaccgagcagttctactttatgaaattgagagagtacttagaaggaagtaatctgatcaccaagttgcaggcaaaacacgatctgctgcaacgaacactgggagaaggtcacagagcagagtacatgacaacccggccacctaacgtgccccccaaacctcagaagcaccggaaatcccgcccaaggtcgcaatataacaccaaactatttaatggtgatctggagacattcgtgaaagactctggccaagtgatcccccttatcgttgaatcctgtattcgattcataaatctttacgggctccagcaccaggggatcttcagagtgtcagggagccaggtggaggtgaacgacataaaaaactctttcgagaggggggaaaacccattagctgatgatcaaagcaaccacgacattaacagcgtggcaggggtccttaaactgtattttcgggggctggaaaatcctctatttcctaaagaacggttcaatgatctcatttcatgcatcagaatcgataatctgtacgagcgcgcattgcatatccgcaaactcttactgactcttccgagatccgtgctaatcgtcatgcgctatctgtttgctttcctcaaccacctaagtcaatattccgatgagaacatgatggatccctacaatcttgcgatctgtttcggccccacactgatgccggtaccagaaattcaggaccaagtatcttgccaggcccatgttaatgaaatcattaagacaattatcatccaccacgaaacaatcttccctgacgcgaaggagctggacggccctgtctacgagaaatgcatggcaggtgacgactactgcgactccccgtactctgagcacggaaccttagaggaggtggatcaggatgccggcacggagccccatacctccgaggacgaatgtgagcctatagaggctatcgccaagtttgattatgtgggacgatccgcccgagaactgtcgtttaagaaaggcgcttccttgctactgtaccaccgggccagtgaggactggtgggagggccgccacaacggcattgacggtctcgtgccgcatcaatacatagtggtgcaagacatggatgatacattttccgataccttatcacaaaaagccgacagtgaagcaagctccggcccagttacagaggacaagtcatctagcaaagacatgaacagtcctacagacaggcaccccgacggctacttagctagacagcgtaaacgtggtgagccaccacctcccgttcgacgacctgggcggacgtcagatggccactgtcccctgcatccaccacatgctttaagcaactccagcgtcgacctgggaagtccctctctggcgagtcatcccagaggactgctccaaaaccgtggtctgaacaacgacagtccagaaagacgcagaagacccggtcacgggagtctaaccaatatctcgcgccacgactccttgaagaaaattgattccccacctattcgccgttccacctcctctggccaatacactggatttaacgatcacaaacctctcgatcctgaaaccatcgcacaagacatcgaggagacgatgaacacagcactcaacgaattgcgggaattggaacgccagagcactgcaaaacacgcgcctgatgtcgtgctcgataccctggagcaggtgaagaacagccccactcccgctaccagcacagagagccttagtcccctccacaatgtagcccttagaagtagcgaacctcagatccggagatccactagctcatcctcagacaccatgtccaccttcaaacctatggttgctcctcggatgggagtgcaactcaagccacccgcgctgcggccaaagcccgcggtccttcccaaaaccaacccgaccatcgggcccgcgcctccaccgcagggtcccacagacaagagttgcacaatgtag

SEQ ID NO: 205318 - DNA, 3189 bp, synthetic construct
  misc_feature 1..3189: note = Description of Artificial Sequence: Synthetic coding sequence
  source 1..3189: mol_type = other DNA
atgagcacccccagccggttcaagaaggacaaggagatcatcgccgaatacgaatcacaggttaaggagatacgggcccagttagtggagcaacaaaagtgtctcgagcaacagaccgagatgagggtgcagctgctgcaggacctgcaggatttctttcgcaagaaggcagagatcgaaaccgagtattcccggaacctcgaaaagctggctgaaaggtttatggcgaagacaagatctacgaaagatcatcagcaatacaaaaaggatcaaaacctgctgagccccgtaaattgttggtacctcctgctgaaccaagtgcgccgggagtccaaggaccatgctaccttaagcgacatataccttaataatgtgatcatgcgatttatgcagatcagtgaggactctacacgcatgtttaagaaatctaaggagattgcttttcagctccatgaggatctgatgaaggttcttaacgaattatacactgtaatgaaaacataccatatgtatcacgcagagtccatctctgccgaatcaaaactgaaagaggctgaaaaacaggaggagaaacagatagggagatcaggcgaccctgtgtttcatattaggctcgaggagcgacatcagaggcgaagttcggtaaaaaaaatagagaaaatgaaagaaaagaggcaagccaagtattcagagaataaattaaaaagcattaaagcccgaaacgagtacttgcttacccttgaggccaccaatgccagtgtgtttaaatactacatccacgacctgtccgatttaatcgactgttgcgatctcggttatcacgcatcccttaatagagccctgagaacatacctctctgcagaatacaacctagaaacctctcggcacgagggcctagatattattgaaaacgctgtcgacaacctggaacccagaagtgataagcagaggttcatggagatgtacccagccgcattttgtcctccaatgaagttcgagttccagagtcatatgggcgatgaggtgtgccaagtttcagcccagcagccagtgcaggccgagttaatgctaaggtaccaacagctccagagtagacttgctaccctgaaaattgagaacgaggaggtgaagaaaacaaccgaggctacactgcaaacaatccaagatatggtaacgattgaggattatgacgttagcgagtgcttccagcattcaaggtctacagagtccgtgaagagtaccgtgtctgagacttacctgtcgaagccgtctatcgctaagcgcagagcgaaccaacaagaaaccgaacagttctactttatgaaactcagggagtatctggaaggttccaatcttattaccaagttacaagcaaaacacgatttgctgcagcgtacgctgggggagggacacagggctgagtatatgaccactagcaggggcagacgcaatagccacactcggcaccaagactctggccaagtgatacccctcatcgtggagtcgtgtatcagatttatcaatctttacggccttcagcaccaggggatttttagggtatcaggaagtcaagtggaagtgaatgacatcaaaaactcattcgagagaggtgaaaaccctctggccgatgatcagagcaatcatgatatcaacagcgtcgcgggagtgctcaagctttattttagagggctggagaatccactattccccaaggaacggttcaacgacttgatcagctgtatacggatagataacctttatgagcgcgccctgcatatccgtaagctccttcttacactgccaaggtccgttttgattgtgatgcgctacctgtttgccttcctgaatcacctgtcgcagtattccgacgagaacatgatggatccttacaacctggctatttgtttcggtcccaccttgatgccagtgcccgaaatccaggatcaggtgagttgtcaagcccacgttaatgaaataataaaaaccatcattatccaccacgaaaccattttccctgacgctaaagagctggatgggccagtgtatgagaagtgtatggcaggcgatgattactgtgactccccctattcagaacacgggactcttgaagaggtcgatcaggacgctggcactgaacctcacacaagcgaagatgaatgtgaaccaatcgaagctattgctaaatttgattacgtgggcagaagtgctagggaactcagtttcaaaaaaggagcgagcctactgttataccaccgcgccagcgaagattggtgggaaggacgccataatgggatcgacggcctagtaccacatcagtatattgtggtgcaagatatggatgacaccttcagcgacacactgtcgcagaaagccgatagcgaggcaagttccggccccgtgaccgaagacaagtcttcctctaaagacatgaacagccctaccgacagacatccagacgggtatcttgcacggcagcgcaaacgtggcgagccacctccaccagtgagaaggcccggcagaaccagtgatggccactgccctctccatccacctcacgcactgtcgaactctagtgtggacttaggaagcccgagtttggcaagtcatcctagagggctgcttcagaaccgcggtcttaataatgactcaccggagcggcggagaaggccaggccatggctctctgacaaatatcagcaggcacgactcacttaaaaagatcgactctccacccatccgccgctctacctcgagcggccagtacaccggcttcaacgaccacaaaccactggaccctgagacaatagcacaggacatagaagagacaatgaacacagccctgaatgagttgcgcgagctggagaggcaaagcactgccaaacacgcaccggatgtggtgctggatacccttgagcaagtgaagaactcccccaccccagccacaagtaccgagtcccttagccctctacataatgtggccctgagaagcagcgaaccccagatacggcggagtacttcctcctcatccgacacaatgagtaccttcaagccgatggttgcacccagaatgggtgttcagctgaagcctcccgcgctcaggcctaagcccgccgtcttaccaaaaactaaccccaccattgggcctgctccacccccccaaggccccactgacaagagttgtactatgtag

SEQ ID NO: 205319 - DNA, 2958 bp, synthetic construct
  misc_feature 1..2958: note = Description of Artificial Sequence: Synthetic coding sequence
  source 1..2958: mol_type = other DNA
tgaaaggaccagaacgtgctgagccccgtgaactgctggaacctgctgcttaatcaagtgaagcgcgaatcacgggatcatacaactcttagcgatatttatctgaacaacattatccccaggtttgttcaggtgtccgaagactccgggaggctgtttaaaaagtccaaggaggtggggcaacagctccaggatgatttgatgaaagtgctgaatgagctgtatagtgtcatgaaaacttaccacatgtataatgcagattcgattagtgcacagagtaagctgaaggaagcggagaagcaggaagaaaaacagattggcaaaagcgtgaagcaggaggaccgtcagactcctcgctcaccagactcaacggccaacgtcagaattgaagaaaaacacgtgagacgatcttcggttaagaaaattgaaaagatgaaagagaagcgacaagccaagtacacagagaacaagcttaaggccatcaaggccagaaacgaatatctgctcgccctggaagccaccaacgccagcgtgttcaagtactatattcacgacttgtctgacctaatcgaccagtgctgcgacctgggataccacgcgtcattaaaccgtgccttgaggactttcctttcagcagagctcaacctggagcagtccaagcatgagggcctggacgccatcgagaacgcagtcgagaatctcgacgccacaagtgataagcagcggctgatggagatgtacaacaacgtattctgcccccccatgaaattcgagttccagccccacatgggggacatggccagccagctgtgcgcccaacagcctgtccagtccgagctagtccagcggtgtcaacagctgcagtctaggctgtctacactcaaaatagaaaatgaggaggtcaagaagactatggaagcgaccctgcaaaccatccaagatattgtcactgtggaggacttcgacgtgagtgactgctttcagtacagtaattcaatggaatccgtcaaaagtaccgtgtctgaaacctttatgtccaagccgtctatcgctaagcgacgagctaatcagcaagagactgagcagttttacttcacaaagatgaaggagtacttagagggacgtaacctgattacaaagctgcaggccaaacacgacctcctgcaaaaaactttgggcgaaagccagcgaaccgattgctccctggcccggaggagttctacagtacgcaagcaagattcgtcacaggctattccactggtagttgagagttgcatccgtttcatctccaggcatggactccaacacgagggtatttttcgggtctcggggagccaggtagaggtcaacgatatcaaaaatgcttttgaacgcggggaggatcctttagcaggagaccagaacgatcatgatatggattcaattgcaggcgtgctaaaactttatttccgggggctggagcatccattatttcctaaggatatattccatgatctcatggcatgtgtgactatggataacctgcaagaaagagcactgcacattcgcaaagttctgctggttttacctaagactaccctaattatcatgaggtacctcttcgcgttcttgaatcacctgtcccagttctccgaggaaaatatgatggatccttacaacttagccatttgcttcgggccttctctcatgtccgtccccgaaggacacgatcaggtttcctgtcaggcccatgtgaacgagctaattaagactatcattatacagcatgaaaacattttcccttctcctagagagttggaggggccggtgtacagccggggtggctccatggaagactactgtgattccccccacggcgagaccacttcggtagaggattccacccaagacgttaccgctgaacaccatacaagcgatgacgaatgtgaacccatagaggccatagcaaaattcgactatgtgggccgcacggccagggaactcagctttaaaaaaggggcatcgctccttctgtaccagcgggccagcgatgattggtgggagggtaggcataatggtatcgacggcctgataccccaccagtacattgtggtgcaggatacagaagacggggtcgttgagcgcagctcaccaaagagtgaaatcgaagtaatcagcgagccacctgaggagaaagtcaccgctagagccggtgcctcctgtccaagtgggggacacgtcgccgacatttatcttgccaacatcaacaaacagcgaaaacggcccgagagtggtagtattcgcaaaacctttcgctctgattcccatggactgtcctcctcacttacggactctagctcacctggcgtgggggcatcctgccgcccttcttcccaaccgattatgtcccagagcctgcccaaagaaggacccgacaagtgttctatctcaggacacggatcccttaatagtataagcaggcattccagcctgaaaaaccgtctggacagtccccagataagaaaaaccgccaccgctggccggagtaagagcttcaacaaccatcggccaatggaccccgaggtcatcgcccaagatattgaggcaacgatgaacagcgcgctgaacgagctgagagagcttgagagacaaagcagtgtgaagcacactcctgacgtcgttcttgacacattggagcccctgaaaacatcaccagttgtcgctcctacttccgaaccatcctcccccctgcacacgcagctgcttaaggaccccgaaccagcattccagcgatctgcctctacagctggcgatattgcatgcgccttcagaccagtgaaaagtgtgaagatggccgctccagttaagccacccgccaccaggccaaaaccgactgtgttccccaagaccaacgcaacctcacccggcgttaactctagtacctcacctcagtcgactgataaatcctgtacagtatag

SEQ ID NO: 205320 - DNA, 2796 bp, synthetic construct
  misc_feature 1..2796: note = Description of Artificial Sequence: Synthetic coding sequence
  source 1..2796: mol_type = other DNA
cagagcaaggaggtgggccagcagctgcaggacgacctgatgaaggtgttgaatgagttatactccgtgatgaagacataccacatgtacaatgcggactctatttccgctcagtctaaacttaaagaggctgaaaaacaggaggagaagcagatcggcaagagcgtcaagcaggaggatcgacaaacccctagatcccctgatagtactgctaacgtccgtattgaggaaaaacacgttcgccgatccagcgttaaaaagatcgagaagatgaaggaaaaacgtcaggctaaatacacggagaacaaactgaaggccatcaaggcacgcaatgagtacctcctcgccctggaagcgaccaatgctagcgtgttcaaatactatatccatgatctgagtgatctcatcgatcagtgttgtgacctggggtatcacgcaagcctgaaccgcgcattgcgaaccttcctctccgctgagctcaatctcgagcagtctaaacacgagggattggatgcgatcgaaaatgccgtagagaatctcgatgccaccagcgacaaacagcgcctgatggagatgtataataacgtgttctgcccacctatgaaatttgagttccagcctcacatgggcgatatggcaagccagctttgtgcacaacagccagtgcaatctgaacttgtccagagatgccagcaactacagagtcgtctctcaaccttgaagatcgagaacgaggaagtcaagaagacaatggaagccacactgcagactatccaggacatagtgaccgtcgaggactttgacgtgtcagattgtttccaatatagtaactctatggagagtgtaaagagtacagtctctgaaaccttcatgtcaaaaccttctattgcgaagaggagagccaaccagcaggagacagagcaattttacttcactaaaatgaaggagtaccttgaagggagaaatctgatcaccaagctgcaggcaaagcatgacctgctgcaaaaaactctcggggagtcccagcgaacagattgttctttagcccgacgttccagcaccgtgcgaaaacaggacagcagccaagccatcccgttggtggttgagtcctgcattcggttcatcagtagacacggcctgcaacacgaaggcatattccgcgtatcaggatctcaggtggaggttaacgacatcaagaatgcatttgagagaggcgaggaccctctggctggggatcagaacgaccatgatatggacagtatcgcaggggtgctcaagctgtattttagaggcctggaacacccactttttcccaaagacatttttcatgatttgatggcttgcgttaccatggacaatttgcaggagcgcgcactgcacatacggaaagtgctgctcgtgctccccaaaacaaccctaattattatgaggtacctcttcgctttcctcaaccacctaagtcagttcagcgaggagaatatgatggatccttataatctggcgatttgctttgggcctagtctcatgtcggttcctgaaggccacgaccaggtaagctgccaggctcacgtgaacgagctgattaagaccataataatacagcacgaaaatatcttcccgagccctcgggaacttgaagggccggtctattcacggggagggtcaatggaagactactgcgactcaccacatggagaaacaacctcagtggaggactccacccaggatgtcactgccgaacaccacacgagcgatgatgaatgcgaacctatcgaagcaattgctaaattcgactacgtcgggcgcactgccagagagctttcttttaaaaagggggcctccctcctcttgtatcaaagagcctccgatgattggtgggagggacgacacaacgggatagacgggctgatccctcaccaatatattgtggtgcaggatacagaggacggagtcgtggagaggtccagtccgaaatccgaaatcgaagtcatctcagaacctcctgaagagaaagtgactgctagggcgggtgcatcttgcccatccggtggccacgttgcggatatatacctggccaatattaacaaacagcggaagcggccggagagtggctcaataagaaaaaccttcaggtctgatagtcacgggttgtctagctctctgactgacagctcttctcctggcgtcggcgccagttgtagaccttcctcacagcccatcatgagccaatctctccctaaggagggcccagacaagtgtagcatcagcggccatggaagcctaaatagtatcagcaggcatagtagcctaaaaaatcgtctggactccccacaaattcgcaagactgctacagctggccgatcaaagtcatttaataaccatagaccaatggaccctgaagtgatcgcccaggatatcgaagccacaatgaattccgccttgaatgaactccgtgagttggagagacaatccagtgtcaaacacaccccagacgtcgtccttgacacgttggaacctctgaagactagcccggttgtcgctcccacctctgagccaagctcacccctgcacacacagctgctaaaagacccagagcccgcgttccaacggtcggcctcaacggccggagatatcgcttgtgccttccgccccgtaaagtcagtgaagatggctgcccctgtcaaacccccagctacccggccgaagccgaccgtctttccaaaaaccaatgctacatcaccaggcgtgaactcctcaacaagtccccagagcactgataaatcatgtacagtgtag

SEQ ID NO: 205321 - DNA, 2112 bp, synthetic construct
  misc_feature 1..2112: note = Description of Artificial Sequence: Synthetic coding sequence
  source 1..2112: mol_type = other DNA
cggaaggaccagaacgtgctgagccccgtgaactgctggaacctgctccttaaccaagtcaagagggagtcaagagaccacacgactctcagcgacatctatctgaacaacattatcccgaggttcgtccaggtatccgaagattctggacgcttgtttaaaaagagtaaggaagtcggacagcagctccaagacgatcttatgaaagttctgaacgagctttatagcgtaatgaagacgtatcacatgtacaacgccgatagcatctccgcccagagtaaactgaaggaggctgaaaagcaggaggaaaagcagataggaaagagtgtgaagcaggaggacagacagactccaaggtccccagactccacggccaatgttcggatcgaggagaagcacgtcaggcgctcttcagtcaagaaaattgaaaaaatgaaagagaaacggcaggccaaatacactgagaacaagttaaaagccattaaagcccggaatgagtacctgctagcgcttgaggctacaaatgcatcagtctttaaatactacatacacgacctgtctgacctgattgactgctgtgatctggggtatcatgcaagtctgaatcgagctcttagaacatttctctcggctgaactgaacttagagcagtctaaacatgagggacttgatgcaatcgaaaacgccgttgagaacctcgacgctaccagtgacaagcaacgacttatggagatgtataataacgttttttgccctcctatgaagtttgagtttcagccacatatgggggatatggcctcccagctctgtgcccaacaacccgttcaatctgagctcgtgcagcgctgtcagcagttgcagtctagactgtccacactcaagattgaaaacgaggaagtcaaaaagacaatggaggcgacgctgcagacaattcaggacattgttacagtggaggacttcgatgtctctgattgtttccagtattctaatagcatggagtctgtaaagagcaccgtgtccgaaacctttatgtcgaagccttcaatcgccaagaggcgggccaaccagcaggagacagaacagttttactttactaaaatgaaggaatacctcgaaggccgaaacctgattacaaaattacaggccaaacacgacctgttacagaagactctgggcgagagccagcgaacagattgttctctggcccgcagatcttcaaccgtgcgcaagcaggactcctcccaggcgatccctctcgtcgtggagtcctgtattcgcttcatcagtaggcacggcctacagcacgaggggattttccgcgtgtctgggtcccaagtggaagtcaacgacatcaagaacgccttcgagagaggagaagaccctttggctggggatcagaatgaccacgacatggactccatcgctggcgtgttaaaactttacttccgcggactcgagcaccctctctttcctaaagacatttttcatgacctcatggcgtgtgtgactatggacaatctccaagagagggctctacacatccggaaggtactcctggttctgcctaagacaaccctgattattatgcgatatctgttcgcctttcttaaccacctttctcaattttcagaggagaacatgatggacccctacaacttagccatttgtttcgggccatctctgatgagtgtgcccgaaggacatgatcaagtttcctgccaggcccatgtcaatgagctcatcaagaccatcatcattcagcatgagaatattttccccagcccccgcgaactcgagggccccgtgtattcacggggagggtcaatggaggactactgcgacagcccccatggagaaacaactagcgttgaagatagcactcaggacgtgacagccgagcatcatacctccgatgatgaatgtgagcctatcgaggcaatcgccaaattcgattacgtgggccgtaccgcgagagagctgagttttaaaaagggcgcttctttgttactttatcagagggcctcagacgattggtgggagggccggcacaatgggatcgatgggttgatcccccaccagtacatcgtggttcaagatacccttataagctag

SEQ ID NO: 205322 - DNA, 759 bp, synthetic construct
  misc_feature 1..759: note = Description of Artificial Sequence: Synthetic coding sequence
  source 1..759: mol_type = other DNA
atggaggactactgcgacagcccccacggcgagaccaccagcgtggaggactctacccaggatgtgaccgccgagcatcacacctctgatgacgagtgtgaacctattgaggccattgcaaagtttgactacgttgggagaacagccagggaattgagcttcaagaaaggggcgagtttgctcctctatcagagagcctccgatgattggtgggaaggcagacataatggtatcgacggtctcatcccacaccagtacatcgttgtgcaggataccgaggacggagtggtggagaggagctccccgaaatccgaaatcgaggttatctcggagccacccgaggagaaagtcacagcaagggccggagcttcatgcccgagtggtggacatgtcgccgacatttatctggcgaacatcaacaataatttgcacctggataataccaagcctgtaacaacaaagcagaggaagagacccgaatcaggctccattagaaagacctttcgctcggactctcatggtctgtcttcctctctgactgatagttcaagccccggagtaggcgcctcgtgccgacctagcagccagcctatcatgtcacagtctctccccaaagagggtcccgataagtgctctatttccggccacgggagcctgaatagtatcagcagacattcctcattaaagaatcgactggatagcccacagattcgcaagactgccactgctggccgttccaagagctttaacaaccactag

SEQ ID NO: 205323 - DNA, 693 bp, synthetic construct
  misc_feature 1..693: note = Description of Artificial Sequence: Synthetic coding sequence
  source 1..693: mol_type = other DNA
tgagccgagcaccacaccagcgacgacgagtgcgagcccatcgaggctattgccaagtttgattacgtgggccgaaccgcacgggaattatccttcaaaaagggagcaagcctactgctataccagcgagccagtgatgactggtgggagggcagacacaacggcatcgacggattgatacctcaccagtacatcgtagtccaggacaccgaggacggggtcgtagagcgcagctctcctaaaagtgagattgaagtgatctctgagccaccggaagagaaagttacagctagagctggcgcatcatgtcctagcggcggccacgtggcggacatctatttagcaaacattaataataatctgcatttagacaacaccaaacctgtcaccacaaagcagcggaagcgccccgagtctggaagtatccgcaaaaccttcaggtcggattctcacggactctctagctcactcaccgattccagcagccccggggtcggggccagctgccgcccgagttcccaaccaatcatgtcccagtcccttcctaaggagggtcccgataaatgtagtatatctggtcatgggagccttaactctatcagcagacactccagcttgaaaaaccgcctcgatagtccccagattcgaaaaacagctacagccgggcgcagcaagagtttcaacaaccattag

SEQ ID NO: 205324 - DNA, 1353 bp, synthetic construct
  misc_feature 1..1353: note = Description of Artificial Sequence: Synthetic coding sequence
  source 1..1353: mol_type = other DNA
gtgaagaagaccatggaggccaccctgcagaccatccaggacatcgttacagtggaagactttgacgtctcggactgttttcagtactctaacagtatggaatcggtgaaatctaccgtttctgagacgttcatgtctaaaccatctattgccaagaggcgcgcaaaccagcaggagacagagcagttttacttcactaagatgaaagaatacctggaaggtcgcaatctgataaccaaactgcaggcaaaacacgacttgctccagaagacattaggcgaaagccagcggacggattgttccctggcgcggcggtcctctacagtgaggaaacaagatagcagtcaggccatcccacttgtggttgagagctgcatccggtttatcagtaggcatggtcttcagcacgagggtatctttagggtgagtgggtctcaggttgaggttaacgatatcaagaacgcttttgagcgaggcgaggatccactcgctggggatcagaacgatcatgatatggactccatcgccggagtattgaaattgtatttccgaggcctggaacatcctctgtttcctaaggacatcttccatgatctgatggcgtgtgtgacaatggataacctgcaggaaagagctctgcacattcgcaaggtgttgctggtgctgccaaaaacaaccctgataattatgcgctatctgttcgcttttcttaaccatttaagtcagttcagtgaagaaaacatgatggatccatacaacctagctatttgtttcggacccagtcttatgtccgtccccgaaggacacgatcaagtgagttgccaggctcacgtgaacgagctgatcaagaccatcatcatccagcacgaaaacatatttccctccccacgcgagttggaaggtcccgtctacagtcgcggtggaagtatggaagactactgtgattcccctcatggagaaaccacttccgtagaggacagtacacaggacgtgaccgccgagcatcacacctcagatgatgaatgcgaacctatcgaggcgattgccaaatttgattacgtgggtagaaccgcccgcgaattgagctttaaaaagggggcctctttactcctgtatcagagggcgtcagatgattggtgggaaggtagacataatggtattgacggtctgatcccacaccagtacatcgtagtgcaggacacagaggatggcgtcgtcgagagatcttctcctaaatcagagatcgaggtcatctccgagccacctgaagagaaggtgacagctcgcgcaggcgcctcctgcccaagcggggggcacgtggctgatatttacctggcaaacatcaacaagtag

SEQ ID NO: 205325 - DNA, 3228 bp, synthetic construct
  misc_feature 1..3228: note = Description of Artificial Sequence: Synthetic coding sequence
  source 1..3228: mol_type = other DNA
atgagcagccagaccaagttcaagaaggacaaggagatcatcgccgagtacgaggcgcagattaaggaaataaggactcagctggtggagcagtttaagtgcctggagcagcagagtgaatctcggcttcagctgctgcaagatctgcaggagttctttaggagaaaggctgagatcgagctggagtattcccgcagcctggagaagcttgccgagagatttagcagcaaaatccggtcctcgagagagcaccagtttaaaaaggaccagtacctcttgagtcctgtgaattgctggtacctggttttacatcagacgcggagagaaagccgcgatcatgctactctcaatgacatattcatgaataatgtgattgtgcgcttgtctcagatcagtgaggacgttattcggcttttcaagaaatctaaggagattggcttgcagatgcatgaggaattactgaaggttaccaacgaactgtacaccgtgatgaagacatatcacatgtatcacgccgagtctatttcagctgaatcaaagctcaaagaggcagagaaacaagaggagaagcaatttaacaaaagcggggacctgagtatgaatctgctgaggcatgaagatcgcccccagaggcggtcctctgtgaaaaagattgagaagatgaaagaaaaacggcaggccaaatacagcgagaacaagctcaaatgcacaaaagcacgtaatgactatctcctcaatctggctgcaacaaacgcagccatttctaaatactacatccacgacgtgtcagatttgattgactgctgtgacctcggctttcatgcatctctggccagaacttttagaacctacttgagtgcagagtacaatctggaaacctctcgccatgagggactcgatgttattgaaaatgctgtcgataatttagactcaagatcagataaacatactgtgatggacatgtgcaatcaggtgttttgcccccctctcaaattcgaatttcagccacatatgggagatgaggtctgccaagtttcagctcagcagccggtgcagacggaattgctgatgagataccaccaactgcaaagcagactagccaccctcaaaatcgagaatgaggaggttcgcaagactttagatgctaccatgcagacgctgcaggacatgctgacagtggaagatttcgacgttagcgacgcgttccagcactctcggtcgacggaatcggtaaaaagtgccgccagcgagacatatatgtcaaagatcaatatcgccaagcggcgggctaatcagcaagaaacggagatgttctacttcaccaagttcaaggagtacgttaatgggtctaatcttataacgaaacttcaagccaagcacgacctgttaaaacagactctgggcgagggggagcgggcggagtgcggcacaactagaggacggaggaacgcacggactcgtaatcaggattctggtcaggctatcccccttgtcgtggaatcatgtatcagatatataaatctttatggtttgcagcagcaaggaatcttcagagtcccaggttcccaggtggaggtcaacgacattaaaaacagttttgagcggggtgaggatcccctagtggacgaccagaatgagcgtgacataaactctgttgcaggagttttaaaactgtatttcagggggctggagaaccctctcttccccaaagagcggtttcaggacctcatttccactattaagttagaaaaccctgccgagcgcgtccaccagattcagcagatcctggtgaccctgcccagggtcgtaattgtagtgatgcgctacctgttcgcattcctgaaccatctttcacagtattcagacgagaatatgatggacccttacaacctggccatctgtttcggacctaccctgatgcatatccccgatggccaggatcccgtctcttgccaggcccacatcaatgaagttatcaaaaccattatcattcatcatgaagccattttcccctctccccgtgaattagaggggccagtttacgagaaatgcatggctggaggcgaggagtattgtgactcccctcattctgagcccggtgctatcgacgaagtggaccatgataacggcaccgagccacacacgtccgacgaagaagtcgagcagatcgaggctatagccaaattcgactatatgggccgatcccccagagaactctctttcaagaaaggtgctagccttctgctttaccacagggcatctgaggactggtgggaagggagacacaacggcgtggacggcctgatcccccaccagtacattgtcgtgcaagatatggacgatgcattctctgattctctgagccaaaaagcagactcagaagcatcctccggacctttgctcgatgacaaagcttcaagtaaaaatgatctgcagtcaccaactgaacacatttccgactacgggttcggaggcgtcatgggcagagtacggttgcgcagcgacggcgcagccatcccccggaggaggtcaggtggagacacccactcaccgccaagagggcttggcccctctatagatactcccccccgcgccgccgcctgcccctcatccccccacaaaattccacttacccgggggcgtatagagagccctgagaaaaggcgcatggccacctttggaagcgcgggctccatcaactaccccgacaagaaggctctgtctgaagggcactccatgcgctctacatgcgggtctacgcgccacagcagtctcggtgaccataagagccttgaggccgaagcactggctgaggacattgaaaagacaatgtcaaccgctctgcacgaacttcgtgaattagagcgccaaaacacagtgaagcaggcccctgacgtggtattagatactctggagccacttaagaatcccccaggacctgtcagcagcgagcctgcttccccattgcatacaatcgttattcgggatccagacgctgccatgcggaggtcctccagttccagcactgagatgatgacaacctttaagccggccttgagcgcccgcctcgctggagcacagctccgtccgccacctatgcggccagtgcggccagtggtccagcacaggagctcctcctcttcctcatctggcgttgggagccccgccgttactcccactgagaaaatgtttccgaacagttctgctgacaaatctgggactatgtag

SEQ ID NO: 205326 - DNA, 3300 bp, synthetic construct
  misc_feature 1..3300: note = Description of Artificial Sequence: Synthetic coding sequence
  source 1..3300: mol_type = other DNA
atgagcagccagaccaagttcaagaaggacaaggagatcatcgccgagtatgaagcccagattaaggagattcggacccagttggtggaacagttcaagtgcttagagcagcagagcgaatcacgtcttcagctgctgcaggatctccaggaattttttagaagaaaggctgagatcgaactggaatacagcaggtctttagagaagttagcagagcgattttctagcaaaatcagaagtagccgcgagcatcaattcaaaaaggatcagtacctcctctctccagtgaattgctggtacctggtgcttcatcagacaaggagagaaagccgtgaccatgctactcttaatgacattttcatgaataacgttatcgtgagactgtcacaaatttcagaagatgtcattaggctctttaagaaaagcaaagaaatcggactccagatgcacgaagaactgttgaaggtcacaaatgagctatacactgtcatgaagacctatcacatgtaccacgcagaatcgatctcagctgaatcaaagctgaaagaggcagaaaagcaggaagagaagcagtttaacaagtctggagacttgagtatgaatctgctcagacacgaggatagaccacaaagaagatcttctgtcaagaaaattgagaaaatgaaagaaaaacgacaggctaagtacagtgagaacaagttgaaatgcacaaaggccagaaacgactacctgctgaatctggccgcgaccaacgccgcaattagcaaatactatatccatgatgtatctgacctgatcgattgctgcgacctgggatttcacgccagtctagcgaggacgtttcggacttatctgtcagcagaatataacctggaaacttctcgacatgagggattggacgtcatcgaaaatgctgtggacaacctagattccagaagtgacaaacacacagtgatggacatgtgcaatcaggtgttctgtcccccattaaaattcgagtttcagccacatatgggagacgaagtgtgccaggtcagtgcgcagcagccggtgcaaaccgaattgctgatgaggtatcaccagctgcagagtcgccttgcaacccttaaaatcgaaaatgaagaagtcaggaagaccctggatgctacaatgcagacgctgcaagacatgttaacagtggaagacttcgatgtgtctgacgctttccagcatagccgctcgaccgagtctgtaaagtcagcagcatccgaaacctatatgtccaagattaatatcgcaaaacgcagagccaatcagcaagaaaccgagatgttctactttactaaattcaaagagtatgtgaacgggtcaaatcttattaccaagctgcaggcaaagcacgacctgttaaaacagacactcggtgagggggaacgagccgagtgtggcacaacgcgcccaccctgtttgccccccaagccccagaaaatgcggaggccaagaccactctcagtgtactctcataagttatttaacggatccatggaggcctttatcaaagactctggccaagctatacccctggttgtggaatcctgtatccgctatataaatctctacggactccagcaacaggggatcttcagggtgcccggaagtcaagttgaggttaacgatatcaagaattcttttgagcggggggaggatccactggtggacgatcagaacgaaagagatattaattctgtagctggggttttgaagctctatttcagaggcttggagaatccactgttccccaaggaacgatttcaagatctgattagcactatcaagctggaaaatcccgccgaacgtgtacaccaaatccagcaaatattagtgaccctgccaagggtagtgattgtcgttatgagatatctgttcgcattcctcaatcacctgtctcagtacagcgacgagaacatgatggacccttataacttggcgatctgcttcggccctacgctgatgcacattccagacgggcaggatcctgtttcttgtcaggcccatatcaacgaggtcattaaaacaattatcatccaccacgaagcaatctttccgagtcccagggagctggagggcccagtctatgagaagtgtatggccggaggcgaggagtactgtgactccccccactccgagcctggcgctatcgacgaagtggatcacgataacggaaccgagccgcatacaagtgatgaagaagtcgagcaaatcgaagccatcgcaaagtttgactacatggggaggtcacccagggaattgagcttcaaaaagggagcttcgctccttctgtatcaccgagcgagcgaagattggtgggaaggaaggcacaatggcgtcgacggcctgatccctcaccaatatattgtcgtccaggacatggacgacgcgtttagtgacagcctgagccagaaagccgatagtgaggcttcatccgggcccctgttggatgacaaggcgagctctaagaacgacttgcagtctccaactgagcatattagcgactatggatttggcggcgtgatgggtcgggtccgactgagatcagacggcgctgcaataccaaggagaagaagcgggggagatacccatagcccaccacgggggttagggccttcgattgacaccccgcccagagctgctgcctgccccagttcacctcataagatcccactgacccgtggtcgtattgagtcccctgagaagaggaggatggctactttcggcagtgcgggatccatcaattatcccgacaaaaaggctctgtcagaaggtcatagtatgcgcagtacctgtggatcaacaaggcattcaagccttggagatcacaaaagcctggaggctgaagccctggccgaagatattgaaaaaacaatgtccaccgctctgcacgaattgcgggagttggagagacagaacacagtgaagcaggctccagacgtggtgttagacactctggaaccacttaagaaccctcccgggcctgtaagtagtgagcccgcaagccccctgcacaccatcgtgattcgagaccctgacgccgccatgcgccgctcaagctcctcatcaacggagatgatgaccacattcaaaccagctttatctgcccgactcgcaggggcacagttgcgtcccccgcccatgcggcctgtgagaccagtggttcagcaccgctctagctcctcatccagttctggggtgggatctccagctgttacgcctaccgaaaagatgttcccaaattctagcgctgataaatcagggaccatgtag

SEQ ID NO: 205327 - DNA, 1008 bp, synthetic construct
  misc_feature 1..1008: note = Description of Artificial Sequence: Synthetic coding sequence
  source 1..1008: mol_type = other DNA
atgaacaacgtgatcgtgcggctgagccagatcagcgaggacgtgattcggttatttaaaaaatccaaagagattggcctccagatgcacgaggaactgctcaaagtcactaatgaactctacacggtgatgaagacctaccatatgtaccatgccgagtctatttccgccgaaagtaaactaaaggaggctgagaaacaggaagagaaacagtttaacaaatcgggcgatctgtccatgaaccttctgcggcacgaagaccgtccacagcgccgcagctccgttaaaaagattgagaaaatgaaagagaaaaggcaagctaaatactctgaaaataagcttaagtgcaccaaagcaaggaacgactatctgctgaacctggcggccacaaacgctgctatttctaagtactatatacacgatgtcagcgacctgattgattgttgcgatctgggattccacgcctctttggccaggacctttcgcacttatctctctgctgaatacaacctggagacttccaggcatgagggcctggacgtgattgaaaacgcagtcgataacttagatagcagatctgataagcataccgtgatggacatgtgcaaccaggtcttctgtccaccgttgaagttcgagtttcaacctcacatgggcgacgaggtttgtcaggtatctgctcagcagcccgtgcagaccgagttactgatgcgttaccatcagttgcagagcaggctggcaaccttgaagattgaaaatgaggaggtcaggaaaactttagacgcaactatgcagacattacaggacatgctgacagtagaagactttgacgtgtctgacgcattccagcacagtaggagtaccgagtccgttaagagcgcagcctcagagacctacatgtccaaaataaatattgcgaaacgtcgcgctaaccagcaagagacagaaatgttttatttcaccaaaggaccagacgatgtgttcccaatttgtcatcctagactctag

SEQ ID NO: 205328 - DNA, 360 bp, synthetic construct
  misc_feature 1..360: note = Description of Artificial Sequence: Synthetic coding sequence
  source 1..360: mol_type = other DNA
atgagctggtggcggaacaacttctggatcatcctggccgtggccataattgtggtgagtgtgggcttgggactcatactgtattgcgtgtgtaaatggcaattgcggcgcggcaaaaagtgggagatcgcaaagcccctaaaacataaacaggtcgatgaggagaagatgtatgactttctcctgctgcgcacagcatgctcactacctccattgcccctgcactatagaacctctatgactgagacctatggggtgctcttatgcagaccaggctggagcgcattggcacgtagccgcttgactgcggcctccgcgtcttgggttcaggccatcctgctacctcagccacctaagtag

SEQ ID NO: 205329 - DNA, 438 bp, synthetic construct
  misc_feature 1..438: note = Description of Artificial Sequence: Synthetic coding sequence
  source 1..438: mol_type = other DNA
atggacaccttcaccgtgcaggacagcaccgccatgagctggtggcgcaataatttttggattatcctggccgtggctatcatcgtggtgagcgtcgggctcggcttgatcctgtactgcgtttgcaagtggcagttgcggcggggcaagaagtgggagattgccaaaccactcaaacataagcaggtagacgaggagaagatgtatgaaaatgtgctgaacgaaagcccagtgcaactgcccccactgcctcctcggaactggccttcactggaagacagttccccccaggaagcgccttctcagccccccgctacctactccttagttaacaaagtgaagaacaagaagactgttagcattccatcttacatcgagccagaagatgattacgacgacgtggaaatccccgcgaatacagagaaggctagcttctag

SEQ ID NO: 205330 - DNA, 438 bp, synthetic construct
  misc_feature 1..438: note = Description of Artificial Sequence: Synthetic coding sequence
  source 1..438: mol_type = other DNA
atggacaccttcaccgtgcaggacagcaccgccatgagctggtggcgaaacaacttctggatcattttagcggtggccattattgtcgtgagtgtgggtctgggcctgattctttattgcgtctgtaaatggcagcttcggcgcggaaaaaaatgggaaatcgctaaacctcttaaacacaaacaggtggacgaggagaagatgtacgagaatgttctcaacgagtcccctgtccagttgccaccactacctcctaggaattggccgagcctggaggactccagccctcaggaggcccccagccagcctccggcaacctattctctggttaataaagtgaagaacaaaaagacggtcagtattccatcgtatatcgagcctgaggatgactacgatgatgtcgagatacccgctaacaccgaaaaggctagtttttag

SEQ ID NO: 205331 - DNA, 1398 bp, synthetic construct
  misc_feature 1..1398: note = Description of Artificial Sequence: Synthetic coding sequence
  source 1..1398: mol_type = other DNA
atgaacgtgaccagcctgttcagcttcaccagccccgccgtgaagagattgctggggtggaagcaaggggacgaagaggaaaagtgggccgaaaaggccgtcgacgccctggttaagaaattaaaaaagaaaaagggcgccatggaggagctcgaaaaggcattgtcttgccctgggcagccgtccaattgcgtaaccattccacgtagtctggacgggcgtcttcaagtttctcaccgtaaagggttgccacatgtgatttattgccgggtctggcggtggcctgatttgcaaagccatcatgagctcaaacccttggaatgctgtgaattcccattcggaagcaaacagaaggaagtgtgcatcaatccttaccattataaacgagtggagtctccagtgttgccacctgtactcgtcccgcgacatagtgaatataatccccagcactcgctgctggcgcaatttaggaacctgggccagaatgagccccacatgccactgaacgcaaccttccccgattctttccagcagcctaatagccaccccttcccccactcgcctaattctagttatcctaattcaccaggttcatcctctagcacataccctcatagccctactagttctgaccctggctcccccttccaaatgcctgctgatacccctccgcctgcatacctcccaccagaagacccgatgacacaagatggtagccagcctatggacacgaacatgatggccccacctctgccctccgagatcaaccggggggatgttcaagctgtggcatacgaggaacccaagcactggtgcagtattgtgtactatgagttaaataatagagttggagaggccttccacgccagtagcacttctgtgttggtagatgggttcacggacccgtctaacaataaaaataggttctgtctggggctgttatccaatgtaaataggaattctaccatagagaacacaagaaggcacattggcaagggggtgcacctctattatgtggggggggaggtgtacgctgagtgtctttcggactcaagtatattcgtacagtcgagaaactgtaattatcatcacggctttcatcccaccactgtctgcaagattccctccgggtgcagtctgaagattttcaacaaccaagagtttgcccagctgctggcccagtccgtgaatcacgggttcgagactgtttacgagctcactaagatgtgcactatccgaatgagctttgttaaagggtggggtgctgagtaccataggcaagatgtaaccagcaccccatgttggatcgaaatacacctgcatggaccgctgcagtggcttgataaggtcctgactcaaatgggttcgcctcacaaccctattagcagcgtgagctag

SEQ ID NO: 205332 - DNA, 1398 bp, synthetic construct
  misc_feature 1..1398: note = Description of Artificial Sequence: Synthetic coding sequence
  source 1..1398: mol_type = other DNA
atgaacgtgaccagcctgttcagcttcaccagccccgccgtgaagcggttattaggttggaaacaaggggatgaggaggaaaagtgggctgagaaggcggtagacgcactggttaagaaacttaaaaaaaaaaagggggccatggaagaactagagaaggcactgagctgtcccggtcagccttcgaattgtgtgaccattcccaggtctctagacggaaggctgcaggtatcgcatcggaagggcctccctcacgtgatttactgtagggtgtggcgatggcccgacctccaatcgcatcacgagctgaaacccctggaatgctgcgaatttccctttggatccaagcagaaggaggtctgcatcaatccatatcactacaaaagagtggagagccctgttctcccgcccgttctggtgcctaggcacagcgagtacaatccacagcacagccttctggcacagttcaggaacctgggccagaacgagccccacatgccactcaacgccacgttccctgattcatttcagcagcctaacagccaccccttcccccacagccctaattcaagctaccccaactcccccgggtccagtagctctacatacccacactctccaacctcgtcagaccccggctctcctttccagatgcctgccgatacccctccaccagcctacctgccaccagaagatcctatgacccaggatggctcacagcccatggacaccaacatgatggccccgcccctcccttctgagattaatcgcggggacgtccaagccgttgcctacgaagagcccaagcactggtgttccatcgtgtattacgagctaaacaacagggtaggcgaagctttccacgcctcaagcacgagcgtcctggttgatgggttcactgatccaagcaataataaaaaccgcttttgtttgggcttgctttccaatgtgaacagaaactccacaatagagaatacaagacgccacatcggcaagggtgtccatttgtactacgtcggcggcgaggtatatgcggagtgtctctcggacagctctatatttgtgcaatcacggaactgtaactatcaccatgggttccaccctacgaccgtctgtaagatcccgtctggatgcagcctgaagatatttaataaccaggagtttgcgcagctactggcccagagtgtgaatcacgggttcgagacggtgtacgagttaacgaagatgtgcacaatccggatgagtttcgttaaggggtggggagccgaataccatcgacaggacgttacttccactccctgctggatcgagatccacctgcacggccccttgcagtggctcgacaaagttctgacccaaatgggctcccctcacaaccctatttcctctgtgtcctag

SEQ ID NO: 205333 - DNA, 177 bp, synthetic construct
  misc_feature 1..177: note = Description of Artificial Sequence: Synthetic coding sequence
  source 1..177: mol_type = other DNA
atgaacgtgaccagcctgttcagcttcaccagccccgccgtgaagaggttgcttgggtggaagcagggtgacgaggaggagaagtgggccgaaaaagccgttgatgcactcgtaaaaaagctcaaaaaaaaaaagggggcgatggaagagctggagaaagccctgagctgtccctag

SEQ ID NO: 205334 - DNA, 33 bp, synthetic construct; identical to SEQ ID NO: 99140
  misc_feature 1..33: note = Description of Artificial Sequence: Synthetic coding sequence
  source 1..33: mol_type = other DNA

SEQ ID NO: 205335 - DNA, 288 bp, synthetic construct
  misc_feature 1..288: note = Description of Artificial Sequence: Synthetic coding sequence
  source 1..288: mol_type = other DNA
atgaacgtgaccagcctgttcagcttcaccagccccgccgtgaagaggttgttgggttggaagcagggagatgaggaggagaaatgggcggagaaggcggttgatgctcttgttaaaaagctcaaaaagaagaagggtgccatggaagaactcgaaaaggcactgagctgccctggacagccgtcaaattgcgtgaccattcctagaagcctggacggaagactccaggtgtcccacaggaagggactgccacatgtcatttactgccgggtgtggcgctggccctag

SEQ ID NO: 205336 - DNA, 402 bp, synthetic construct
  misc_feature 1..402: note = Description of Artificial Sequence: Synthetic coding sequence
  source 1..402: mol_type = other DNA
atgaacgtgaccagcctgttcagcttcaccagccccgccgtgaagaggctcttgggatggaaacagggggacgaagaagagaagtgggctgagaaagcggtggacgccctagtcaagaagctaaaaaaaaaaaagggagccatggaggaactggagaaggcccttagctgtccagggcagccttcgaactgcgtaaccattcctcgaagccttgacggccgacttcaagtatcccacagaaagggcctacctcacgtcatctattgtagagtttggcgctggcctgatctccagtcgcaccacgagctaaaacctctcgaatgttgtgaatttcctttcgggtctaagcagaaagaagtctgcatcaacccataccattataagagagtggagtccccatag

SEQ ID NO: 205337 - DNA, 321 bp, synthetic construct
  misc_feature 1..321: note = Description of Artificial Sequence: Synthetic coding sequence
  source 1..321: mol_type = other DNA
atgaacgtgaccagcctgttcagcttcaccagccccgccgtgaagaggctgcttggctggaagcagggagatgaggaagaaaagtgggctgagaaagctgtcgacgctttggtcaagaagttgaaaaagaagaagggcgcaatggaagaactggagaaggcgctgagttgccctggacagccaagtaactgtgtgactattcctagatcattggacggacgcctgcaagtgagccatagaaaaggcctgccgcatgtgatttattgcagggtttggagatggcccgatcttcaatcacaccacgaacttaagccattgtag

SEQ ID NO: 205338 - DNA, 339 bp, synthetic construct
  misc_feature 1..339: note = Description of Artificial Sequence: Synthetic coding sequence
  source 1..339: mol_type = other DNA
atgaacgtgaccagcctgttcagcttcaccagccccgccgtgaagcgactgctgggctggaaacagggggatgaggaagagaagtgggctgaaaaggccgtggatgccctagtcaagaaactcaagaaaaagaagggtgcaatggaagagctggagaaagctctttcatgtcctggtcagcctagtaactgcgtaacgatcccaaggtctctggacggcagattgcaggtgagtcacagaaaagggctccctcatgttatctactgtagggtgtggcggtggccagacctacagagccatcacgaacttaagcccctcgagtgctgcgagttcccatag

SEQ ID NO: 205339 - DNA, 1398 bp, synthetic construct
  misc_feature 1..1398: note = Description of Artificial Sequence: Synthetic coding sequence
  source 1..1398: mol_type = other DNA
atgaacgtgaccagcctgttcagcttcaccagccccgccgtgaagcgccttttgggatggaagcagggcgatgaggaggagaaatgggcagagaaagcagtggacgccctggtcaaaaagcttaagaagaagaaaggggctatggaagagctggaaaaggctttgtcatgccccggtcagcccagcaactgcgtgactattccacggagccttgatggacggctccaggtgtcccataggaaaggtttgccacatgtgatctattgccgtgtgtggagatggccagaccttcagtcgcaccacgaactcaaacctctggagtgctgtgagttccccttcggcagcaagcagaaggaggtctgcatcaacccttatcattacaaacgcgttgaatccccagtcctgccacctgtgcttgtaccaagacattcagagtacaaccctcagcactctctactggctcaattccgcaatctggggcaaaacgagccccatatgccactcaacgccacattcccagacagctttcagcagcctaactctcatccattcccacactcccccaactcatcttaccctaactcgcctggttcgagcagtagcacttatcctcacagtccaaccagctcagaccccggctctcccttccagatgccagcggacactccaccaccggcctatcttccccctgaagacccaatgactcaggatggctctcagccaatggacacaaatatgatggctcccccactgccaagcgagattaatcgaggcgacgtgcaggccgtggcttatgaggaacccaagcactggtgctccatcgtgtattatgaattgaacaaccgagtaggcgaagcgtttcacgccagctcaacctctgttctggtggatggattcaccgacccctctaataacaagaataggttctgcctagggttgctgtcaaacgtgaatcgcaattccacgattgagaatacccgccgccatattggcaaaggggtccatctatactacgtcggtggggaggtatatgcggaatgtctctcggattccagcattttcgtgcagagccggaattgcaattatcaccacggcttccatcctacgaccgtgtgcaagattcctagtggctgctccttgaaaatttttaacaaccaggagtttgctcaactgctggctcagtccgtgaatcacggcttcgagactgtttacgagctgacaaagatgtgcactattagaatgagctttgttaagggctggggagctgaataccaccgacaggacgtcacctccaccccttgctggattgagatccatcttcacggccctctgcagtggctggataaagtactgactcagatgggctctccgcacaaccccatttcttccgtgagctag

SEQ ID NO: 205340 - DNA, 1659 bp, synthetic construct
  misc_feature 1..1659: note = Description of Artificial Sequence: Synthetic coding sequence
  source 1..1659: mol_type = other DNA
atggacaacatgagcatcaccaacacccccaccagcaacgacgcctgtctgtcgatcgtacattcattaatgtgtcatcgacaagggggagaaagtgagaccttcgcaaagagggcaatagagagccttgtgaaaaagctaaaggaaaagaaggacgagctcgattccctgattaccgcaatcacaacaaacggagcgcatccatccaagtgtgtaacaatccagagaaccctggacggacgcctacaggtggctggccgcaaaggattcccccatgtcatttacgcccgactatggcgttggcccgatcttcacaaaaacgaactgaagcatgtcaagtactgtcagtacgcatttgatctaaagtgtgacagtgtgtgcgtgaatccttaccactacgagcgcgtggtatccccaggcattgatttgtctggactcacccttcagagcaacgcccccagctctatgatggtaaaggatgagtatgttcacgacttcgaaggacagccctccctgtcaactgaaggccattcaattcaaaccattcagcatcccccaagtaatcgtgccagcacagagacttacagtacaccggcactcctggcaccttctgagtcaaacgccacttctacggctaatttcccaaacattccagttgcatcaacatcgcagcctgcatcaatactgggcggatcccattcggaagggctgctgcagatagcaagtggccctcagccggggcagcagcagaatggtttcaccggacagccagccacttaccatcacaatagcaccacgacttggacaggctcccggaccgctccctacacccccaaccttcctcatcaccagaacggacacctacagcaccaccccccgatgcccccacaccctggacattactggcccgtccataatgaactggctttccagcccccaatatccaatcatcctgctccggaatactggtgtagtatagcatattttgagatggatgtgcaagtgggcgagacattcaaggtcccgagctcctgtcccatagtgacggtggacggttatgtggatcctagcggcggcgatcggttttgtctggggcaattgtccaacgtgcaccgcacagaggcaattgagcgggcccggttacacatcggcaaaggggtgcagctggagtgcaagggggaaggggatgtctgggttcgctgcttgtccgaccacgccgtcttcgtgcagagctattatttggacagggaggccgggcgcgcaccgggtgatgctgtgcacaaaatctacccgagtgcctacattaaagtcttcgatctgagacaatgccacaggcagatgcaacagcaagcggctaccgcgcaagctgctgctgctgctcaggcagctgccgtggccggcaatatccccgggccaggatctgtgggagggattgcacctgcgatcagcctcagcgctgccgccggcataggcgtagacgacctcaggcggctgtgcattctgcgcatgagctttgtgaaaggatggggccccgactatcccagacaatcaatcaaggagaccccctgctggatcgagatccacttacaccgcgccctccagctgcttgacgaggtgttacataccatgcctattgcagatcctcagcctctggactag

SEQ ID NO: 205341 - DNA, 1659 bp, synthetic construct
  misc_feature 1..1659: note = Description of Artificial Sequence: Synthetic coding sequence
  source 1..1659: mol_type = other DNA
atggacaacatgagcatcaccaacacccccaccagcaacgacgcctgtctctcaattgttcattccttgatgtgccacaggcaaggaggcgagtcagagacgtttgctaagcgagctatagaaagcctcgtgaagaaacttaaggaaaagaaggacgagctcgatagcctgatcaccgccattacaactaatggcgcccaccctagcaaatgcgtgacaattcagcgcaccctggatgggaggctgcaagtggcaggccgcaagggctttccgcacgtgatctacgccagactgtggagatggccagacttgcacaagaatgaactgaagcatgttaaatactgccagtacgcttttgaccttaaatgtgactcggtctgtgtcaacccttatcactatgagagggtcgtcagccccggaattgatctaagcggactcaccttgcagtccaacgctccctcgagtatgatggtgaaggacgagtacgtgcacgactttgaagggcagccatccttatcaaccgagggacattcaatacagacaatacagcatccgccgtctaacagagcctccaccgaaacatactccactcccgcgcttttagcaccttcagagtccaatgccacctccaccgctaactttcctaatatccctgtagcatctacgagccagcccgcaagcatcctgggcgggtcacatagtgaggggttgcttcagattgcgtcagggccacaacccggccaacaacagaatggctttacaggacagccagccacatatcatcataattctactaccacatggaccggaagcagaaccgctccatacactcccaatctgccccaccaccagaatggccacttgcagcaccaccccccaatgccaccccatccagggcactactggcccgtgcataacgagcttgcttttcagccccccatctccaatcacccagctcccgaatactggtgctccatagcctatttcgagatggacgtacaggtgggagagaccttcaaagtcccttcctcttgcccgatcgtaactgtcgacggctacgttgaccccagtgggggagaccggttctgcctagggcagctgtccaatgtgcaccgaacggaggccattgaacgcgcgcggctgcacattggcaagggcgtgcaactggaatgcaaaggcgagggcgacgtctgggttcgctgcttgtctgaccatgccgtgttcgtgcagtcttattaccttgacagggaagctgggcgcgcccccggagatgctgtacacaagatctatccctctgcatatatcaaagtcttcgaccttagacagtgccatcgccaaatgcagcaacaggcagcgacagctcaagcagctgcagccgcccaggccgccgctgtggccgggaatatccctggacccggatcagtgggagggatagctccagcgatctccctgtctgccgctgcaggaattggggtggacgacctgcggcggctgtgtatcctgaggatgagctttgtgaagggctggggccctgattacccccgccaaagtatcaaggagacaccttgttggattgaaatccaccttcatagggccctgcagctgttggatgaagtgcttcacactatgcccatcgccgatcctcagccgctggactag

SEQ ID NO: 205342 - DNA, 534 bp, synthetic construct
  misc_feature 1..534: note = Description of Artificial Sequence: Synthetic coding sequence
  source 1..534: mol_type = other DNA
atggacaacatgagcatcaccaacacccccaccagcaacgacgcctgcctatctattgtccattccttaatgtgccatcggcaaggaggagagagcgagacctttgcaaaacgggccattgaaagtttagttaaaaaattaaaagagaaaaaggatgagctggattctctcattaccgcaattaccacgaatggcgcacacccaagcaaatgtgtgactatacagagaaccctcgatggcaggctacaggttgcagggcgcaaagggttcccccacgtgatctacgcaaggctatggagatggccagatctccacaagaacgaactgaaacacgtcaagtactgtcagtatgcctttgatcttaaatgcgactccgtgtgtgtcaatccataccactatgagagagtggtgtctccgggaattgacctgtcaggcctcactctgcagtccaacgagaataactggtacttttctcaattgcttttggacctggacaaggggatgatccaagagcaagccatccatggaccttag

SEQ ID NO: 205343 - DNA, 1311 bp, synthetic construct
  misc_feature 1..1311: note = Description of Artificial Sequence: Synthetic coding sequence
  source 1..1311: mol_type = other DNA
atggacaacatgagcatcaccaacacccccaccagcaacgacgcctgcctgagcatcgtccacagtctgatgtgccacaggcaggggggagagagcgagacttttgctaagcgtgctatcgaatcactggtgaagaagttgaaagagaagaaggatgagctggattctttgattaccgccataacaacgaacggggcacatccaagtaaatgtgttacaatccagagaaccctggacggtcgtctgcaggtggcaggacgcaagggctttccacacgtgatttatgctagactgtggcgctggccggacctacacaaaaatgagctgaagcatgtcaagtactgccagtatgctttcgatttgaagtgtgacagcgtgtgcgttaatccgtaccattacgagcgagtggtcagtccaggaattgatctgtctggcctaacccttcagtcaaatgcaccctctagcatgatggtcaaggacgagtacgtacacgacttcgaaggtcaaccctccctctctaccgaggggcattctatacagaccattcagcatcccccatccaatcgtgcatccacagagacttacagtacaccagcactgctcgccccatcggagagtaacgcaacttccaccgcgaactttccgaatattccagttgcaagcacgtctcaacccgcatccattctaggcggaagtcattcagagggtctcctgcagattgcctctggaccacagccagggcaacagcagaacggcttcacagggcagcccgctacctaccaccataattccacaactacatggactggtagtaggaccgccccatataccccaaatcttccccaccaccaaaatggacaccttcaacatcacccaccaatgcctccgcatccaggacactactggcccgtccacaacgaactcgctttccaaccaccaatctcaaatcatcccgcccctgagtattggtgttctatcgcttatttcgagatggacgtccaagtgggagagaccttcaaagtgcccagctcatgtccaatcgtgacagtagatggatatgtggatccatcaggcggggacaggttttgccttggccagctaagcaatgtccataggacggaagcgatagagcgcgcacgactccatatcgggaaaggcgtgcagctagagtgcaaaggggagggcgatgtgtgggtgcggtgcctctctgatcatgccgtgttcgtgcagagttattatctggatagagaagccggccgcgccccaggggatgctgttcacaagatttatccaagtgcctatattaaatag

SEQ ID NO: 205344 - DNA, 243 bp, synthetic construct
  misc_feature 1..243: note = Description of Artificial Sequence: Synthetic coding sequence
  source 1..243: mol_type = other DNA
atgaccagcatggccagcctgttcagcttcaccagccccgccgtgaagcgactgttgggctggaagcagggcgacgaggaagaaaaatgggcggaaaaggccgtagatgcgctcgtgaagaagctcaagaaaaaaaaaggtgctatggaggagttagaaaaggccctgtctagtccaggtcagcccagtaaatgcgtcaccattcccagatctctggacggcaggctgcaagtgtcccattag

SEQ ID NO: 205345 - DNA, 387 bp, synthetic construct
  misc_feature 1..387: note = Description of Artificial Sequence: Synthetic coding sequence
  source 1..387: mol_type = other DNA
atgaccagcatggccagcctgttcagcttcaccagccccgccgtgaaacggcttttaggttggaagcagggggacgaggaagagaaatgggccgagaaggccgtcgacgctcttgtcaagaagcttaaaaaaaaaaagggggccatggaggagcttgaaaaagccctctccagtcccggccagcctagtaagtgtgtgaccatccccagatcgttagacgggaggctgcaggtttcgcaccgcaaaggtctgcctcacgtcatatactgtcgtgtctggcgatggccagatctgcagagtcatcatgagttaaaacctctggatatctgcgaattcccattcggctctaagcagaaagaagtgtgcatcaatccgtatcattactag

SEQ ID NO: 205346 - skipped

SEQ ID NO: 205347 - DNA, 405 bp, synthetic construct
  misc_feature 1..405: note = Description of Artificial Sequence: Synthetic coding sequence
  source 1..405: mol_type = other DNA
atgaccagcatggccagcctgttcagcttcaccagccccgccgtgaagcgcttgttgggctggaagcagggcgacgaggaagaaaagtgggccgaaaaagctgtggatgcacttgtcaagaagcttaagaaaaaaaagggtgctatggaggagctggagaaggcactgtcttcgccagggcagccatctaaatgcgtgaccattccccgctccctggatggccggctgcaggtgtctcatcgaaaagggctccctcatgtgatttactgccgggtctggcggtggccagatttacagtcccaccatgagttaaagcccctggatatatgtgagttcccgttcggatccaaacagaaggaggtctgcatcaacccatatcattacaagcgtgtggaatcgccttag

SEQ ID NO: 205348 - skipped

SEQ ID NO: 205349 - DNA, 1395 bp, synthetic construct
  misc_feature 1..1395: note = Description of Artificial Sequence: Synthetic coding sequence
  source 1..1395: mol_type = other DNA
atgaccagcatggccagcctgttcagcttcaccagccccgccgtgaagcgcctgttagggtggaagcagggcgacgaggaagagaagtgggccgagaaagctgttgatgccttggtcaagaagctgaagaagaagaaaggggccatggaagaactggaaaaggcactgtcctccccaggccagcccagtaaatgcgtgaccataccgaggagtctggacgggagattgcaggtgtcccatcgaaagggactaccacatgttatctactgtagggtgtggcgctggccagacttgcaatcccaccatgagctcaaaccgttggatatttgcgaattcccctttggctccaagcagaaagaagtctgcataaacccctaccactataaaagagttgagagtcctgttttgcctccagtactggttcctaggcacaacgagttcaatccacagcacagtctcctcgtccagtttagaaacttatctcacaacgaacctcatatgcctcagaacgcgaccttccctgactcttttcaccagccaaacaataccccattccccttaagccccaactctccttacccgccgagtccggcttcctctacatatcccaactctcctgcatccagcgggcccggctccccatttcagctgcctgctgacacacctccacccgcctacatgccgcccgacgatcagatgggccaggataacagccagcccatggacacatctaataatatgatcccccagattatgccttccatatcctcaagggatgttcaaccagtcgcttatgaggagccaaaacactggtgtagtatcgtatattacgaactgaacaaccgtgttggggaggcattccatgcatccagcacatccgtgctagtggatgggttcactgacccctcgaataacaagtcccggttctgcttaggtctgcttagcaatgtcaacagaaatagcactatcgagaatacgcggcgtcacatcggcaaaggagttcatctttactacgtaggcggcgaagtttatgccgagtgtctgtccgattccagcatatttgtgcagtcgcggaattgcaattttcatcatgggttccaccccacaacagtgtgtaagattcctagctcttgttctttgaagatctttaacaatcaggagtttgcgcaactcctagcccagtcagtgaatcatggcttcgaggccgtgtacgaattaacaaaaatgtgcacgattagaatgagcttcgttaagggctggggtgctgagtaccaccgccaagacgttacttcgaccccatgctggattgagatcttgcacgggcctttacagtggcttgataaggtgctaacccagatgggcagcccacttaacccgatctcctcagtgagctag

SEQ ID NO: 205350 - DNA, 1395 bp, synthetic construct
  misc_feature 1..1395: note = Description of Artificial Sequence: Synthetic coding sequence
  source 1..1395: mol_type = other DNA
atgaccagcatggccagcctgttcagcttcaccagccccgccgtgaaacggctcctgggttggaagcagggggacgaggaagagaaatgggcagagaaggctgtggatgcgctcgtaaagaagctcaagaagaagaaaggggcaatggaggagcttgagaaagctcttagtagcccaggtcagccttctaagtgcgtgactattccacgcagcctagacgggaggctgcaggtgtcgcatcgaaaagggttaccccacgtgatctattgccgggtttggcggtggcctgacttgcagtctcaccacgaactgaaaccactagacatctgcgaattcccctttggcagcaaacaaaaagaggtttgcatcaatccctatcattataaaagggtggaaagtcctgtcctgcccccggtgctcgttcctcgccataacgaattcaatcctcagcactctctgctggtgcagttccgcaacctctcacataatgagccccatatgcctcaaaacgcgacgttccccgactcattccaccagccaaataataccccattccctctgtcacctaatagcccttaccctcccagcccagcctcctccacctaccccaattcccctgcttcatcgggtcccggatctccctttcaactgccggctgacaccccccctccagcgtacatgcccccagacgaccagatggggcaagataatagtcaacccatggacacctccaataatatgataccgcaaataatgccctccatttcaagccgagatgttcaaccagttgcttatgaagagccgaaacactggtgttctatcgtctattacgaactcaacaacagagtcggtgaggctttccacgcttcctctacaagcgttctggttgatggatttacagatccaagcaataataagtccagattctgtttgggcctgctcagcaacgtgaaccgtaactctactatagagaatacccggagacatatcggaaagggcgtccatctgtattatgttggaggtgaggtgtatgcggaatgcctctctgattccagcattttcgtccagagccgtaactgcaatttccatcacgggttccatccaacgactgtctgtaagataccaagctcctgttccctcaagatctttaacaaccaggagtttgcccagctgcttgcacagtccgtaaaccacggatttgaggctgtgtatgagcttacaaagatgtgtaccatacgaatgagcttcgtgaagggctggggggctgaatatcaccgacaagatgtgacaagcacgccatgctggattgaaatattgcacggacccctacagtggctggataaggtgctcacacagatgggcagccccctgaatccgattagctccgtgtcctag

SEQ ID NO: 205351 - DNA, 1491 bp, synthetic construct
  misc_feature 1..1491: note = Description of Artificial Sequence: Synthetic coding sequence
  source 1..1491: mol_type = other DNA
atgttccggagcaagcggagcggcctggtgcggcggctgtggcggtctcgggtggtccctgatcgggaggaggggggaagcggcggcggcggcggcggcgatgaggacggctctctcgggagccgagcggaacccgcccccagagctcgcgagggcggggggtgtggacgctctgaagttaggccagtcgcccctcgccgaccaagagacgctgtcggccagcgaggtgcccagggtgcgggcaggagaaggcgggccggcggcccgcccaggcctatgtctgaacccggggctggggccggttctagtcttttggacgtcgctgagcctggcggcccagggtggctgcctgagtcagactgcgagaccgtcacatgctgcctcttttctgaaagagacgccgccggcgcacctcgggatgcaagtgacccgctcgctggagccgcactagagcctgctggcggcggaaggagcagagaggctcgcagcagacttttgttattggaacaggagctgaagactgtgacttatagcctcctgaaacgactgaaggagagatccctggacacccttcttgaggctgtggaaagcagggggggagtccctggcgggtgcgtactggtcccacgcgctgacctgagactgggcgggcagcccgccccaccacagttgctactgggccggctgttccgttggccagatctgcagcacgctgtggaacttaagcctctctgcggctgtcactctttcgccgctgccgcagatggaccaaccgtgtgctgtaatccatatcactttagtcggctgtgtggccctgaatccccgcctcccccgtactctcggctgtctccccgcgacgagtacaaacccctagatctgagtgactccacactgagctacactgagacagaagccacaaatagtctgatcaccgcgccaggagagttctctgacgcctcaatgtctcccgatgccacaaaaccttcgcattggtgctctgtcgcgtactgggaacatcgcacacgagtaggccggttatacgccgtctatgaccaagccgttagcatattttatgacctcccacaagggagtgggttttgtctgggccagcttaatctggagcaacgtagtgagagtgttcggcgcacacggtctaaaatcggattcggaattttgctgagcaaagagccggatggtgtctgggcttacaataggggcgagcacccaatctttgtcaactcgcctacccttgacgctcctgggggccgcgcattggtcgtccgcaaggtgcctcccggatatagtatcaaggtgttcgatttcgagagatcaggcctgcagcatgctcccgaacccgacgccgccgacggaccatacgaccccaattcagtgagaattagtttcgccaaaggatgggggccttgctattctaggcagtttatcacctcatgtccctgctggctcgagatcctgttaaataatccccgatag

SEQ ID NO: 205352 - DNA, 708 bp, synthetic construct
  misc_feature 1..708: note = Description of Artificial Sequence: Synthetic coding sequence
  source 1..708: mol_type = other DNA
atgagccggatgggcaagcccatcgagacccagaagagccccccccccccatatagtcgcctgagtcctcgggatgagtataaaccactggacctgtctgacagcaccctgtcctacacagagaccgaagcaaccaattcgcttatcaccgctcccggcgaattctccgacgcttctatgtccccagatgccacgaaaccatctcactggtgttcagtggcctattgggagcatcgtacccgagtggggaggctttatgctgtctatgaccaggccgtgagcatattctatgacctaccccagggcagtggtttctgcctgggacaattgaatctggagcaacgatctgagtccgtacgccgcacacgatctaaaattggttttggcatcctgttgtccaaggagcctgacggggtgtgggcctataatcgaggagaacaccctatcttcgtcaatagcccaactttggacgcacccgggggacgggctcttgtggttcgcaaagtgcctcctgggtatagcattaaggtgttcgactttgaaagatcaggcctgcagcatgcacccgaacccgacgctgccgacggaccctacgaccccaattctgtcaggatctcttttgctaagggatggggtccctgctactcgagacaatttatcaccagctgtccctgttggttagagatcctgctaaataacccccggtag

SEQ ID NO: 205353 - DNA, 1017 bp, synthetic construct
  misc_feature 1..1017: note = Description of Artificial Sequence: Synthetic coding sequence
  source 1..1017: mol_type = other DNA
atgttccggagcaagcggagcggcctggtgcggcggctgtggcggtctagagttgtccccgatagagaagaaggtgggtcgggcggtgggggaggcggcgatgaagacggatccctgggtagccgggctgaacctgcccccagggcccgcgagggggggggttgcggtagaagcgaagtcagacctgtggcacctaggagaccaagagatgccgtgggccagcgcggtgctcagggggccggtagacgccgcagggccggcggcccacctcggcctatgtccgaaccgggtgccggagctggcagcagtttgctagatgtggctgagccgggaggccctggatggctgcctgaatcggactgtgagacggtgacatgttgtctattctctgaacgtgatgccgccggggcacccagggatgcttcagacccattagctggagcagccctggagccagctgggggtggcagatcgagggaagcaaggtcgcgactgctgttactggagcaggagctgaaaaccgttacttactctttgttgaaaaggctaaaggagagaagtctcgataccctgctggaagcggtggagagccgaggtggcgtccccggcggttgcgttttagttccacgagccgacttgaggcttggagggcagcccgctcctccccagctcttgctgggcaggctatttcggtggcccgacttgcaacatgcagtggagcttaaacctctttgcggttgccacagtttcgccgcagccgctgatgggcccaccgtttgctgtaatccataccactttagtcgactctgcggtcccgagtctcccccccccccttatagccgcttatccccccgtgacgagtataaaccactggatttatcagactcaacgctgtcatacacggagacagaggccacgaactccctaatcaccgcacccggggagttctccgcagctgatgcagggattggaagtcgcggcaatagaggcctggagtcttcagtaccctgctcctag

SEQ ID NO: 205354 - DNA, 1293 bp, synthetic construct
  misc_feature 1..1293: note = Description of Artificial Sequence: Synthetic coding sequence
  source 1..1293: mol_type = other DNA
atgcacagcaccacccccatcagcagcctgttcagcttcaccagccctgccgtaaagcgtctcctaggttggaagcagggagatgaggaggaaaagtgggcagagaaggccgtcgattcgctggtgaagaaattgaaaaagaagaagggagctatggatgagcttgaacgcgctctgtcctgtcctgggcagccatccaaatgtgttactatccctcggtcacttgatggaaggctgcaagtctcccaccgcaaggggctaccacatgtgatttactgccgtgtttggcgctggcccgacttgcagtcccaccacgagctaaagccgcttgagtgttgcgagtttcccttcgggtcaaaacagaaagaggtgtgcattaacccttaccactacagacgcgttgagactcccgtgctgccgcctgtgctcgttccacggcattcagagtacaacccacaactgtcattgttggctaagttccgctctgctagccttcactcagaaccgctgatgcctcataatgccacctaccccgattccttccagcaacccccctgcagcgctctccccccctctccttcgcatgctttcagtcaatctccttgcacagcctcctacccccatagccccggcagcccctccgaacccgaaagcccctaccagcattccgactttaggccagtgtgctatgaagagcctcagcattggtgctctgtggcttactatgaactgaataaccgggtgggtgagaccttccaagcgtcctctaggtccgtactgattgacgggttcactgaccccagtaataatcggaatcgcttttgcctgggcctgttatcaaatgtaaaccgaaattcgaccatagaaaacactaggaggcacatcggaaagggggtgcacctgtattatgttgggggggaagtttatgccgagtgcgtgtccgactcctcaatcttcgtgcagtcccggaattgtaattatcagcatgggtttcaccccgccactgtttgcaagatccccagcgggtgttccctgaaggtatttaacaatcagctgtttgcacaacttctcgcgcaatccgtgcaccatggatttgaggtggtttatgagcttacgaaaatgtgcacaatacgaatgtcattcgtgaaggggtggggagcggaatatcaccggcaggatgtcacttcgaccccttgctggatcgagatacatctgcacgggcctctgcagtggctcgataaggtactgactcaaatgggcagcccccacaacccgatctcctccgtgtcctag

SEQ ID NO: 205355 - DNA, 1404 bp, synthetic construct
  misc_feature 1..1404: note = Description of Artificial Sequence: Synthetic coding sequence
  source 1..1404: mol_type = other DNA
atgcacagcaccacccccatcagcagcctgttcagcttcaccagcccagcagttaaaagactcctcggctggaagcagggcgatgaggaggaaaagtgggcagaaaaagctgtagactctctggtgaaaaaactcaagaagaaaaagggggctatggatgaattggagagagcccttagttgtcccggacagccctcgaaatgtgtcacaatacccagaagtctcgacggcagattgcaggtaagtcacaggaagggactcccacatgtgatctattgccgtgtctggagatggcctgacctccagtcacatcacgagctgaaacccttagagtgctgtgagttcccctttggtagcaagcagaaggaggtgtgcatcaacccctatcattatcgacgggtcgaaacacctgtgctcccacccgtcctggtccccagacattctgagtataacccccagctctcccttcttgcaaaatttcgatccgcatctctgcatagcgagccactgatgccgcacaatgccacgtacccagatagctttcagcaacccccatgcagtgctctcccgccatcaccatctcatgcattctctcagtctccttgcaccgcaagctaccctcactctcccgggtccccctccgagccggagtccccttaccagcactccgtggacaccccgccgctcccttaccatgccacagaagcttctgaaacccagtctgggcagcctgttgatgccacggcagatcgccatgtggtgctttcaatccccaatggcgactttaggcctgtttgttatgaggagccacagcattggtgctcagtggcctattacgagttgaacaatcgtgtaggcgagacatttcaagcctcctcacgaagcgttcttatcgatggctttaccgaccctagcaacaaccgaaatcggttttgtctggggcttctgtccaatgtgaacaggaattcaacaattgaaaatactcgcaggcatattggaaagggtgtgcatctgtattatgttggtggcgaagtgtacgctgagtgcgtgagcgatagttcaatattcgtgcaaagcagaaattgcaactaccagcatgggttccaccccgccactgtctgtaaaatcccttctgggtgttccttgaaggtgttcaacaatcagctgtttgcccagttacttgcccagagcgtacaccacgggttcgaagtcgtgtatgaacttactaagatgtgcaccatccggatgtccttcgtcaagggctggggcgccgagtaccacagacaggatgtcactagtactccatgttggatcgagatacacctgcacgggcccctgcagtggctggacaaagtcctgactcaaatgggctctccacataaccccatatcgtctgtgtcctag

SEQ ID NO: 205356 - DNA, 1404 bp, synthetic construct
  misc_feature 1..1404: note = Description of Artificial Sequence: Synthetic coding sequence
  source 1..1404: mol_type = other DNA
atgcacagcaccacccccatcagcagcctgttcagcttcaccagccccgcagtgaagcgtctgctgggttggaaacaaggggatgaggaggaaaaatgggcagagaaagccgttgattccctggttaaaaagcttaaaaaaaagaaaggggctatggatgagctcgaacgggctcttagctgtcccggacagccgtccaagtgtgtcaccatccccaggtccttagacggaaggcttcaggtcagccaccggaaaggcctcccgcacgtgatctattgtcgtgtgtggagatggccggacctgcaaagccatcatgagctcaagcccttggaatgctgtgagttcccttttggaagcaaacaaaaggaagtgtgcatcaacccttaccattaccgccgagtggagacgccggttctaccacctgtgctcgtaccccgtcacagcgaatataacccccagctgagcctcttggctaaatttaggtcggcatcattacactctgagcccctgatgccacacaacgccacctaccctgattcctttcagcagcctccttgtagtgcactgccccctagccctagccacgccttctcgcaaagtccatgtaccgcctcatatccacactcccctggttcgccatctgagccagaaagcccatatcagcactccgtggataccccgcctttaccataccacgcaactgaagcatcggaaacacagagcggtcagcccgttgatgccaccgctgatcggcatgtggtgttaagcattccaaatggggactttcggcccgtgtgctacgaagagccacagcactggtgcagtgtcgcctactatgagctgaacaacagagttggtgaaaccttccaagcgagtagcaggtccgtcctgattgatggatttacggacccctcaaacaatcgaaaccgcttctgtcttgggcttctgtctaatgttaaccggaacagcacaattgaaaataccagacggcacattggcaaaggcgtgcacttgtactacgtggggggagaggtgtatgcagagtgtgtctcagacagtagcatattcgtgcagtcccggaactgcaattaccagcacggcttccaccctgcgacagtctgcaaaattccatcaggatgctcgctgaaggtattcaacaaccagctgtttgcacagcttctggcccagtcagtgcaccacggattcgaagtagtctatgagctcacaaagatgtgtaccattcgcatgtcctttgttaagggatggggggctgaatatcaccggcaggacgttacttctacaccttgctggatcgaaatccacttgcacggtccactccagtggctcgacaaagtgctcactcaaatgggttccccccacaaccccatctcttcagtgtcctag

SEQ ID NO: 205357 - DNA, 1191 bp, synthetic construct
  misc_feature 1..1191: note = Description of Artificial Sequence: Synthetic coding sequence
  source 1..1191: mol_type = other DNA
atgaaggccgtgaagagcgagcgggagcggggcagccggcggcggcaccgagatggcgatgtggtcttacccgctggcgtggtggtcaaacaggaaaggctttcacccgaagtcgcaccgcctgcccatcgaaggcctgaccactcgggcgggagtccatccccaccaactagcgagccagcccgaagtgggcaccgcggaaaccgggcacgaggggtgtcacgcagtcccccaaaaaagaagaataaagcctctggacgccgctcaaagtcaccccgcagcaagcggaatagaagcccccaccactccaccgtcaaggttaagcaggaaagagaagatcatccaagaagagggagagaagacaggcagcacagggagccctctgagcaggagcaccgtagggctcgtaattctgatagggatcggcaccgcggccactcccaccaacgccgtacctccaacgaaaggcctggctcgggacagggacaggggagggatcgggatactcagaatttgcaggcccaggaagaagagcgggaattttacaacgcccgcaggagggagcatcgccagaggaatgacgtggggggcgggggcagcgagtcacaggaactggtaccccgccctgggggaaataataaagagaaggaagtccctgctaaagaaaaacccagctttgaactgtcaggggctctacttgaagatacgaacacttttaggggcgtggtgatcaaatactctgagcccccagaggccaggatccccaagaaacggtggcgactgtatccttttaaaaacgatgaggtgctcccagtaatgtacatccataggcagtcagcgtatctattagggaggcataggcggatagccgatattccgattgaccatccgtcctgctccaagcagcacgccgtgttccagtatcgattggtggagtatactagagcagacggaactgtaggaagacgggtgaagccttacattatcgatctaggctccggcaatgggacctttctcaataacaaaaggattgaacctcaaaggtattacgaactgaaagaaaaggacgtcctcaaattcggcttctcaagcagggagtacgtcctcctgcacgagtcttcagatacatcagaaatagatagaaaagacgatgaggacgaggaagaggaggaagaagtctcagactcgtag

SEQ ID NO: 205358 - DNA, 1143 bp, synthetic construct
  misc_feature 1..1143: note = Description of Artificial Sequence: Synthetic coding sequence
  source 1..1143: mol_type = other DNA
atgaaggccgtgaagagcgagcgggagggcgtggtggtgaagcaggagcggctgagcccggaggtggcccccccagcacatcgcaggcccgatcatagcggtggatctccatccccacccacatcagaacctgctaggtctggtcacaggggcaatcgcgctcggggggtgagccgatcacccccaaagaaaaaaaataaagctagcggcaggaggagtaaatccccgcgttcaaaacggaatcgatctcctcaccattctacagtaaaggtcaagcaggagcgcgaagaccaccccaggaggggccgggaggaccgccagcacagggagccttcagagcaggagcacaggagagcacgcaatagcgaccgggatcggcaccgcggtcattctcaccaaagacgcacttcaaatgagcggcccgggtctggccagggacaaggcagggatagagatacgcaaaatctgcaggcacaggaagaagaaagagagttctataatgcacggcgaagagaacatagacagcgcaatgacgttggaggtggcgggagcgagagccaagagctggtaccccggccaggtgggaacaacaaggagaaggaagtgcccgcaaaagagaagcctagtttcgaattaagcggtgctctgctggaggacactaacacatttagaggcgtggtcataaagtacagcgaaccccctgaagcaaggatcccaaagaaacgttggagactctacccatttaagaatgacgaggtactaccagttatgtatatccaccgacagagcgcctacctcttaggtcgtcacaggcgtattgccgacatccccatcgaccacccttcatgctcaaagcagcacgccgtgttccaatatagactcgtcgaatatacacgggcagatggcaccgtaggaagacgcgtgaagccatacattattgatcttggatctggaaatggcactttcctgaacaataagcggattgaaccacaacggtactacgagcttaaggaaaaggacgtcttgaaattcgggttcagcagccgggagtacgtcctcctccacgaatcctccgatacatcggagatcgatagaaaagacgacgaggatgaggaggaggaggaggaagtctccgatagctag

SEQ ID NO: 205359 - DNA, 2274 bp, synthetic construct
  misc_feature 1..2274: note = Description of Artificial Sequence: Synthetic coding sequence
  source 1..2274: mol_type = other DNA
atgagcaaccccggcacccggcggaacggcagcagcatcaagatcaggctcacggtgttgtgcgcaaaaaacttagctaaaaaagactttttccgcttgcccgacccattcgctaagattgttgttgacggatctggtcagtgtcattccaccgataccgtgaaaaatacattggatccgaagtggaatcagcactatgacctgtacgtggggaagacggattcgatcaccattagtgtgtggaaccataaaaaaatccacaaaaagcagggggccggattcttggggtgtgtaaggctgctatcaaacgccattagcaggctgaaagatactggctaccagcggctggatctctgtaagctcaatcccagcgacacagacgcagtccgcggccagatcgttgtcagcctgcagactagagacaggatcggcacaggcgggtcggtggtagattgccgcgggctgctggaaaacgaagggactgtgtatgaggattctggcccgggcagaccactcagctgcttcatggaggagcccgcaccttatacggattcaacaggcgctgccgctggcggcggcaattgcagattcgttgagagcccgtctcaggaccagcgcctgcaggcccagcgcttgagaaatcctgatgtgaggggctccctgcaaacccctcagaatcgccctcacggccaccagtctcctgagcttcctgagggatacgaacagcgaaccaccgtccaagggcaggtatatttccttcacacacagacaggggtctcaacgtggcacgacccccggatcccaagcccctccggaacaatcccagggggagatgccgcattcttatacgagtttcttctgcagggccacacctccgaaccccgagatttgaactctgtcaactgcgatgagctggggcctctgccgcctggctgggaagttcggtccacagtgagcggcaggatctactttgtcgaccacaataacagaacgacacagttcacggaccccagactgcatcacattatgaaccaccagtgccaactcaaggagccgtctcagccactgcctctcccttctgaagggagtctggaagacgaggaactcccagctcaacggtatgaacgcgaccttgtccagaagttgaaagtgctgcggcacgagctctccttgcagcagccgcaagccggccattgcaggatcgaggttagtcgggaagagatatttgaggaatcatacagacagataatgaaaatgcggccgaaagacctgaaaaagcggctgatggtcaaattccgaggggaagagggccttgactacgggggtgtggccagagagtggctctacctgctgtgtcacgagatgctcaatccctattacgggctgtttcaatactcaaccgataatatctacatgcttcagatcaaccctgattcaagtatcaaccccgatcatctttcatattttcattttgtgggccgtattatgggactggctgtctttcacggtcactatatcaatggaggcttcacagtgccgttctataagcaactgctaggtaaaccaatacagctcagcgatctggagtcagtagacccagaactccacaagagcttagtctggatactcgagaatgacattacccccgtcttggatcacaccttctgtgtcgagcataatgcttttggccgaatcctgcaacatgagctgaagcccaacggccgcaacgttccagtgaccgaggaaaataagaaagaatatgtgagactgtatgtgaactggcggttcatgcgcgggatcgaagcccagtttctggctctgcagaaagggttcaacgagttaattccacagcaccttctgaaaccgttcgaccagaaggaactcgaactcatcatagggggactggacaaaattgatctcaacgactggaagtcaaacactagacttaaacattgtgtggccgattccaatattgttcgctggttctggcaggccgtggagacgtttgatgaggaaagacgcgcgcgactccttcaattcgtgactggctccactagggtccctttgcaaggctttaaggcacttcaggggagcaccggcgctgctgggccccgtctatttaccatccacctcattgacgcaaataccgacaacctgcccaaggctcatacttgtttcaacagaatcgatatccccccctacgaaagctatgaaaaactgtacgaaaagctgctaacagccgtggaggagacttgtggatttgcagtcgaatag

SEQ ID NO: 205360 - DNA, 2196 bp, synthetic construct
  misc_feature 1..2196: note = Description of Artificial Sequence: Synthetic coding sequence
  source 1..2196: mol_type = other DNA
atgagcaaccccggcacccggcggaacggcagcagcatcaagatccggctgaccgtgctatgcgctaaaaatctggcgaagaaagacttttttaggttaccggaccctttcgcgaaaatcgtagttgatgggtctggtcaatgccattccacagatacggtgaaaaacacactcgatcccaaatggaaccagcactatgacctctacgtcggcaaaaccgacagcatcacgatctccgtttggaaccataaaaaaattcacaagaagcaaggtgccggctttttaggttgcgttaggttgctgagcaatgccatttcccgcttgaaggacactggctatcagaggctggatttgtgtaagctcaatccatcagacactgatgcagttcgaggccagatcgtggtctccttgcaaacacgcgaccgcatcggaacaggcggttcggtggtggactgtaggggactcctcgaaaatgagggcactgtatacgaggacagcggtcccgggcgcccactctcctgtttcatggaagagcctgctccttacactgattctactggcgctgcagctggcggtgggaactgccgtttcgttgaatccccttcacaggatcagcgtctccaggcacagcggctgcgcaacccagatgtgagggggagcctgcagactccgcagaacagacctcacggccaccagtccccggagctgcctgagggttacgagcagagaaccaccgttcagggacaggtctactttcttcatacacagaccggagtgtctacatggcacgacccaagaataccgagggatctgaatagcgttaactgtgatgagctgggtccactgccccccggttgggaggtccgctccacagtatctggtcggatctatttcgtggatcataataacagaacaacccagtttacagaccctagactccatcacatcatgaaccatcagtgccaactcaaggagcctagccagccactgccacttcctagtgaggggagcctggaggacgaagagctcccagcccagagatatgaacgagatcttgtccaaaagctcaaggtactgcgccatgaattatccctgcagcagccccaggcgggacattgccggattgaagtcagccgagaagaaattttcgaggagtcataccgccaaatcatgaagatgagacctaaggacctgaaaaaacggctgatggtcaagtttcgcggggaggaggggctggactatggtggcgtagcaagggaatggctttacttgctatgtcatgagatgttgaacccatattatggcttatttcagtacagtacagataacatctacatgctccagattaaccccgacagttctattaaccccgaccacttgagttacttccacttcgtagggagaatcatgggcctggcagtgtttcatggccactacataaatggcggcttcacagtacccttttacaagcaactgctgggtaagccgatccaattgtccgatctggaatccgtagaccccgagctgcataagagtctcgtctggatcttagagaacgacattacccccgtcctagatcacaccttttgcgtggaacataatgcatttgggaggatcctgcagcacgaacttaaacccaacggtaggaacgtccccgtcactgaagaaaacaagaaagagtatgtcaggctttacgtgaactggaggttcatgagaggaattgaagcacagtttctcgccctgcagaaaggctttaatgagctgattccacagcatctgctgaagccctttgatcagaaagagctagagctgatcattggcggtttagacaagatcgacctgaatgactggaagagcaacactcggctgaaacactgcgttgctgattccaatatagtgcggtggttctggcaggctgtggagacctttgacgaagagaggcgtgcgcgcctgctgcagttcgttactggctcaacccgggtcccactgcaggggtttaaggccctacaggggtctactggtgctgctgggcctcggttgttcacgattcacctcatcgatgccaatacagataacctgccgaaggcccacacctgcttcaacagaatcgacatccccccctatgagtcctacgagaagctgtacgagaagttattgacggccgtggaagaaacctgcgggtttgccgtggaatag

SEQ ID NO: 205361 - DNA, 1323 bp, synthetic construct
  misc_feature 1..1323: note = Description of Artificial Sequence: Synthetic coding sequence
  source 1..1323: mol_type = other DNA
atggccacccggagctgccgggagaaggcccagaagctgaacgagcaacaccagcttattctttccaagctgttgcgggaagaggacaacaagtattgcgctgactgcgaagccaaggggccaaggtgggcctcctggaatataggtgtatttatctgcatccggtgtgccgggattcatcgcaacttaggcgttcacatttcccgcgtgaaatcagttaacctggaccagtggacagcagagcaaatccagtgcatgcaagacatgggaaacactaaagcccgcttgttatatgaggctaacctccccgagaatttccgcaggccccaaaccgatcaagcagtcgaattctttatccgggataaatacgaaaagaaaaaatactatgacaagaacgcaattgctataacgaacaaggagaaggagaagaagaaggaggaaaagaagcgtgagaaggaacccgaaaagccagccaaacccctgacagctgagaaactgcagaagaaagaccagcagttggagcctaagaagagcacctcacccaagaaggcagccgaacctacagtcgatctcttaggtcttgatgggcccgcggtagcacccgtgaccaacgggaacacaaccgtgccacctctcaacgatgacctcgacatttttggacccatgatatccaacccgcttccggcgacggttatgccccctgcacaaggtaccccctctgctcctgccgctgctactctcagcactgtgacttccggagatctggacctgttcactgagcagacaacaaaatccgaggaggtggcaaagaagcaactctccaaagactctattttgagcctttacggcaccggcacaattcaacagcaaagcactcctggcgtgtttatgggacccaccaatatccccttcacgagccaggctcctgctgcctttcaggggttccctagcatgggagtgcctgtgccagccgctccaggcctcataggcaacgtaatgggacagtctccttcaatgatggtcggcatgccaatgcctaatggtttcatgggaaatgcacagaccggagtgatgccactgccccagaatgtagtggggccacaggggggtatggtgggacagatgggggcccctcagtcaaagtttgggttgccgcaagcccaacagcctcagtggtccctgtcccaaatgaatcaacagatggccgggatgtctatctcaagcgcaacccccacagccggattcggacagccctcctccaccaccgctggctggtcagggtcctcgtctggacagaccctttcaacacagctctggaaatag

SEQ ID NO: 205362 - DNA, 489 bp, synthetic construct
  misc_feature 1..489: note = Description of Artificial Sequence: Synthetic coding sequence
  source 1..489: mol_type = other DNA
atgggcaacaccaaggcccggctgctgtacgaggccaacctgcccgagaactttcggaggccccagacagaccaggcagtggaattttttatccgggacaagtacgaaaaaaagaagtattatgacaaaaacgcaatcgccattaccaacatatcatcgagtgatgcccctctgcaacctcttgtatcctccccatccctgcaagctgctgttgataagaataaactggagaaggagaaagagaagaaaaaagaagagaagaaacgggaaaaagagcccgagaaacccgccaaaccacttaccgcggagaagctgcaaaaaaaagatcaacagctggaacccaaaaaatctacaagccctaagaaggccgcagaaccgacagtagaccttcttggtctggtttggcgaaagatcgaaaaagagaagagcgagaggcagttagtggaagtcgaagagctaaccttcatgtactgtttccccaagaattag

SEQ ID NO: 205363 - DNA, 1311 bp, synthetic construct
  misc_feature 1..1311: note = Description of Artificial Sequence: Synthetic coding sequence
  source 1..1311: mol_type = other DNA
atggccacccggagctgccgggagaaggcccagaagctgaacgagcagcatcagctcatcttgagcaagctcctccgggaagaagataataaatactgtgccgattgcgaagcaaagggccctagatgggcaagttggaacataggcgtgttcatttgtattcgctgtgccggcatccaccgcaatctcggagtccatatctcacgggttaagagcgtgaatttggaccagtggactgcagaacagatccagtgtatgcaagatatgggtaacacaaaagcaaggctcctgtatgaggccaacttgcccgagaattttagacggcctcagactgaccaagcagtggaattttttatccgagacaagtatgagaagaaaaagtactatgataagaacgcaatcgccattactaacaaggagaaagaaaagaaaaaagaagagaaaaagcgagagaaagaaccagagaaaccggccaaaccactaaccgcagaaaagttgcagaagaaagaccagcagctggagcccaagaaatccacctccccaaaaaaagccgctgagcccacagtcgatcttctaggtctggacggacccgccgtcgcccctgtcaccaacggcaacactacggtgccacccctcaatgacgatctagatatctttgggcctatgatttcaaacccgctgccggctactgtgatgccacctgctcaggggactccttcagctccagcagctgccacactgtctacagtcaccagcggagatctcgacctgtttacagagcagacgacaaaatcagaagaggtagccaaaaagcaactcagtaaggactcaatcctgtccctgtatggaacgggcacaatccagcagcaatccactcccggagtttttatgggcccaaccaatatacctttcacttcccaggcacccgccgccttccaagggttcccgagtatgggcgtgccagtccccgcagcccctgggcttataggcaatgtaatgggccagtcccctagcatgatggtgggcatgcccatgcccaatgggttcatgggtaatgcacagacaggtgtcatgccactgccccagaatgtagttggaccccagggcggtatggtcggccagatgggtgcaccacagagtaagttcggcctgcctcaagcccaacagccacagtggtctctgtcacagataatgcagaaaggagacgcggtgctccagcactccatttccgctatctactggccgatgaccagatggctaaaatgccctctggttgatgagagcgcggacggatggcacgagtaccagtag

SEQ ID NO: 205364 - DNA, 1404 bp, synthetic construct
  misc_feature 1..1404: note = Description of Artificial Sequence: Synthetic coding sequence
  source 1..1404: mol_type = other DNA
atggccacccggagctgccgggagaaggcccagaagctgaacgagcagcatcagctgatcctgtccaaactgctgagagaagaggataacaaatactgtgcagactgcgaagctaagggcccacgttgggcttcatggaatatcggcgtcttcatctgcatacggtgtgcaggtatccaccgcaacctgggcgtgcatatcagtagggtgaagtctgtcaacctcgaccagtggacagccgaacaaatacagtgtatgcaggatatggggaataccaaggcaaggcttctgtatgaagctaatctgcctgagaatttcagacgcccacagaccgaccaggcagtagaattcttcatccgggacaaatacgaaaaaaaaaagtattacgacaagaacgccattgctattaccaatataagcagctctgacgctcctctgcagccactggtatcaagcccctctctgcaggctgccgttgacaagaataagctggagaaggagaaagagaaaaaaaaggaagagaagaaacgggaaaaggagccagagaagcctgccaagcccctgacggccgagaaattgcaaaagaaagatcagcagctggagccaaagaaatcaacctccccgaagaaagctgcagaaccaactgtggatctgctgggattggatggccctgccgtggcccccgttacaaatgggaacactaccgtgcctccattgaatgatgatctggatatctttggccctatgatctctaatccattgcccgctacagttatgcctcccgctcagggaaccccatccgccccagcagcagcaacattgagcacagtgactagcggtgatctcgacctgttcacagaacagacaacaaagagcgaagaggtggccaagaagcaattgtctaaagatagcatcttgagtctgtacgggacagggactatccagcaacagtcaaccccaggcgtgtttatgggaccaactaacatcccctttacctctcaggcacctgcagccttccaggggtttccaagcatgggggtcccagtgcccgctgcccccggtcttataggcaatgtcatggggcagagccctagcatgatggttggtatgccaatgccaaacggctttatggggaacgcccagaccggcgtcatgcccttgccccagaatgttgtcgggccccaaggcggaatggtagggcagatgggagccccccaaagcaaatttggcctgccgcaggcacagcagccccagtggtcactgtctcagatgaatcagcaaatggcaggaatgagtattagctcagcaaccccaaccgcaggattcggtcagcctagttctactacagcaggatggagcggaagtagcagtgggcagaccctctcaactcagctctggaaatag

SEQ ID NO: 205365 - DNA, 414 bp, synthetic construct
  misc_feature 1..414: note = Description of Artificial Sequence: Synthetic coding sequence
  source 1..414: mol_type = other DNA
atggccacccggagctgccgggagaaggcccagaagctgaacgagcaacaccagcttatcctctccaagctgctcagggaagaggacaataagtactgtgctgactgcgaggcgaaggggcctaggtgggcaagttggaacataggtgttttcatctgcatccggtgtgcagggattcatcgcaatttaggagtgcatattagccgagtcaaaagtgtcaatctggatcagtggacagccgagcagatccagtgtatgcaggacatgggcaacacaaaagcacggctattatacgaggccaatctgcccgaaaatttcagacgacctcaaaccgatcacgaggacattatcttagaaacgacagctgtgatcaccctattgctgaataagtgtctgccatatgctaagccttag

SEQ ID NO: 205366 - DNA, 378 bp, synthetic construct
  misc_feature 1..378: note = Description of Artificial Sequence: Synthetic coding sequence
  source 1..378: mol_type = other DNA
tgaaagtactacgacaagaacgccatcgccatcaccaacatcagcagctccgacgctccgctgcaaccgctcgtgtcgtctccatcccttcaagcagctgtcgataagaacaagctggaaaaagaaaaagagaaaaaaaaggaggaaaagaagcgtgaaaaagagcccgagaaacccgctaaaccgcttactgcggaaaagctccagaagaaggaccaacaactagagccgaagaaatccacatctcctaaaaaagccgctgaacccactgtagatcttctgggtttggtgtggaggaaaattgaaaaagaaaagtccgagcggcagctcgttgaggttgaggaattgaccttcatgtactgttttcccaagaattag

SEQ ID NO: 205367 - DNA, 189 bp, synthetic construct
  misc_feature 1..189: note = Description of Artificial Sequence: Synthetic coding sequence
  source 1..189: mol_type = other DNA
atgctgttcctgaagctgagcgtgttccgggccgtggagttcttcatcagagataagtatgagaaaaaaaaatactatgacaagaatgccatcgccatcaccaatatctcatcatcagacgccccccttcagcctctagtcagtagtccctccctccaggcggcggtagataaaaataagttagagtag

SEQ ID NO: 205368 - DNA, 1200 bp, synthetic construct
  misc_feature 1..1200: note = Description of Artificial Sequence: Synthetic coding sequence
  source 1..1200: mol_type = other DNA
atgatcttcaagggcccccggtgggccagctggaacatcggcgtgttcatatgcatcaggtgcgctggcattcatagaaatttaggcgtccacattagtcgcgtgaaatctgttaatctggaccagtggacccaggagcagattcagtgcatgcaggaaatgggcaatgggaaggcaaatcgtctctacgaagcttatctgcctgagaccttccggcgcccacaaatcgaccccgcagtcgagggattcatcagggataagtatgagaagaagaaatacatggacaggtcactggacatcaatgctttccgcaaggaaaaggatgacaagtggaagcgcggttcggaacctgtacccgaaaagaagctcgaaccggtagtgtttgagaaagtgaagatgccacaaaaaaaagaggatcctcagctgccccgcaaatcttcccccaagtcgacagcccctgtgatggatctgttgggactcgacgcgcccgtcgcatgctctatcgctaattctaaaaccagcaatacgttagaaaaggatctcgaccttctagcttcagtaccctcccccagctcgagcgggtcccgcaaagtggtgggcagcatgccaaccgctggctccgccggatccgtgcccgagaacctgaatctctttccggagccaggttccaagtcagaagagatcggcaagaaacagctctcaaaggatagtattctgtccctgtatggctcccaaacccctcaaatgcctacacaagcaatgttcatggcacctgcccagatggcctaccccacagcctacccctcatttccgggcgtgacgccgccaaatagcatcatgggaagcatgatgccaccacctgtgggcatggtggcgcaacccggggcgagcggtatggtcgctccaatggcaatgccagccgggtacatgggtggaatgcaggcttccatgatgggcgtgccgaacggcatgatgaccacacagcaggcagggtacatggccggaatggcggctatgccacagaccgtgtatggagtacaaccagcacagcagctgcagtggaatttaacccagatgactcagcagatggccggaatgaacttctacggagcaaatggaatgatgaattatgggcagagcatgtccggaggtaacggccaagccgctaatcagacactctccccacaaatgtggaagtag

SEQ ID NO: 205369 - DNA, 1290 bp, synthetic construct
  misc_feature 1..1290: note = Description of Artificial Sequence: Synthetic coding sequence
  source 1..1290: mol_type = other DNA
atgaccggcaagagcgtgaaggacgtggaccggtaccaggccgtgttggctaacctcctgcttgaagaggacaacaaattttgcgcagactgccaaagcaaaggcccacggtgggcttcatggaatatcggggtttttatctgcattcgctgtgccgggattcatagaaatctaggcgtgcacattagccgcgtgaagtccgtgaacctggatcagtggactcaggaacagatacaatgcatgcaagagatgggaaatggcaaggcgaacaggctctacgaagcctacctgcctgaaacattcaggaggccacaaatcgatcccgcagtggaaggcttcatccgagataagtatgagaaaaaaaaatacatggaccggtctctggacatcaacgcctttaggaaagagaaagatgacaaatggaaaagaggctctgaaccagttcccgagaaaaagcttgaacctgtcgtgtttgaaaaagtgaaaatgccccagaaaaaggaggaccctcagctccccagaaaatcgagtccaaagagcaccgcccctgtaatggacttactgggcctcgacgccccggtcgcctgcagcatagccaatagtaaaacgagtaacaccctggagaaagacctggatttgctcgcctccgtcccctctccaagctcctctggctcaaggaaggtcgtggggtcgatgcctacagcgggtagcgccggatctgttcccgaaaatctgaacctgttccccgaaccaggctctaaatctgaagagatcggaaaaaagcagctgtccaaagattcaattctttctctgtatgggtcccagacccctcaaatgccaacgcaggcgatgttcatggcccccgctcagatggcctatccaacagcatatccatcattccctggggtgacaccacctaactctattatgggcagcatgatgcccccaccggtcggtatggtggctcagcccggcgccagtggtatggtggccccaatggctatgcccgcagggtacatgggcgggatgcaggcatccatgatgggggtgccaaatggcatgatgaccactcagcaggccgggtatatggcaggcatggccgctatgccacagacggtgtacggcgttcaaccagcacagcagctgcagtggaatttgactcagatgacgcagcagatggccgggatgaatttttacggggcaaacggtatgatgaattacggacagtctatgtctggcggcaacggtcaggccgccaaccagaccctgagtcctcaaatgtggaagtag

SEQ ID NO: 205370 - DNA, 684 bp, synthetic construct
  misc_feature 1..684: note = Description of Artificial Sequence: Synthetic coding sequence
  source 1..684: mol_type = other DNA
atgaccggcaagagcgtgaaggacgtggaccggtaccaggccgtgcttgctaacctgctgctggaggaggacaataaattttgcgctgactgccaatcgaaagggcctagatgggcttcctggaacataggcgtgtttatctgtatcagatgcgccggaatccatcgcaatctgggcgtacacatatccagagtgaagagcgtgaatctcgaccagtggacccaagaacagatccaatgtatgcaagagatggggaatggaaaggcaaacaggctgtacgaggcataccttcccgagactttccgtcgcccccaaattgaccctgccgtggaggggttcatcagagataagtatgagaagaagaaatatatggatcgttctctcgatatcaatgccttccgcaaggagaaagacgacaaatggaagcgtggaagtgaacctgtgcccgagaagaagctcgagcctgtggttttcgaaaaggtaaagatgccccagaaaaaagaagatccgcaactccctcggaaatcttcgcctaagagcactgcccctgtgatggacttgctgggcctggacgcgcctgtagcatgctccatcgccaatagcaagacgtctaacacattggagaaagatttggatcttctcgcctccgtgccatctcccagctctagcggttccaggaagtag

SEQ ID NO: 205371 - DNA, 1050 bp, synthetic construct
  misc_feature 1..1050: note = Description of Artificial Sequence: Synthetic coding sequence
  source 1..1050: mol_type = other DNA
atgcaggagatgggcaacggcaaggccaaccggctgtacgaggcctacctgcctgagacgttccgccggccccagatcgacccagccgtcgaggggttcattagagataaatatgaaaaaaagaaatacatggatagatcattggatataaatgcctttcgcaaagagaaggacgataaatggaaaaggggttccgaacccgtgcccgagaaaaagttggaacccgttgtcttcgaaaaagtcaagatgcctcagaagaaagaagatccccagctgcctcgcaagtccagccccaaaagcaccgctcccgtaatggatctgctgggactggatgcgccagtcgcatgctctatcgctaacagtaaaacctccaacaccctggagaaagatctggacctgctcgcaagcgtcccgtctccatcgtccagtggatcacggaaagtggtgggctcaatgcctacggccggtagcgcgggttctgtccctgagaatctcaacctctttccagagcccggtagtaagagcgaagaaattggcaagaagcagctatctaaagatagcatcctgagcttatacggttcccagactcctcagatgcccactcaggccatgttcatggcacccgcacagatggcttatcccacggcttacccgagtttccccggggttacgccccctaactctatcatgggctccatgatgccccctcctgtcggaatggttgcccagcctggtgcttcaggaatggtagcccccatggctatgccagcagggtatatgggtgggatgcaggcatcgatgatgggtgtgcctaatgggatgatgacaactcagcaagctggctatatggccggaatggcggccatgccccagactgtgtacggagtgcagcccgcgcaacagctgcagtggaacctgactcagatgacacagcagatggcagggatgaatttctatggagccaacggaatgatgaactacgggcagtcaatgtccggtggaaacggacaggccgcaaaccaaactctgagtccccaaatgtggaaatag

SEQ ID NO: 205372 - DNA, 189 bp, synthetic construct
  misc_feature 1..189: note = Description of Artificial Sequence: Synthetic coding sequence
  source 1..189: mol_type = other DNA
atggcccggggcaaccagcgggagctggcccggcagaagaacatgaagaagacacaagagatcagcaagggaaaaagaaaagaggattcactcactgcttcgcagagaaaacagagagacagtgagatcatgcaagagaaacagaaggcagctaatgagaaaaagtcgatgcagacacgcgagaagtag

SEQ ID NO: 205373 - DNA, 333 bp, synthetic construct
  misc_feature 1..333: note = Description of Artificial Sequence: Synthetic coding sequence
  source 1..333: mol_type = other DNA
atggcccggggcaaccagcgggagctggcccggcagaagaacatgaagaaaacacaagagatctccaagggcaaaaggaaagaggattccctgactgcctcgcagcgtaaacagtcatcaggaggccagaaaagtgagtcaaagatgtctgctggcccccacctgccactcaaggcgcccagagaaaatccttgctttcctctgcctgcggctggaggatctcggtattacttggcttatgggagtattacgccaatttccgccttcgtctttgtggtgtttttcagtgttttctttccttctttctatgaagatttctgttgttggatatag

SEQ ID NO: 205374 - DNA, 147 bp, synthetic construct
  misc_feature 1..147: note = Description of Artificial Sequence: Synthetic coding sequence
  source 1..147: mol_type = other DNA
atgaagaagacccaggagatcagcaagggcaagcggaaggaggactctctgactgcaagtcagcggaagcagcgggacagtgagatcatgcaggaaaaacaaaaagccgctaatgagaagaagtctatgcaaactcgagagaagtag

SEQ ID NO: 205375 - DNA, 63 bp, synthetic construct
  misc_feature 1..63: note = Description of Artificial Sequence: Synthetic coding sequence
  source 1..63: mol_type = other DNA
atgaagaagacccaggagatcagcaagggcaagcggaaggaggacagcctcaccgcttcctag

SEQ ID NO: 205376 - DNA, 291 bp, synthetic construct
  misc_feature 1..291: note = Description of Artificial Sequence: Synthetic coding sequence
  source 1..291: mol_type = other DNA
atgaagaagacccaggagatcagcaagggcaagcggaaggaggactctctcacagctagtcaacgcaaacagagcagcggagggcagaagagcgaatctaagatgtcagcaggacctcaccttcccctcaaggcccccagggaaaatccctgctttccgctacctgcagcgggtggctcccggtattatctggcgtatgggtccattacgcctataagtgctttcgtcttcgtagtgttcttcagcgtgttctttccctcattttatgaagacttctgttgctggatctag

SEQ ID NO: 205377 - DNA, 270 bp, synthetic construct
  misc_feature 1..270: note = Description of Artificial Sequence: Synthetic coding sequence
  source 1..270: mol_type = other DNA
atgaagaagacccaggagatcagcaagggcaagcggaaggaggactcactgaccgctagccagcggaaacagtcttcaggaggacagaagtctgaatccaaaatgtccgctgggccccacctgcctctcaaagcccctcgggaaaatccgtgttttccactccctgcagcaggggggtctcgatactatctggcctatggctcaattactccaattagcgcattcgtgtttgtagtgttcttctctgttttcttcccctctttctattag

SEQ ID NO: 205378 - DNA, 3156 bp, synthetic construct
  misc_feature 1..3156: note = Description of Artificial Sequence: Synthetic coding sequence
  source 1..3156: mol_type = other DNA
atgggcagcgccgaggacgccgtgaaggagaagctgctgtggaacgtgaagaaagaggttaaacaaattatggaagaggccgtgacacgtaagtttgtgcacgaggacagcagccacattatagccctgtgcggggccgttgaggcttgcctcttacatcagctgaggcggagagccgccggcttcctgagaagcgataagatggcagcactgtttaccaaggtgggtaagacatgtcccgtggcgggcgaaatatgtcacaaagttcaggaattgcaacagcaggcggaggggaggaagccgtctggagtcagccaggaagcgctgcgccggcaggggagcgccagtggaaaagctccagccttgtcgccccaagctctaaagcatgtctgggtgcgaacggctctcatagaaaaagtgctcgataaagttgtacagtacctggccgagaactgctcaaagtattatgaaaaggaggcccttctcgcggatccagtctttgggcccatacttgccagtctgctggtgggcccatgcgccctcgagtacacgaaactgaaaacagcagaccactattggacagatccaagcgccgacgagctcgtccagagacatcgcatcagaggaccgcccactcgacaagacagccccgcgaagagacctgctctcggtatacgaaaacggcactcttccggcagtgcttccgaggaccgactggctgcatgcgcccgggaatgcgtcgagtcgctacaccaaaactcaagaacgcggctcttgtatggcaagaaccacgtattagtccagccaaaggaagatatggaagccgttcccggctatttgtcgttacatcagagcgccgagtcacttactctgaagtggactccgaaccagctcatgaacggcactctcggcgacagcgagctggagaagagcgtatactgggactacgcgctagtggttccattctcccaggtggtgtgcatccactgccatcagcagaagagtgggggcacgctggttctcgtgtcccaagatggaatacagcgcccccctctgcacttcccacaaggaggacacctcctcagcttccttagttgtttggagaacggtctcctcccccggggccagttggaacctccactgtggacccaacagggtaagggaaaagtcttcccgaaattgcggaaacggtcttcaatccgctccgtagacatggaagagatgggtacagggagagcaactgactacgtgttcaggattatttacccagggcatcgacacgaacacattacaatcaattaccatcatctggccgcgagcagggcggcctccgtggatgatgacgaggaagaggaggacaagctgcatgccatgctttccatgatatgtagccgaaacttaacagcccccaatcctatgaaggatgccggtgacatgattgagatgcagggcttcggaccatccctgcccgcctggcatcttgaacctctgtgttcacaaggatctagttgtttgagctgctcctcaagtagctccccacacgcaaccccttcccactgttcttgtattcctgacaggctccctctgaggctgctgtgcgagagcatgaagagacaaatcgtctccagggctttctatggatggctcgcccattgccgtcacttatcaaccgtcaggactcacctcagcgccctcgtccatcacagcgtgattccgccagaccggccacctggagctagtgccggcctgactaaggacgtgtggtcaaaatatcaaaaggacaaaaaaaactacaaggagctggagttacttaggcaggtgtactatggcggcatcgaacacgagatacgcaaggacgtctggccattcctactgggccattacaaattcggcatgtccaaaaaggaaatggaacaagtggatgcagtagtagctgcgagatatcagcaggtcctggctgagtggaaggcttgcgaagtagtggttcgacagagggagcgagaggcccatcccgccacccggaccaagttctcttctggtagttctattgattcccacgtgcagcgcctcatccaccgcgatagcaccatttcgaatgacgtgtttatttcagtcgatgaccttgagcccccagaacctcaggacccagaggatagcaggccaaagccagagcaggaggctggtcctgggacccctggcaccgctgtggttgagcagcagcattccgtagagttcgactcccctgattcgggcctgccatccagcaggaattactctgtggcatcaggaatacagtcctccttggacgagggacagtccgttggattcgaggaagaagatggtggaggtgaggaaggtagtagtgggcccggaccagctgcgcataccctgcgggaaccccaggatcccagccaggagaagccgcaggctggtgagctcgaggctggtgaagagttagctgccgtctgcgccgctgcctatactatcgagttgctggacactgttgccctgaacctgcatagaatcgacaaggacgtgcaaaggtgtgaccggaattactggtattttacgcctccaaatctggagaggctgagagatgtgatgtgtagttacgtgtgggagcacctggacgttggctacgtccagggaatgtgcgatctgctagccccactcctggtcacactggacaacgaccagctcgcgtacagctgttttagccaccttatgaaacggatgtcccaaaatttcccaaacgggggcgccatggatactcactttgcaaatatgaggagcctgatacagattctcgattctgagctgttcgagctgatgcatcagaatggcgactacacacacttctacttctgctatcggtggttcctactggatttcaagagagaattgctgtacgaggacgtattcgctgtatgggaggtaatctgggctgcaagacatatctctagcgagcatttcgttctctttatcgccctggccctcgtcgaggcctatagagaaattatccgggataacaatatggattttacggacattattaaattctttaatgaacgggcagagcatcatgatgcccaggaaatcctgcgaatcgccagagatttggtccacaaagttcagatgctaattgagaataaatag

SEQ ID NO: 205379 - DNA, 3021 bp, synthetic construct
  misc_feature 1..3021: note = Description of Artificial Sequence: Synthetic coding sequence
  source 1..3021: mol_type = other DNA
atgggcagcgccgaggacgccgtgaaggagaagctgctgtggaacgtgaagaaagaggttaagcagattatggaagaggctgtgacacgcaaattcgtgcacgaagactcgagccacattattgctctttgtggagcagttgaggcctgcctcctacatcaactgaggagacgcgctgctggctttctaaggagcgacaagatggctgcactctttacaaaggtgggaaagacatgccccgtagctggagaaatttgccacaaagtgcaggagttacaacagcaggcagagggccggaaaccctctggggtctcgcaggaagctttacgacggcagggctccgcttctggcaaggctcctgccctgagtccgcaagcactcaagcatgtgtgggtccgcaccgccctcatcgagaaagttctggacaaagtggtgcaatacctagccgagaattgttccaagtactatgagaaggaagcgctgctggcagatccagtgttcggtccaatcctggcaagcctgctagtgggcccgtgcgccctggaatacaccaaattgaaaacagcagaccactactggacggaccccagcgcagacgaactagtccagcgacaccgcatccgtggcccacccactcggcaggatagccccgccaagcgtcctgcgctgggtattcgcaagcgtcattcttctggcagcgccagcgaggatcgcctggcggcctgtgcgcgcgaatgtgttgaatcactccaccagaacagtaggacgaggctactctacggtaagaaccacgttctggtacagccaaaagaagacatggaggcggtgccaggctatctctctcttcaccagtctgcagaaagtctgactctaaagtggaccccaaaccagttaatgaatggcacactaggggacagcgagcttgaaaaaagcgtgtactgggattacgctttggtagtgcctttcagtcaagtcgtctgtattcattgtcatcagcagaagtccggcggcacattggtcctcgtctcacaggacggtatccagagaccccccctccactttccccaaggcggacacttgcttagcttcctgagctgtctcgaaaatggcctgctgccccgggggcagcttgagcctcccctttggacacagcaggggaaaggcaaagtgttcccgaaacttcggaagaggagttctatcagaagcgttgatatggaggaaatgggcacgggacgcgcaactgactacgtcttcaggattatatatcctggccatagacacgagcacaatgctggagacatgatcgagatgcagggctttggaccatcgctgcccgcatggcatcttgaacctctgtgctcacaggggtcaagctgtctatcctgcagctcatcaagttcacctcatgctacgccgtcacactgttcgtgcatccccgaccggctcccacttagactgctctgcgaatctatgaagagacagatagtatctcgtgcattctacggttggctggcacactgccgccatctttctactgtccggacgcatctttcagctctcgttcaccactccgtcattccacccgatagaccaccgggggcctctgcaggtctgaccaaggatgtctggagcaagtatcagaaggataagaaaaactataaagagttggaactgctgcggcaggtctattacggcggaatcgaacacgagattcgcaaagacgtatggccatttctgctggggcactacaagtttggcatgtcaaagaaggaaatggaacaagttgatgccgtggtcgcggcccggtatcagcaggtcctggccgaatggaaggcgtgcgaggtggtggtgagacaacgagaacgagaggcgcatccagccacccgtacaaagttttcttccgggtcaagcattgacagccacgtgcagagactaattcatcgcgacagcacaatcagtaatgacgtgtttatctccgtggatgacttggaaccgcccgaaccccaggatcctgaggactcaaggcctaagccagaacaggaagctggacccggaacccccggtaccgcggtggtagagcaacagcattcagtggagttcgatagtccagattctgggctacccagctcaagaaactattctgtcgcctctggtattcagtctagtctagacgaaggccaaagcgtcggctttgaagaggaggacggcgggggggaagagggatcttctggccccggacccgcagcccacacccttcgcgagccgcaagacccgtcacaggaaaaacctcaggctggagagcttgaagcgggagaggaactggcagctgtttgtgctgcagcctacactatcgagctgttagatactgtcgccctgaatttacatcggattgataaggacgtccaaaggtgcgacagaaattactggtatttcacgcctccaaacctggaacggctccgggacgtaatgtgcagctatgtgtgggaacacctggacgttggctacgtccagggcatgtgtgacttgctagctccgctgctcgtaactctggacaacgatcagttagcttactcctgtttctctcatctcatgaagagaatgtcacagaacttccccaacggcggtgcgatggatacgcactttgcaaatatgagaagcctcattcagattttggactcggagctatttgaactaatgcaccagaacggcgattatacacatttttacttttgctacaggtggttccttctggactttaaaagagagctgctttatgaggacgtctttgctgtgtgggaagtgatatgggcagcaaggcatatcagctcagagcattttgtcttattcatcgcgcttgccctggtggaagcatatcgggagataatacgagacaacaacatggatttcaccgacatcatcaagttttttaacgaaagagccgagcatcacgatgctcaggaaatacttagaatcgcacgagatctggttcacaaagtgcagatgttaatcgagaataaatag

SEQ ID NO: 205380 - DNA, 795 bp, synthetic construct
  misc_feature 1..795: note = Description of Artificial Sequence: Synthetic coding sequence
  source 1..795: mol_type = other DNA
atgtgccacaagaacggcttcccccaggagggcggcatcaccgccgctttcctccagaagcggaagctgcgcctgagcaagaaccacaggccagcccgggccaaggtgacagaacacgtccgtggcacccgaccaggcagagctacggccggtccggccgcctctacccgcgccgctgggtccttgtttttcgatcgttgggggaatcggggtcctgccgggtgcaggggatcatctcatctgccccagcagctcaaattcactacctcggatagctgtgatcgaataaaagacgagttccaactgctgcaggcccagtaccacagcctaaagctggaatgtgataaactggcctccgaaaaatcggagatgcagcgccactatgtgatgtattacgaaatgtcttacggcctgaatattgagatgcataagcaggcggagatcgtaaaacggcttaatgggatttgcgcccaggtgttgccctatttaagccaggagcaccagcagcaggtgctgggggcgatcgagcgggccaagcaggtgactgcacccgagctgaattctatcatccggcagcagctccaggctcatcagttgtcgcaactacaggcattggccctgcctctgactcccttgccagtgggcctgcaaccaccatcgttaccagccgtgtctgctggaactggactcctgtccctgtctgctctgggttcccaggcccatttaagtaaggaagacaagaatggccacgacggtgacacacatcaggaggatgacggcgagaaatcagattag

SEQ ID NO: 205381 - DNA, 267 bp, synthetic construct
  misc_feature 1..267: note = Description of Artificial Sequence: Synthetic coding sequence
  source 1..267: mol_type = other DNA
atgaacatgagcaagcagcccgtgagcaacgtgcgggccatccaggcaaacatcaacatcccaatgggtgcctttagaccaggcgccggccaaccccctcgacgcaaggaatgtacccctgaagtagaagaaggggtgcctcctaccagtgatgaagagaagaagccgattcctggtgccaagaaactgccaggacctgccgtcaatctctctgaaatccagaacatcaagagtgaactgaaatacgtaccgaaagcagagcagtag

SEQ ID NO: 205382 - DNA, 6411 bp, synthetic construct
  misc_feature 1..6411: note = Description of Artificial Sequence: Synthetic coding sequence
  source 1..6411: mol_type = other DNA
atggccgacgtgaccgcccggagcctgcagtacgagtacaaggccaactctaatctcgtcttgcaggccgaccgctccttgatagatagaactaggcgcgatgaacctaccggagaagttctcagtctggtgggtaagctggaggggacccggatgggggacaaagcacagcggaccaaaccccagatgcaggaagagcggagggcaaaacggaggaaacgagacgaggacaggcacgatatcaacaagatgaaagggtataccctactctctgaaggcattgacgagatggtcggtatcatttacaagcctaaaacgaaggaaaccagggagacttatgaggtgctgctgtctttcatacaggctgcgctcggcgaccaaccccgggacattctgtgcggggccgccgatgaagtgctggctgtcctgaagaacgagaagctacgggataaggagcggagaaaagagattgatttgctattaggccagacggacgacacccgctatcacgtcctcgtcaatctgggtaaaaagatcacggattacgggggcgacaaggagattcaaaatatggatgataacattgatgaaacatatggggtgaacgtgcagtttgagagcgatgaggaagagggtgatgaagacgtctatggggaggtgcgggaggaagccagcgatgacgatatggagggtgatgaggccgtggtgagatgtacactgtccgctaaccttgttgcttctggcgaactaatgtccagtaagaaaaaggaccttcacccccgggatattgacgccttctggctccaacgccagttaagtaggttctacgatgacgctattgtgagccagaagaaagctgacgaagttttagagatcctcaaaaccgcgagcgacgatcgagaatgcgagaaccagctggtcctcttattaggcttcaataccttcgatttcatcaaggttctgcgccagcatcgtatgatgatactctactgcactctcttggcctctgcccagtctgaagccgagaaggaacgaataatggggaaaatggaggccgatcctgagttgtcaaagttcctttaccaacttcacgaaacagagaaggaggacctgatccgggaagaaaggtcacggagggagagggtcaggcaaagtcgtatggatacagatctcgagacaatggaccttgaccagggtggagaagctttggctccccgccaggtactcgatctcgaagatcttgtcttcacacagggatcacacttcatggcaaataaaagatgccaactgccagatgggtcattcaggcgtcagagaaagggatacgaagaggtgcacgtccctgcattgaagccgaagcccttcggctccgaagaacagttgctgccagttgagaagttacctaaatatgcacaagctggattcgaaggattcaagacactgaatcggatccagagcaaactctatagggccgcattggaaactgatgagaacctgcttctgtgcgctcccaccggcgctggaaagaccaatgtggcacttatgtgcatgctcagggagatcggtaagcacattaacatggacggcacaattaacgttgatgactttaagattatatacatcgcacccatgcgttcgttggttcaggagatggtcggctccttcgggaagcgactcgccacgtacgggatcaccgtggcggaattgacaggtgatcaccagttgtgtaaagaagagatatcagctacgcagatcattgtgtgcacacccgaaaagtgggatatcatcacccgaaagggaggagaaagaacatatacccagctcgtgaggttaatcatactggatgagattcaccttttgcacgatgaccgcggccccgtgttggaggccctggtggcccgtgctatccgcaatatcgaaatgacgcaagaagacgtccgactgattgggctcagtgcgactctgccgaactacgaagacgtcgctacttttttgagggtggacccggcaaagggtttgttctacttcgataattccttcagacccgtgcccctggaacagacctatgtgggaatcaccgagaagaaagccatcaagcgctttcaaattatgaatgagatcgtgtatgaaaaaatcatggaacacgcagggaaaaatcaggtactggtcttcgtacacagtcgtaaagagaccgggaagactgctcgagctataagagacatgtgtctcgagaaggacacactcggactcttcctgagggaggggtcagcttcaactgaagtgctgaggactgaggcagaacagtgtaagaatttggaactgaaagacctcctgccgtacgggttcgctattcatcacgctggtatgactagggtggataggactctggttgaagacctgtttgcggacaagcacatccaggtcctcgtttctacagcaactctggcctggggcgtcaacttgccagcccacacagtgatcataaaggggacacaggtgtactccccggaaaagggacggtggaccgagctcggcgcgcttgatatactgcagatgttgggcagagcaggtcgcccacaatacgacaccaagggtgaaggcatacttattacaagccatggcgagctgcagtattacctgtctctgctcaaccaacaactcccaattgagtcccaaatggtctccaaactaccagatatgctgaatgccgagatcgtcctggggaacgttcagaacgcgaaggacgccgtgaattggctgggctacgcgtatctatatatcagaatgctgcgctctccgactctgtatggcattagccacgacgatctgaagggagatcccctcctcgatcagcgacggttagatctagtgcacaccgccgctctgatgctggacaaaaacaacttggtgaagtatgacaaaaaaacaggaaatttccaagtgacagaactgggccgtattgcttcgcactattacataaccaacgatacagtgcagacgtataaccagcttcttaagcccacattgtctgagatagagcttttcagagttttctccttgtcttcggaattcaaaaacattaccgtgcgagaggaggaaaaactggagcttcagaagttattagagcgtgtaccaatcccagtgaaagagtcaatcgaagagccttcagcaaagattaatgttcttcttcaggctttcataagccaactgaaactggagggattcgctctcatggcagatatggtgtatgtcacccaatccgctgggcgccttatgcgggcgatatttgagatagtcctgaatcgagggtgggcgcagctgaccgataagactttaaacctgtgcaaaatgattgacaagcgcatgtggcagtcaatgtgcccactcagacagttccggaagctccccgaggaggttgtcaaaaagatcgaaaagaaaaacttcccattcgagagactgtacgatctcaaccacaatgaaatcggagaacttattcggatgcctaaaatgggcaagaccattcacaagtatgtacatcttttcccgaaactcgaactttcagtccatcttcaacccatcacgcgttccaccctcaaggtggagctgacgattactccagactttcaatgggacgagaaggtgcatgggagttcagaggcattctggatcctcgttgaggatgtggattcagaagttattctgcatcacgaatattttctcctgaaggctaagtacgcacaagatgaacatttaattacattcttcgttcctgtttttgagccactccctcctcagtattttatacgggtggtgtcagacagatggctttcttgtgagacacagcttcctgtgagctttaggcacctcattttgccagaaaagtatccgccaccaacagaactgttagaccttcaacctttacccgtgtctgctctgcggaatagtgcttttgagtcactgtaccaggacaagtttccttttttcaatcccatccagacacaggtatttaataccgtatacaacagcgacgacaatgttttcgtgggcgccccaacgggctcaggtaaaaccatctgtgccgaatttgccattctgaggatgttgctgcagtcatctgagggccgctgcgtctacatcaccccaatggaggccttagctgagcaggtttatatggattggtacgaaaaattccaggataggttaaataaaaaagtggtgctgctaaccggtgaaacctccaccgaccttaagctccttggaaaaggaaacataataatttccacacccgaaaagtgggacatcctatcgaggcggtggaaacaacgcaagaacgtgcagaacatcaaccttttcgttgtggatgaggtgcacctcatagggggagagaatggaccggtgctggaggtgatttgctcaagaatgcgatacatctcttctcagatagagagacccatacgcattgtggcgttgagctcttcactgagcaatgccaaagacgtggcacattggcttgggtgtagtgctacatctaccttcaatttccacccaaatgtgcgacccgtgcctctggaactgcacatacaaggatttaacatctcacatacgcagactagacttctgtccatggcgaagcccgtttatcacgccatcaccaagcattctcctaagaagccagtgatcgtgttcgtgccctccaggaagcagactagactgacagccatcgatattcttacaacttgcgcagctgatattcagcgccagcgcttcctgcactgtacagagaaggatcttatcccatatctggagaaactcagtgattcaactttgaaggagacactgctgaacggtgtcggttacctgcatgagggactgtctcccatggagaggaggctggtggagcaactcttttccagcggagcgatacaggtagtagttgctagtaggagtctgtgttggggaatgaatgtggctgcccatctagtcatcattatggacacccaatactataacgggaagatacatgcctatgtcgattacccgatctatgacgttctccaaatggtggggcacgcaaacaggcctcttcaggacgacgagggacgttgcgttattatgtgtcagggatccaaaaaagactttttcaagaaatttctgtatgaaccactgccagtggaatctcacctagatcactgtatgcacgatcactttaacgccgagattgtaactaagacaatcgaaaacaagcaggatgccgtggattacctgacctggaccttcctgtaccgaaggatgacccaaaatcctaattactataatctgcaagggattagtcaccggcacctgagcgatcatctctcagagctggtggagcaaaccctcagtgatttagagcagtctaaatgtatcagtattgaagatgagatggatgtcgcgcctctaaacttgggcatgattgccgcctattattatatcaactatacgaccattgagttattttcgatgagcctgaacgccaaaacaaaagtgcggggcctgattgagattattagtaatgcagcggagtatgagaatatccccattagacatcacgaggataacttgctcagacaacttgcccagaaggtcccacacaaacttaacaaccccaagttcaatgatcctcacgtcaaaaccaacctcctgttgcaggcccatctaagtcgaatgcagctgagcgctgagttacagtccgataccgaagagatcctatctaaggccattcgccttattcaggcatgcgtcgatgtactgtcctctaatggatggttaagccctgccttagccgccatggagctggcccagatggtcactcaagctatgtggtctaaggacagttatctgaaacagctcccacacttcaccagtgaacatattaaacggtgtaccgacaagggcgtggaaagcgtttttgacatcatggagatggaagatgaagagaggaatgcactgctgcagctgaccgattctcagatcgctgatgtggctcgcttttgtaatagatatcctaacattgagttgagctacgaagttgtggacaaggacagcataaggagcggcggtcctgtcgtggtcctcgtccagctcgagcgcgaggaagaggttaccggcccggttatcgccccactcttcccacaaaagagagaggagggctggtgggtggtgatcggagatgcaaaatctaactccctgatcagtatcaagaggctgacactgcagcaaaaggcaaaagtcaagcttgacttcgtcgctcccgccacgggggcacataattacacactctacttcatgtcagacgcatacatgggctgtgatcaggagtacaagttttccgtcgatgtcaaagaagcagagactgactctgatagtgattag

SEQ ID NO: 205383 - DNA, 1878 bp, synthetic construct
  misc_feature 1..1878: note = Description of Artificial Sequence: Synthetic coding sequence
  source 1..1878: mol_type = other DNA
atggccgacgtgaccgcccggagcctgcagtacgagtacaaggccaacagtaacctcgtgttgcaggcggaccgcagcttaattgacagaactcgtcgcgacgaacccaccggcgaggtactgagtcttgtaggtaagctggaaggaacacggatgggcgataaagcgcagcgcaccaaaccccagatgcaggaggaaagacgggccaagcgacggaagcgcgacgaggatcggcacgatataaacaaaatgaaaggctacacccttctgagcgagggaattgacgagatggtgggaatcatatacaagcctaaaactaaggagacccgcgagacttatgaggtcctgttgagcttcatacaggccgcgctcggagaccagccacgcgatatattgtgcggcgccgctgacgaggtgctagctgttctcaagaatgaaaaattgagggataaggaacggcgcaaggagattgacctgctcctgggtcaaacagatgatactcgctatcacgtgctggtcaatttgggcaagaagattactgattacggcggggataaagagatccaaaatatggatgacaatattgacgaaacatacggggtgaacgtccagttcgaatcagacgaggaggaaggggacgaggatgtgtacggagaagtgagggaagaggcatctgacgacgacatggagggtgatgaagcagtggttaggtgtaccctgtccgctaatctggtagccagtggtgagctgatgtccagtaaaaagaaggacctgcacccgagggatatcgacgcattctggcttcagagacagctttcacggttctatgacgacgccatcgtaagccagaagaaagccgatgaagtgctggagatcctgaagactgctagcgacgaccgcgagtgcgagaatcaacttgtgcttctcctgggtttcaatacattcgatttcatcaaggtcctgcgtcagcatcggatgatgatactgtactgtaccctgctggcaagtgcgcagtcggaagccgagaaagaacgaatcatgggaaagatggaggctgatccagaactgagcaagtttctctatcagctacacgagacggaaaaggaagacttgataagagaagagcgctctcgcagggaacgtgtgcggcagtcgcggatggacaccgatttagagacaatggatttggaccaggggggcgaggctttggcgcctagacaggtcctcgatctggaggacctagttttcacgcaggggagccatttcatggcaaacaagagatgtcagctgccagacggaagcttccgcaggcagcggaagggctatgaggaggtgcacgtgcccgctttgaaacctaagccctttggatccgaagaacagctcctgcctgtcgagaagttaccaaagtacgcccaggccggatttgaagggtttaagacactcaatagaatccagtccaaactgtaccgtgcagccctcgaaactgatgaaaatctcttactttgcgctcccaccggggctggcaagaccaatgttgctctcatgtgtatgttgcgcgagatcggaaaacacatcaacatggacggcacaattaacgtcgacgattttaagataatatacattgcacctatgcgcagccttgtacaggaaatggtgggcagctttgggaagcgcgacgctaaaagcaacagtctgatctccatcaaacggctgacccttcagcaaaaggctaaagtgaaacttgattttgttgcgccagccaccggagctcataattatactctgtactttatgagcgatgcctacatgggttgtgatcaagagtataagttctccgtggacgttaaggaagctgagactgactcagacagcgattag

SEQ ID NO: 205384 - DNA, 1788 bp, synthetic construct
  misc_feature 1..1788: note = Description of Artificial Sequence: Synthetic coding sequence
  source 1..1788: mol_type = other DNA
atgcggtacatcagcagccagatcgagcggcccatccggatcgtggcattgtcctcaagtctctccaacgcgaaggacgtggcccactggctgggatgctctgctacttctacctttaacttccaccccaacgtgaggcccgtacccctggaactgcacatacagggatttaacatctcacatacccaaactaggctcctcagcatggctaagcccgtataccacgccatcactaaacacagtcctaagaagcctgttattgtgtttgtaccctcaaggaaacagacgagattgacagcaatcgatattttgaccacatgtgccgccgacatccagcgacagcgcttcctgcattgtactgaaaaagatcttatcccatatctggagaaactttccgattctacactcaaagagacactactaaacggagtgggctatctgcacgaggggctgagcccaatggaacggcggctggtcgaacaactgttcagctcaggcgccattcaggtcgtagtggcctctagatccctctgctggggcatgaacgtggccgctcacttggtgatcattatggacacacagtactataacggaaagatccacgcctatgtcgattaccccatctatgacgtactgcagatggtcggccacgcgaacaggcccctgcaggacgacgaagggagatgtgttattatgtgccagggcagcaagaaggacttctttaaaaaattcctgtatgagcctttgcctgttgagtcccaccttgatcactgtatgcatgaccacttcaatgccgaaatagtgacaaaaaccatcgagaacaaacaagacgctgtcgactacttaacctggacgttcttatacaggcgcatgacccagaatcccaactactataaccttcaggggatcagccatcggcacctatctgaccacctttcagagttggtcgaacaaaccctgtcagatctcgagcagtctaaatgtatctcaatcgaggatgagatggacgtggcaccacttaacctgggcatgatcgctgcgtattactacataaactacacaaccatcgagctgttctccatgtcacttaatgctaaaaccaaggtgagaggtctcatcgaaataattagcaacgctgcagaatacgaaaatatccctatccgccatcacgaggacaatctgctgcggcagcttgcacaaaaggtgccccataaactcaataatcccaagtttaatgatccacacgttaagactaatctgctgctccaggcccatttatctcgtatgcagctaagtgcggaactgcagagtgacactgaagagattctgtctaaagcgatccggctaatccaggcctgcgtagatgttctaagctcaaacgggtggctcagcccagctttagccgctatggagctcgcgcagatggtgactcaagctatgtggagtaaagactcctacctcaagcagctgccccatttcacgagtgaacacattaaacggtgcaccgacaagggcgtggagagtgttttcgacattatggagatggaagatgaagaacgtaatgctcttctgcaactcacagatagccagattgctgacgttgctcggttctgtaatagatatcctaatatcgagttgtcttatgaggttgttgacaaggattcaatccggagcgggggtccagtcgttgtgttggtacagcttgagcgggaggaggaagtcacgggtcccgtgattgcccctctgttccctcagttccgcgcaggccggtccggaagtcgcctgtag

SEQ ID NO: 205385 - DNA, 1788 bp, synthetic construct
  misc_feature 1..1788: note = Description of Artificial Sequence: Synthetic coding sequence
  source 1..1788: mol_type = other DNA
atggccaagcccgtgtaccacgccatcaccaagcacagccccaagaagcctgtgatcgtttttgttccaagcaggaagcagacacgtctgaccgccattgatatactcaccacttgtgcagcagatatccaaaggcaaagattcctccactgtacagaaaaggacctgatcccttacttggaaaaactgtccgacagcacactcaaggagaccctgctcaacggggtgggatatcttcatgaggggttgagccctatggaacgtagactggtggagcagttgtttagttctggggcaatacaggtggtagtggctagtcggagcctgtgctgggggatgaatgtcgctgctcacctggtgatcattatggatacacagtattacaatggtaagattcatgcttatgttgactacccaatatatgatgtcctgcagatggtgggtcacgcaaaccggcctctgcaggatgacgagggtcggtgtgtgatcatgtgccagggctccaagaaggacttttttaagaaattcctgtacgaaccattgccagtagagagccacttggaccactgcatgcatgaccacttcaacgcagagattgtaaccaagactatagaaaacaagcaggatgccgtcgactacttgacctggactttcttatatcgacgcatgacccaaaatcctaactactacaacctccaaggaataagtcaccggcacctgtccgaccaccttagcgaactcgttgaacagactttatctgacttggagcagagtaagtgtatcagcatcgaggatgagatggacgtggctccactgaatctcggcatgatcgcagcttattactacattaattacaccacaattgaattgtttagcatgtccctgaatgccaaaactaaagtgaggggcctcattgagatcatttccaacgccgcggaatatgagaatatccctatccgccaccacgaagataatcttttaaggcagcttgctcaaaaggttccacataagctgaataatccaaagtttaatgaccctcacgttaagaccaacctgctcctgcaggcacatctcagccgtatgcaactgagtgcggaacttcagagcgatactgaggagatcctgagcaaggcgataagactcattcaggcatgcgtggatgtcttgagttccaacgggtggttgagcccagccctggccgcaatggagctggcccagatggtcacgcaagccatgtggtctaaggacagttatctcaaacagttgccacactttacgtcagaacatatcaaacgatgcaccgataagggcgtggaatcagtttttgatataatggaaatggaggacgaggaaagaaatgcattgctacagctgactgactcacagattgctgatgtcgctaggttttgtaatcggtatccaaacatcgagctgtcatacgaggttgtcgataaggacagtattcggagcgggggacctgtggtggtgctggtgcagctagagcgagaggaggaggtgacaggcccagtgattgcacctctcttcccccagaaaagggaagagggatggtgggtggttatcggagatgctaaaagtaattcactcatctctattaaacgcctgactcttcaacagaaggcgaaggtgaagcttgatttcgtggctcctgctaccggagctcataattacactctgtattttatgtcagacgcctatatgggctgcgaccaggagtataaattttctgtggatgttaaggaagccgagacagattccgattccgactag

SEQ ID NO: 205386 - DNA, 2325 bp, synthetic construct
  misc_feature 1..2325: note = Description of Artificial Sequence: Synthetic coding sequence
  source 1..2325: mol_type = other DNA
atgatgatcctgtactgcaccctgctggccagcgcccagagcgaggcagagaaagagcgcataatggggaaaatggaagcggaccccgaactgagtaaatttctataccagctgcacgaaactgaaaaagaagatctgatcagagaagaaaggtctcgccgcgagcgtgttcgtcaatctcgaatggacacagacctcgagacaatggacttggatcagggtggcgaggcactcgcgccaagacaagttctggacctggaagacctcgtgtttacgcaaggttctcacttcatggccaataagcggtgccagcttcctgatggctcgttcaggcggcagaggaaggggtatgaggaagtgcacgttccagccctgaagccaaagccttttggatctgaggaacagctcttacccgtcgaaaaactgccaaagtatgcgcaggccgggtttgagggctttaaaaccctgaataggatccaaagtaaactgtaccgagccgctttggagacagacgaaaatctgctactgtgcgctccaacaggagcaggtaaaaccaatgtggcactgatgtgcatgctacgcgaaattggaaaacacatcaacatggatggaaccatcaatgtcgatgatttcaagataatatatattgcaccgatgagatccctggtacaggaaatggtcggttcattcggcaagagactggcaacctatggcattaccgttgccgaactcactggcgatcaccagctgtgcaaagaagaaattagcgcaacccagataatcgtgtgtacccctgaaaagtgggacatcatcactcggaaaggcggggaacgtacatacacgcagcttgtgagattgataattctggacgaaatacacttactacacgacgaccgagggccagtactcgaagctctcgtcgcccgagccatcaggaacatcgaaatgacccaggaggacgtgagactgattggattgtctgctactctccccaattatgaggacgtggcaacatttctacgggtggaccctgcgaaggggctgttttatttcgacaactcatttagacccgtgccattggaacagacatacgtgggcattaccgagaagaaggccattaagcgtttccagataatgaacgaaattgtgtacgagaagattatggaacacgcaggcaaaaaccaggtgctcgtgtttgtgcacagcaggaaggagaccggtaaaacggccagggccatcagagacatgtgtctggagaaagatactctgggcctgttccttcgcgagggctcagcctctactgaggtcttacggactgaggctgaacagtgtaagaacctggagctcaaggacttgcttccatacggattcgcaattcaccacgctggcatgactagggttgatcgtacattagtcgaagatctgtttgccgataaacacatccaggtgctggtttcgactgctacattagcatggggagtgaacctccctgcccataccgtgattattaagggcacccaggtgtatagccctgagaagggccgctggacagagctcggagcacttgatattctgcagatgttgggaagagctggaagaccacagtatgacacgaaaggggagggaatcctgatcaccagccacggcgagttacagtactatctgagcttactcaaccaacaactcccgattgaatcacagatggtgtccaagttgcctgacatgctgaatgcggagatagtactaggtaacgtacagaatgctaaagatgcggttaattggctcgggtatgcatacctgtatatacgcatgctgcggtcaccaacactgtatggcatcagccacgatgacctcaaaggcgaccctctgctggatcaacggagactcgacttagtgcacacagcagccctgatgttggataagaacaacctggttaagtacgacaagaaaacaggcaactttcaagtgacagagttagggaggatagcctcacactactatattacaaatgataccgtccaaacgtataaccagctgcttaaacctaccctgagcgagattgagctatttcgggtgttctcactgtctagcgaatttaaaaacatcacagttcgcgaagaggaaaaacttgagttgcaaaagctgcttgaacgggtgccaattcctgtcaaggaatccattgaagaaccgtcagcaaagattaatgtcctcttgcaggccttcatctcacaactgaaactggagggttttgcgctgatggccgacatggtttatgttacgcaaagtgccggacgacttatgagagcgatcctgaaactgtcttag

SEQ ID NO: 205387 - DNA, 2160 bp, synthetic construct
  misc_feature 1..2160: note = Description of Artificial Sequence: Synthetic coding sequence
  source 1..2160: mol_type = other DNA
atgctgctgcagagcagcgagggccggtgcgtgtacatcacccccatggaggcacttgccgagcaggtgtacatggattggtacgaaaaatttcaagatcgcctgaataagaaagtcgtacttctcacaggcgagaacggaccagtgctggaggtcatttgttccaggatgcggtatatttccagtcagattgagcgccctatacgcattgtggctttgtccagcagcctgtcaaacgctaaagacgttgcgcattggttgggctgctccgcaactagtacatttaatttccaccccaacgtacggcctgtacccctcgagctccacattcaggggtttaatatctctcatacacagactaggctgctctcaatggcgaagcctgtctatcacgctataacaaaacactctccgaaaaagcccgttatcgtgttcgtgccctctagaaaacaaacgcgcctgaccgcgatcgatatcttaacaacatgcgcagcagacatccagaggcagcgatttctccattgcactgagaaggatttaatcccatatctcgagaaattgtctgacagcaccctgaaagagactctccttaacggtgtaggctatcttcatgagggtttgagcccaatggagcgccgtctggtggagcaactgttctcgtccggagccattcaggtggtcgtggcttctaggagcctttgttggggtatgaatgttgcagctcacctagttataattatggatacacagtactacaatggcaagatccacgcctatgtggattatcctatatacgatgtcctgcagatggtcgggcacgccaaccgccccctgcaggacgatgaagggcggtgtgtgatcatgtgccagggttctaaaaaagacttttttaaaaagtttctctatgaacctctgccagtggaatctcatttagaccattgtatgcatgaccatttcaatgccgagatcgtgacgaaaaccattgagaataaacaggacgcggttgactacttaacatggacattcctgtatcggagaatgacgcagaatcctaactactacaacctccagggaatttctcacaggcatctctccgaccacttgtctgagctcgtcgagcaaacacttagcgacctcgaacagtccaagtgtatttccattgaggatgaaatggacgtcgcaccactcaacctaggcatgattgcagcctattattacataaactacaccaccattgaactgttcagtatgtccttgaacgcaaaaacaaaggtgcgaggcctcatcgagattatatccaacgccgccgagtacgaaaacatacctattcggcaccacgaggacaacttgctccgtcagctggctcagaaagtgccccataagttgaataatcctaaattcaacgatccccatgtgaagacgaatctcctgctacaggctcatctgagtcggatgcaactttcagcagagttacagtctgataccgaagagattctgagtaaggcaatacgcctgattcaggcttgtgtggacgttctgtcgagtaatggttggttaagcccggcactggccgccatggaactggcccagatggtgactcaggcaatgtggtcgaaggactcataccttaagcagcttccacatttcactagtgaacacatcaagcgctgcactgataaaggagtcgagagcgtgttcgatatcatggagatggaggacgaagagagaaacgccctcttacagttaacggactctcagatagccgatgtggcccggttttgtaaccgctatcccaatattgagctgtcctacgaagtcgtggataaggacagcatccggagtggcggacccgtggtggtgttagttcagctggaacgagaagaggaagtcaccggacccgtaatagcccctctgttcccccaaaagagagaagaaggttggtgggtggtaatcggtgatgcaaagagtaactctttaattagtattaaaaggctgactctgcagcagaaggctaaggtgaaactggatttcgtggctccagccacaggggcccacaattatacactctacttcatgtcagacgcttatatggggtgcgatcaggagtataagtttagtgtggacgtgaaggaggccgaaacagactccgactcagattag

SEQ ID NO: 205388 - DNA, 1074 bp, synthetic construct
  misc_feature 1..1074: note = Description of Artificial Sequence: Synthetic coding sequence
  source 1..1074: mol_type = other DNA
atgatcgagcagcagaagcggaagggccccgagctgcccctggtgcccgtgaaacggcaacgccacgaacttctgctgggcgctgggtccgggcctggtgccgggcagcaacaagctacaccaggagccctccttcaggcggggcccccccggtgttccagcctgcaagccccgatcatgctgctctcaggacacgaaggcgaagtgtattgttgcaagttccaccctaacggttcgaccctcgcctccgctggattcgaccggcttatattactgtggaatgtgtacggtgactgtgataactatgcaacattaaagggccactcaggcgccgtcatggagctgcattataatacagacggtagcatgctgttttcagcgtctacggacaagaccgtcgccgtgtgggactccgagaccggagaacgtgtgaagcgcttaaaaggccatacttcttttgtgaactcttgttatcccgctcgtcgggggccccagctggtatgcactggcagtgatgatgggactgttaaactctgggacattcggaaaaaggccgcaattcagactttccaaaatacttatcaggtgctggcagtgactttcaatgacacatccgaccagatcatcagcgggggaattgataacgacatcaaggtgtgggacctgcggcagaataagctaacctacaccatgaggggccatgccgacagtgtgaccggtctgagtttaagtagcgaagggagctacttgctgagtaatgcaatggataacactgtccgcgtttgggacgttcgcccatttgcccctaaagagcggtgcgtcaaaatcttccagggcaacgtgcataatttcgaaaagaatttgttgcgttgcagctggtcacctgatgggtcaaagattgccgctggatctgcggaccgcttcgtctatgtctgggataccacaagccggcggattctttacaaactcccggggcacgctggatcaattaatgaggtggcttttcacccagatgagcctataattatttctgccagctcagataagcgcctttatatgggcgagatacagtag

SEQ ID NO: 205389 - DNA, 384 bp, synthetic construct
  misc_feature 1..384: note = Description of Artificial Sequence: Synthetic coding sequence
  source 1..384: mol_type = other DNA
atgatcctgatcagcgccggctgccccggcggcctgtggcccatcgtagttcttgtaggtcttttcatatggatctgttttgctgtgcgggtctgggatgtgcgaccatttgcccctaaagagcgctgcgtcaaaattttccagggcaatgtgcacaattttgagaaaaatctcctcaggtgcagctggagcccagacggatctaagattgcggccggcagtgccgacagattcgtatatgtgtgggacacaaccagcagaaggatcctctacaaattgccgggccacgccggatctatcaacgaggttgcatttcaccccgacgagcctatcattatcagtgcatccagcgataagagattatatatgggggagatccagtag

SEQ ID NO: 205390 - DNA, 1230 bp, synthetic construct
  misc_feature 1..1230: note = Description of Artificial Sequence: Synthetic coding sequence
  source 1..1230: mol_type = other DNA
atgatcgagcagcagaagcggaagggccccgagctgcccctggtgccggttaaaaggcagcgccatgagctgctgctgggggccggaagcggccccggcgcaggacagcaacaggcgaccccaggcgcactactccaggctggtccacctcgttgctcatcgctgcaggctcctataatgttgttgtctgggcacgaaggagaggtgtactgctgcaaattccatcccaatggctcgaccctggcctcagcaggcttcgatcgtcttattttactgtggaatgtgtatggtgattgcgataactacgcgaccctcaagggccattccggcgccgtgatggaactccactacaatacggacgggtctatgctgttctctgccagcactgacaaaaccgttgcagtctgggattccgaaacaggagagagggttaagcgtcttaaagggcacacgagtttcgtgaatagttgctaccccgctcgcaggggcccccagctggtgtgtactgggtctgatgacgggacagtgaagctgtgggatataagaaaaaaggcggccattcagacctttcagaatacctaccaagttctagctgtaacatttaacgacacctccgaccagattatctccggagggatcgataacgatatcaaagtctgggatctgcgtcagaacaagctgacatataccatgcgggggcacgccgattccgtgaccggtctgtcactttcctccgagggcagctatttattgagtaacgctatggataacaccgttcgcgtgtgggacgtgaggccctttgcgcctaaagagcgatgcgtgaagatcttccaggggaacgtgcataactttgagaagaatctcctccgatgcagttggtctcctgacggatctaagatagcggctggatccgctgatcgatttgtgtacgtgtgggatactacatcaagaaggattctttataagctgcccggtcatgcgggctccataaacgaggttgcatttcacccggacgagccaattatcgaaaccggcttccacagaatcggacagggcggacatgaattacttacttcatcaaacccacccgcaagcgcatcacaaagtgcggggatcacgggcgtctcacactgcgcccaactccaaacagtctttatgtgggtgtccatgtccgtgagtcctctcttaatctccggggaatctaagagtaacgctcctttctcatcctag

SEQ ID NO: 205391 - DNA, 849 bp, synthetic construct
  misc_feature 1..849: note = Description of Artificial Sequence: Synthetic coding sequence
  source 1..849: mol_type = other DNA
atggccgtgcccgagacccggcccaaccacaccatctacatcaacaacctgaatgagaaaatcaagaaagacgaactgaagaagtccctgtacgccatttttagccagttcggtcaaatacttgatatattggttagtcggagtctgaagatgaggggtcaagctttcgttatctttaaagaggtgtcctctgcaacaaacgccctgcgctccatgcaaggctttcctttctatgacaagccaatgaggatccagtacgcgaaaacagactccgatatcatcgcgaaaatgaaaggaacattcgtggaacgcgaccgtaagagagagaaacgtaagccaaaaagccaggaaacgcctgctacgaaaaaagccgttcagggcgggggagctactcccgtggtcggagcggtgcaggggcctgttccaggcatgccgcccatgacgcaagctccacggataatgcatcacatgccaggacagccgccatatatgccacccccaggcatgattcccccaccaggtctggcccctgggcagattccacccggggctatgccccctcaacaactcatgcctggtcagatgcctcccgcacaacctctctcagagaacccccctaaccacattcttttcctgactaacttgcctgaagaaactaatgagttgatgctctctatgttgttcaaccagttcccggggttcaaagaggtgagactggtgcctggaagacacgacatcgcctttgtggagttcgacaatgaagttcaggccggagctgctcgcgatgcacttcagggcttcaaaataactcagaataatgccatgaagatttcatttgcaaagaaatag

SEQ ID NO: 205392 - DNA, 612 bp, synthetic construct
  misc_feature 1..612: note = Description of Artificial Sequence: Synthetic coding sequence
  source 1..612: mol_type = other DNA
atggccgtgcccgagacccggcccaaccacaccatctacatcatcgcaaagatgaagggcacatttgtcgaacgggatcggaagcgggagaaaaggaagccaaagagccaagaaaccccagccaccaagaaggctgtgcagggcggcggtgccacccctgtggtaggggccgtgcaggggcccgttccgggcatgccaccgatgactcaggcgccacgaatcatgcaccatatgcctggacagcccccctacatgccccctccgggaatgatacctccacccgggctggctcctgggcaaattcctcccggagccatgccaccacaacagctgatgcctggccagatgcctccagcccagccactgtctgagaatcctcctaaccacattttgttcttgactaacctgccagaagaaacgaatgagttaatgctttccatgctatttaaccagtttccggggttcaaggaggtgcgcctcgtgcctggaagacacgacatagccttcgtcgagttcgacaatgaagttcaggcaggcgctgcccgagatgctttgcagggattcaaaataacccagaacaatgctatgaaaattagctttgcaaagaagtag

SEQ ID NO: 205393 - DNA, 768 bp, synthetic construct
  misc_feature 1..768: note = Description of Artificial Sequence: Synthetic coding sequence
  source 1..768: mol_type = other DNA
atggtgaagctgaccgccgagctgatcgagcaggccgcccagtacactaacgctgtgcgagatcgtgagctggacctccgaggctataagatacccgtaatcgagaatctgggcgccacacttgaccaattcgacgccattgatttctcggacaatgagattcggaagttggatgggttcccgcttttgagaaggctgaagactttgttggttaacaacaacagaatctgcagaattggagaggggttagaccaggcactgccctgtcttaccgaacttatcctcaccaacaactctctcgtggaactgggggatctcgatccattggccagcctcaaatcgttaacctacctgtctattctgagaaaccccgtcactaacaagaaacattaccgactatacgtcatctataaggtgccgcaggtccgggtcctggacttccagaaagttaagctaaaagaacgacaggaagccgagaagatgtttaaggggaagaggggagcccaactggcaaaagacatagcaagaagatctaaaactttcaacccgggcgctgggctacctactgataagaagaagggaggtccttctccgggagacgtggaggcgataaagaatgccatcgctaatgcttcgacactggcagaagtggagcgcctcaaggggctgctccagtcagggcagatccctgggcgggagcggaggtcagggcccacagatgacggggaggaagagatggaggaggacacggtgaccaatggcagctag

SEQ ID NO: 205394 - DNA, 480 bp, synthetic construct
  misc_feature 1..480: note = Description of Artificial Sequence: Synthetic coding sequence
  source 1..480: mol_type = other DNA
atgcccaagttctactgcgactactgcgacacctacctgacccacgattcaccctcggtgcgcaaaacacattgttccggacgtaagcacaaggagaacgtgaaggattattaccagaagtggatggaagagcaggctcagtcattgatcgataagactaccgccgcttttcaacagggaaaaattccgcccacgcccttttctgccccaccccctgcaggagcaatgatccctccacctccgtccctacctggaccccccagacccggcatgatgcctgcccctcatatgggcggccctcctatgatgcccatgatgggtcccccaccccccggcatgatgcccgtgggccctgcgccaggaatgcgtccacctatggggggccatatgccaatgatgccaggtccccccatgatgagacctcccgccagacctatgatggtccctactaggccaggcatgaccagacctgatcgctag

SEQ ID NO: 205395 - DNA, 543 bp, synthetic construct
  misc_feature 1..543: note = Description of Artificial Sequence: Synthetic coding sequence
  source 1..543: mol_type = other DNA
atgaacagcgccagcgtggacggccacctgagcggctgccggctgtttcttttcttgtcacccctcttccgcttctattgtgattactgcgacacgtacctgacccacgacagtccttctgtgcgtaaaacacactgttctggaagaaaacataaagagaatgtgaaggactattaccaaaagtggatggaagagcaagcccaatcactgattgataagaccaccgccgcttttcagcaaggaaagattccacccacaccatttagcgccccgccacctgctggtgcgatgattccacccccccccagcctccctgggcctcctcgacccggaatgatgcctgcgccccacatgggaggcccaccaatgatgccaatgatgggaccaccgcctcctggtatgatgccagtggggcccgctcccggtatgcgcccgcctatggggggtcacatgccaatgatgcccggaccccctatgatgaggccccctgcccgaccaatgatggttcctacacgtcctggaatgactcggcctgacaggtag

SEQ ID NO: 205396 - DNA, 357 bp, synthetic construct
  misc_feature 1..357: note = Description of Artificial Sequence: Synthetic coding sequence
  source 1..357: mol_type = other DNA
atggaggagcaggcccagagcctgatcgacaagaccaccgccgccttccagcaaggtaagattcctcctacccctttttccgcgcctccgcctgccggagctatgatccctcctccgccttcattgcctgggcccccccgccccggtatgatgccagcaccgcacatgggtgggccgcctatgatgcccatgatgggcccacctccccctggcatgatgcccgtgggtcccgccccaggaatgcgtccgccaatgggagggcacatgccgatgatgcccgggcctccgatgatgcgtcctcccgctcgccctatgatggtacctaccaggccaggaatgacccgacctgatcgttag

SEQ ID NO: 205397 - DNA, 159 bp, synthetic construct
  misc_feature 1..159: note = Description of Artificial Sequence: Synthetic coding sequence
  source 1..159: mol_type = other DNA
atgcggatcgagggctgcatcatcggcttcgacgagtacatgaacctggtgctggatgatgccgaagagatacatagcaagaccaagtccaggaagcagctgggaagaattatgctgaagggtgacaacatcacattgttacagtccgtgtcaaattag

SEQ ID NO: 205398 - DNA, 279 bp, synthetic construct
  misc_feature 1..279: note = Description of Artificial Sequence: Synthetic coding sequence
  source 1..279: mol_type = other DNA
atggcctaccggggccagggccagaaggtgcagaaggtgatggtgcagcccattaacctgatttttagatatctccagaatcgctcacgaatccaggtgtggctgtatgaacaggtgaacatgagaattgaggggtgtatcattggctttgacgagtacatgaacttggtcctcgatgacgcagaggagatccattccaaaactaagtccaggaagcagctgggccgcattatgctgaagggggataacatcacacttctacaatcggtgtctaattag

SEQ ID NO: 205399 - DNA, 723 bp, synthetic construct
  misc_feature 1..723: note = Description of Artificial Sequence: Synthetic coding sequence
  source 1..723: mol_type = other DNA
atgaccgtgggcaagagcagcaagatgctgcagcacatcgactacagaatgcggtgtatcctgcaggacggcagaattttcataggaacgtttaaggcatttgataaacacatgaacctgatattatgcgactgcgatgagttccggaagataaaacccaaaaacgccaagcagcctgagcgagaggaaaaaagggttttggggctcgtactactccgaggtgagaatctcgtgagcatgaccgtcgaggggcctcccccaaaagatacgggaatcgccagagtgcctctcgccggggccgctgggggaccaggcgtgggacgcgcggctggacggggggtccctgctggggtgccaatcccccaggctcctgccggtctggccggcccggtcaggggtgtaggaggaccctcacagcaagtcatgactccgcaagggagggggaccgttgccgccgcggccgttgcagctacggcctcaatcgcaggggcacccacccagtaccccccaggccgggggactccaccaccgccggtgggacgcgcaaccccccctcccggtatcatggctcctccacctggcatgcgcccgccaatgggccctcccataggcctcccaccagctcggggcactcctatcggcatgccgccccccggaatgagaccccccccacccggtattagagggccaccccctcctggtatgcgtcccccgaggccatag

SEQ ID NO: 205400 - DNA, 723 bp, synthetic construct
  misc_feature 1..723: note = Description of Artificial Sequence: Synthetic coding sequence
  source 1..723: mol_type = other DNA
atgaccgtgggcaagagcagcaagatgctgcagcacatcgactacagaatgaggtgtatcctgcaggacggccggattttcattggcacatttaaagcctttgacaagcacatgaatctgatactatgcgactgtgacgagtttaggaagattaaacccaagaacgccaaacaacccgagcgcgaagagaagagggtgttggggcttgtgctcctgaggggagagaatttggtgagcatgaccgtcgagggcccgcctccaaaagataccgggatcgctcgggtgcctctggctggcgccgccgggggccccggtgttgggcgagccgctggccgcggggtccccgccggcgtgcccattccacaggcccccgccggtctagcggggcccgtgcgaggtgtgggaggcccatcccagcaagtgatgacaccccagggacgcggtaccgtggctgccgccgccgtcgcagccacagcgtctatagccggcgcaccaacacagtatccacctggcagaggcactccgccaccaccagtcggccgcgcgaccccacctcccggaatcatggcccctccccctggtatgcgcccacccatgggtccaccaatcggcttaccaccagccaggggcaccccaatcggcatgcctccccccggaatgcgaccccctcctcccggcatacggggaccccccccccccggaatgaggccgccccggccatag

SEQ ID NO: 205401 - DNA, 723 bp, synthetic construct
  misc_feature 1..723: note = Description of Artificial Sequence: Synthetic coding sequence
  source 1..723: mol_type = other DNA
atgaccgtgggcaagagcagcaagatgctgcagcacatcgactacagaatgagatgtatcttgcaggatggtaggatttttatcggaaccttcaaggcctttgataagcacatgaatttgatcctgtgcgattgtgacgaatttaggaagattaagcctaaaaatgcgaaacagcctgagagagaagagaaaagagtactcgggctagtgttactcagaggggagaatctggtatctatgaccgtggagggaccccccccaaaggataccggtatcgcccgcgtccctttggcaggggccgcagggggccccggcgtgggtagggcagctggccgcggagtacctgctggggtgcccatccctcaggcacccgccggcctggctggccctgtacgaggcgtggggggacctagccaacaagtgatgactcctcaggggcgaggcacggttgccgcagccgccgtcgcggccactgcctctatcgcaggtgcccctacgcagtatcccccagggcggggaacgccccctcccccagttgggagagccactccgccccccggtattatggctcccccccctggtatgcggccgccaatgggtccaccgattgggctccctcctgcaagaggcacaccgatcgggatgccgcctcctggcatgagaccaccaccacccgggatccgcgggcctccaccgcctggaatgcgcccaccccggccctag

SEQ ID NO: 205402 - DNA, 723 bp, synthetic construct
  misc_feature 1..723: note = Description of Artificial Sequence: Synthetic coding sequence
  source 1..723: mol_type = other DNA
atgaccgtgggcaagagcagcaagatgctgcagcacatcgactaccggatgaggtgtatcctccaggacgggagaattttcatcggtacctttaaagctttcgataagcatatgaatttgattttgtgtgactgtgacgaattcaggaaaattaagccaaaaaacgctaaacagccggagcgggaggagaagcgggtgctgggactggtgctgctccgcggggaaaacctggtgagtatgacagtcgaaggaccacctcccaaggataccggcatcgcaagggtgcccctcgccggagccgccggcggacccggagtgggccgcgccgccggtaggggagtgcctgccggtgtgcccatcccccaggctcctgccggcttggccggacctgtgcggggtgtaggcggcccaagtcagcaggtgatgacacctcaaggccggggtacagtggctgctgccgccgtcgctgcgacagctagcattgcaggagcgccgactcagtacccacctggcaggggtacgcctccacctcctgtggggcgtgcaacccccccgcccgggattatggcgccgccgcccggaatgagaccacctatgggtcctcccatcggcttgccccccgctcgcggcactccgatcgggatgccaccccctggaatgcggccaccacctccaggcattagaggacctccacctcctggtatgagaccgcctagaccctag

SEQ ID NO: 205403 - DNA, 735 bp, synthetic construct
  misc_feature 1..735: note = Description of Artificial Sequence: Synthetic coding sequence
  source 1..735: mol_type = other DNA
atgatggacagccagaccgtgggcaagagcagcaagatgctgcagcacatcgactaccggatgagatgtatcctgcaggacggccgcatcttcattggtacgtttaaggcttttgataaacacatgaacctcatcctctgtgattgtgacgaattcaggaagattaaacccaagaatgctaaacagccagagagagaagaaaagcgggtgcttggactagtgttgctgaggggagagaacctcgtgtctatgactgtggaaggccctccgcctaaagataccgggatcgccagagttcccctggcaggcgctgcaggagggcctggtgtgggcagagcagcaggacgcggagtgcctgccggtgttcctattccacaggctcccgccgggttggcggggcccgtgagaggagtagggggtccgagccaacaggtgatgaccccgcaaggtcgaggaacggtagctgccgccgccgttgcggccactgctagtatcgccggggcccctacccagtaccctcctggcagaggcacccctccacctcccgtggggcgggctacccctccgcctggtatcatggctccaccaccagggatgcggccaccaatgggcccccctatcggattgccccctgccagaggtactcctattggtatgcctccccccgggatgagacctccacctcccggcatccgaggtccgcctccgccaggcatgcgcccacctaggccctag

SEQ ID NO: 205404 - DNA, 945 bp, synthetic construct
  misc_feature 1..945: note = Description of Artificial Sequence: Synthetic coding sequence
  source 1..945: mol_type = other DNA
atgagccgggtgcccgccttcctgagcgccgccgaggtggaggagcatcttcgctcttcctctttattgatcccacctctggaaaccgccctggctaactttagcagcggccctgagggcggcgtgatgcagccagtgcgtactgtcgtacccgtcaccaagcatcgcggatatctcggggtcatgcccgcatactcagccgcagaggatgccctcacaactaagcttgtgacattctacgaggaccgcgggatcacttctgtggttccctctcatcaagccaccgtgctgttgttcgagcccagtaatgggacactcctcgcagtgatggacggtaatgtcatcacggctaagagaaccgctgcagtgtccgcaatcgcgaccaaatttctgaagccgcctagtagtgaggtactgtgcattctcggtgccggcgtgcaggcctactcccattatgagatcttcaccgagcaatttagtttcaaggaagtgcgaatctggaatagaacgaaggagaacgccgaaaaattcgcggataccgtgcagggggaggttcgcgtctgttcatctgttcaggaagccgtggccggtgccgacgtcatcataaccgtcaccctagctaccgaacccatactctttggcgagtgggtcaagcccggcgctcatattaatgccgtgggggcttctcgccccgattggagagagttagatgatgagctcatgaaagaagccgtcttgtacgtcgatagccaggaagcagccctcaaggagagtggggacgtgttgcttagcggtgcagagatattcgctgagctgggggaggtcatcaagggggtgaagcctgctcattgcgagaaaactaccgtttttaagtccctgggtatggcagtggaagatactgtggctgctaagttaatctatgattcatggagcagcggcaaatag

SEQ ID NO: 205405 - DNA, 1248 bp, synthetic construct
  misc_feature 1..1248: note = Description of Artificial Sequence: Synthetic coding sequence
  source 1..1248: mol_type = other DNA
atggccaccgtgggcgagtggagctgcgtgcggtgcaccttcctgaaccccgcaggacagcgacagtgttctatatgtgaagcgccaaggcacaaacccgacctcaaccatatcctgcgtctgagtgtggaagagcaaaaatggccgtgtgctcgttgcacttttcgaaactttttgggaaaagaggcctgcgaagtttgtggattcacacccgagccagcccctggggcggcttttctgccagtgctgaacggggtgctgccgaagcctcccgctatactgggagagcccaagggttcatgccaggaagaagctggccctgtgcggacagcaggtctcgtggccaccgagccagcaaggggtcagtgtgaagataaagatgaagaagagaaagaggagcaggaggaggaggagggcgccgctgagcctagaggcgggtgggcatgtccacgatgcaccctccataacacccctgtggcttcttcatgcagtgtatgcggcggaccccgaaggctgtcactaccccgaatccctcccgaggctctggtcgtgcccgaagtcgtggcgcccgccggattccatgtggttccagccgccccaccgccaggactgccgggagagggagccgaagcaaatccccccgctaccagtcaggggccagccgcggaacctgagccacccagggtcccccccttctccccttttagttcaacactccagaataatcccgtgccaaggtcacgccgtgaggtgcctccacagctgcaacccccggtgcctgaggctgcccagccctccccctccgccggatgccgaggggctccccagggtagcggttgggccggggcatcacgcctggcagaactattaagcggaaagagactatctgtgctcgaggaagaagctacagagggaggcaccagtagagtggaggccggatccagtacttcaggatctgatataatcgaccttgccggtgatactgtgcgttataccccagcgagcccaagctccccagattttacgacttggagctgtgccaagtgcactcttaggaatccatccccgcccagtctgcagcccctgggacggggccccgagtctctcccccgcgcagctggacctagggctggttgcgtccaactcgaggcaggacacggtggcgcccggggttcccctgctgatcacgctggcaggcgccaccaccccgcgcacagggagcctcgacgcgctgccagaggcccctag

SEQ ID NO: 205406 - DNA, 270 bp, synthetic construct
  misc_feature 1..270: note = Description of Artificial Sequence: Synthetic coding sequence
  source 1..270: mol_type = other DNA
atgagcagccagcagcagaagcagccctgcaccccccccccccagctgcaacagcagcaggtgaaacagccctgtcaacctcctccacaagagccgtgcatccccaagaccaaggagccctgccaccccaaagtgcctgaaccgtgtcacccgaaggtgcctgagccatgtcagcctaaagttccagaaccttgccatccgaaggtccctgagccttgtccatcaatagtgacacctgcccccgcacagcagaaaacgaagcagaaatag

SEQ ID NO: 205407 - DNA, 222 bp, synthetic construct
  misc_feature 1..222: note = Description of Artificial Sequence: Synthetic coding sequence
  source 1..222: mol_type = other DNA
atgagcagccagcagcagaagcagccctgcaccccccccccccagttacagcaacagcaggtaaaacagccctgtcagccaccaccccaggaaccctgtatcccgaaaactaaggagccatgtcatccgaaggtgccagagccctgtcatcccaaagtgcccgaaccatgtccaagtattgtaacgccagcccctgcacagcagaagaccaagcagaagtag

SEQ ID NO: 205408 - DNA, 219 bp, synthetic construct
  misc_feature 1..219: note = Description of Artificial Sequence: Synthetic coding sequence
  source 1..219: mol_type = other DNA
atgagctaccagcagcagcagtgcaagcagccctgccagcccccccctgtgtgtccgacacctaaatgtcccgagccgtgtccgcctccaaagtgtcccgaaccatgcccgcctccaaaatgccctcagccatgccctccccagcagtgtcaacagaaatacccaccggtgactcctagccctccttgccaatcaaagtatccaccgaaatcaaaatag

SEQ ID NO: 205409 - DNA, 219 bp, synthetic construct
  misc_feature 1..219: note = Description of Artificial Sequence: Synthetic coding sequence
  source 1..219: mol_type = other DNA
atgagctaccagcagcagcagtgcaagcagccctgccagcccccccctgtgtgccccactccaaaatgtccggaaccatgcccaccacctaagtgtccagagccttgccctcctcctaagtgtccccagccatgcccaccgcagcagtgtcagcagaagtaccctcccgtaactccatcaccaccatgtcaaccgaaatatccgcctaagtccaagtag

SEQ ID NO: 205410 - DNA, 219 bp, synthetic construct
  misc_feature 1..219: note = Description of Artificial Sequence: Synthetic coding sequence
  source 1..219: mol_type = other DNA
atgagctaccagcagcagcagtgcaagcagccctgccagccccccccggtctgccccacacccaaatgtcccgagccttgtcctccccctaaatgccctgaaccctgcccccctcccaagtgcccacagccctgccctccacaacaatgtcagcagaagtatcctccagtaacccctagtcccccatgccaaccaaaatatcccccaaaaagtaaatag

SEQ ID NO: 205411 - DNA, 219 bp, synthetic construct
  misc_feature 1..219: note = Description of Artificial Sequence: Synthetic coding sequence
  source 1..219: mol_type = other DNA
atgagctaccagcagcagcagtgcaagcagccctgccagccccccccggtgtgccctacgccaaaatgtcccgagccttgtcctccacctaagtgtcccgagccctgtccccctccaaaatgtcctcagccttgcccccctcagcaatgccaacagaaatacccacccgttaccccgagccccccttgccagcccaagtatccccccaaaagtaagtag

SEQ ID NO: 205412 - DNA, 510 bp, synthetic construct
  misc_feature 1..510: note = Description of Artificial Sequence: Synthetic coding sequence
  source 1..510: mol_type = other DNA
atgagcagctaccagcagaagcagaccttcaccccccccccccagctgcagcagcagcaagtaaaacagccctctcaacctccgccacaggagattttcgttcctaccaccaaggaaccctgccatagcaaagtccctcagccagggaacacaaaaatcccggagccaggctgtacaaaggtacccgagcctggttgtactaaggtccctgagccaggatgtaccaaggtccctgagcccgggtgtacaaaggtgccggagcctggatgcaccaaagttcccgagcccggctgcacgaaggtgcctgaaccaggctacactaaggtccctgagccagggagcatcaaggtgcccgaccagggcttcattaagttccctgagcccggcgctatcaaggtcccagagcagggctataccaaggtgcctgttcctggctatacgaagctccctgagccttgccctagcaccgtaacccccggccccgcccagcagaagaccaagcagaagtag

SEQ ID NO: 205413 - DNA, 510 bp, synthetic construct
  misc_feature 1..510: note = Description of Artificial Sequence: Synthetic coding sequence
  source 1..510: mol_type = other DNA
atgagcagctaccagcagaagcagaccttcaccccccccccccagctgcagcaacagcaagtgaagcagccctctcaaccaccgccacaggaaatattcgtccctacgactaaggagccatgtcacagcaaagtgccacagccgggaaacactaagatcccggaaccaggctgtaccaaggttccggaacctggttgtactaaagtgcctgagcccggctgtacgaaagtcccagagccagggtgtacaaaggtgccagagcccgggtgcactaaggttccagagcctggctgtacaaaggtaccagagcccggatataccaaagtccctgagccaggctcaataaaggttccagaccaggggtttattaagttcccggagcccggtgcaatcaaggtgccggagcagggctatacaaaggtccccgttcctggatacacgaaactcccggaaccatgtccttcgactgtgacccctgggcccgcccagcagaaaacaaagcagaaatag

SEQ ID NO: 205414 - DNA, 480 bp, synthetic construct
  misc_feature 1..480: note = Description of Artificial Sequence: Synthetic coding sequence
  source 1..480: mol_type = other DNA
atgagcagctaccagcagaagcagaccttcaccccccccccccagctccaacaacagcaggtgaagcaaccctcccagcctccacctcaagaaatatttgtacctaccaccaaggaaccctgccactctaaagtccctcagcccggaaatacaaagatacccgaacccggttgcacgaaggtccctgagcccggctgtactaaagtgccggagcccggatgtactaaagtgcccgaacccggctgcacgaaggtgcccgaaccaggatgtacaaaggtgcctgagccaggatgcacaaaggtcccggagcctggctacaccaaagttcccgaacccggctcaattaaggtgcccgaccagggctttatcaagtttccagaaccgggtgcaataaaagtccccgagcaagggtataccaaagtgcccgtgcccggatataccaaacttccagaaccatgtccttcgacagtgactccctag

SEQ ID NO: 205415 - DNA, 486 bp, synthetic construct
  misc_feature 1..486: note = Description of Artificial Sequence: Synthetic coding sequence
  source 1..486: mol_type = other DNA
atgagcagctaccagcagaagcagaccttcaccccccccccccagctccagcaacagcaggttaagcagccctcccagcctccccctcaggaaattttcgtccccacaacaaaagaaccctgtcactctaaggtgccccagccgggcaacactaaaatcccagaaccaggttgcacgaaagttcccgagccagggtgcaccaaggtccccgaacccgggtgcactaaggtaccagagccaggatgtacgaaagtcccagagcccggctgtacaaaagtacctgagcctggttacaccaaagtgccagagccggggtcaatcaaagtgccagaccagggctttattaagtttcccgaacccggtgctataaaagtcccggagcagggatatacgaaagtccccgttccaggatacaccaagttaccggaaccatgcccgagtaccgtgactcctggcccagcacagcagaaaacgaaacagaaatag

SEQ ID NO: 205416 - DNA, 10989 bp, synthetic construct
  misc_feature 1..10989: note = Description of Artificial Sequence: Synthetic coding sequence
  source 1..10989: mol_type = other DNA
atgagccggcgggcccccggcagccggctgagcagcggcggcggcggagggggaactaagtatccccgtagctggaacgattggcagccccgtacggattcagcgtccgccgacccagataatttaaaatattctagttccagagatcgcggcggttccagttcttatgggctacaaccatcaaactccgccgtagtgtcccgccagagacacgacgatacccgggtacacgccgacattcaaaatgatgaaaagggaggctactccgttaatggcggatccggggagaatacctatgggcgtaaatccctgggccaagagcttagagtgaacaatgtgacttcccctgaatttacatctgtgcagcacgggtctagggcattagcaaccaaggatatgagaaagtcccaggagcggagcatgtcctattctgatgagtcgaggcttagtaatttgctgagacgcattacccgggaggacgaccgtgaccggcggcttgccaccgttaagcagctgaaggaatttattcagcaacccgaaaataagctggttttagtcaagcaactggataatatactcgctgcggttcacgacgttttaaatgaaagctctaaactgttgcaggaactgagacaagaaggagcgtgctgcttaggacttctgtgtgcctccctgagctacgaagcggagaaaatttttaagtggattttttccaagttcagctctagtgcgaaggacgaggtaaagttgttgtacttgtgtgcgacgtacaaggcattggagaccgtcggcgagaagaaagccttctcttcagtcatgcagctcgttatgacttctttgcaatccattctggagaacgtggatacacccgaattgctgtgcaaatgcgtaaaatgcattttattagtcgcacgatgctatccgcatatcttttctactaacttcagggatacagtggacatccttgtgggatggcacattgatcacactcagaagccatccctgacgcagcaagtgtccggatggcttcagtcactcgaaccattctgggtagctgatcttgccttctccacaaccctgctgggccagtttctggaagatatggaggcttacgctgaggacctgagtcatgtcgcatcaggcgagtccgttgacgaggatgtccctccaccctcagtgagcctccctaaactggcggctttactacgcgttttctccactgtcgttagaagcattggagaacgatttagtccgatccggggccctccgattaccgaagcatacgtcacagatgtattataccgtgttatgcggtgcgtgactgccgcaaaccaggtttttttctcggaggctgtgctgacggccgcgaatgagtgcgtcggagtgttgctaggctccttagatccaagcatgacaatccactgtgacatggtgatcacatacggacttgaccaattagagaactgccagacatgtggaaccgattacatcatctccgtgctgaacctcctgacactcatcgtcgagcagataaataccaaactaccatcgtcctttgttgagaagttgtttatcccaagctcaaaactgctcttcctgcgatatcataaggagaaagaggttgtggccgtcgcccatgcggtgtatcaagctgtactatcactgaagaatattccagtgctggaaacggcctacaaacttatcctgggtgaaatgacctgtgcactaaacaatttgctgcactctctgcagctgccggaggcctgcagtgaaattaagcatgaagcgtttaagaatcacgtgtttaacgtcgacaacgccaagtttgttgtgattttcgatctgagcgctctcacgaccataggaaacgctaagaattcgctgatcggcatgtgggccctgtcccccacagtgtttgccttactgagcaaaaacttgatgatcgtgcacagtgatctggcagtacacttcccggccattcagtacgctgtgctatacactttgtatagtcactgcaccaggcacgatcactttataagttctagcctttcatcctccagcccctccttatttgacggggcggtaattagcaccgtgacgactgctacaaaaaagcactttagcatcatcctgaacttactcggaatcctgctgaagaaggataacctcaaccaagacacgcgaaagttactcatgacttgggcgctcgaggcagcagtcctgatgaaaaaaagcgagacctacgctccactcttttcactcccttcatttcataagttctgtaagggcttactggccaacaccttggtagaggatgtgaacatctgtttacaggcttgcagctctctgcatgcactcagtagcagcctgccggatgatctgcttcagcgctgtgtagatgtgtgcagagtacagctggtccatagtggaacaaggatccgccaggcattcgggaaactcctgaagtccatcccgctagacgtggtactgtcaaacaacaaccacaccgagattcaagagatcagtctcgctctgcgcagccacatgagtaaagcccctagcaacacctttcaccctcaagatttctccgacgtcattagttttatattatacggcaattctcataggaccggaaaggacaactggctggagagactgttttacagctgccagcgcctggacaagagagatcagtccacaatcccccggaatctgctcaagaccgacgccgtgctgtggcaatgggccatttgggaagcagctcaattcactgtgctcagcaagcttcgcacgcctcttggtcgagcccaagatacatttcagaccatcgaagggatcatacgttccctggccgcacacacactgaatccagatcaggatgtgtcccagtggaccactgcggacaatgatgaagggcacggaaacaaccagctcagacttgtcctgttgcttcagtacctcgaaaatctcgaaaagcttatgtacaatgcttacgaaggctgcgctaatgctctgaccagtccccccaaagtgataaggacattcttttacaccaacagacagacatgccaagattggttaacccggattcggttgagcataatgagagtaggtctgctagccggccaacccgccgttacagtgcgacatggattcgacctgcttaccgagatgaagaccacgagtttaagccagggcaacgaactggaagttacaattatgatggtggtcgaggcactctgcgagctgcattgtcccgaggctatacagggcatagcagtgtggtcatcatcgattgtgggaaaaaacttactctggatcaactccgtggcacagcaggccgaaggccgcttcgagaaagcctcagtggaatatcaggaacacctttgcgcgatgacgggagtggattgctgtatctcgtcctttgacaaatcagtgctgacactagctaacgccggccgtaatagtgctagtcctaagcatagcctgaacggggagtcaagaaagactgtcctatccaagccgactgattcctcacctgaagtgatcaattatcttggtaataaagcttgcgagtgttacatctccatcgctgactgggcggcggtgcaggaatggcagaacgcaattcacgatctgaaaaagagtaccagttcaacttcacttaatttaaaggcagactttaactacatcaaatcccttagcagcttcgagagcgggaagttcgtggagtgtaccgaacagctcgaattgctgcccggggagaatatcaaccttttggctggcggtagtaaagagaaaatcgatatgaaaaaactgctgccgaacatgctctctcccgacccccgcgagctgcaaaagtctatcgaagtgcagctgttgcggtcgagtgtgtgtcttgccacagcactcaaccccatcgagcaagatcagaaatggcagtctatcacagagaatgtagtgaaatacctgaaacagaccagtaggattgcaatcggacccctccggctgtctaccctgactgtgagccagagcctgccagtgctctccacacttcagctgtattgcagcagcgccctagaaaataccgtttctaataggctatctaccgaggattgtctcatcccactcttctctgaagcccttcggagttgtaaacagcatgatgtacggccctggatgcaggctttacgctacaccatgtatcagaaccaactgctggagaagattaaagagcagaccgtgcccataagatcacacctgatggagctgggcttgacggccgccaagtttgcccgtaagagaggaaatgttagccttgctacacggttactggcacagtgctctgaggtgcaacttggtaagaccacaactgcacaggatcttgtgcagcatttcaagaagctaagcacacagggacaggtggatgagaagtggggaccggagctggatattgaaaaaacaaagctcctttacaccgcaggacagtctacccatgctatggaaatgctatcctcctgcgctatcagtttctgtaagtccgtgaaagcggagtacgctgtggccaagagtatcttgaccttggcgaaatggatacaggccgagtggaaggaaataagtgggcaacttaagcaagtgtatcgagcccagcatcagcagaacttcactggtctttcgactcttagcaagaacatcctgacattaatcgaactcccctcggtcaataccatggaagaggagtatccgcgcatagaatcagagtccactgtccatattggcgtcggagagcccgacttcattctgggacaactgtatcacctctcttctgtccaggcccctgaggtggccaagtcctgggccgcattggcttcctgggcctacagatggggccgcaaagtcgtggataacgctagccagggcgaaggggtaagactcctacctagagagaaaagtgaagtgcagaacctcctgcctgacactatcacagaagaggaaaaggagcgcatttatggtatcctaggccaggcagtgtgtcggccagcggggattcaagacgaagacatcacactgcagattaccgagtccgaggataacgaggaggatgacatggtggatgttatatggcggcaacttataagctcctgcccatggcttagcgaactggacgaatccgccacagaaggggtcatcaaagtctggcgaaaggtcgtggatagaatattttcactatacaaattgtcatgctcagcttactttaccttcctaaaactcaacgcaggccagattcctttagatgaagatgatcctagactgcacctgtcacatcgcgtcgagcagagtaccgatgatatgatcgtgatggctactctccgtctactgaggctccttgtgaaacacgctggggagctcagacagtacctggagcacggactcgagacgacgccgacagctccttggagagggattattccacagctgttttctcgattgaaccatcccgaagtgtacgtgcgacaaagcatctgcaatttactgtgtagagtagcccaggattccccccatctgatcctatatccagccatcgtaggtacaatctccctgtcttcggagagccaggcatctgggaataaattcagtaccgccatcccaactctccttgggaacatacaaggagaggaattgctggtgagcgagtgcgaaggaggctctccgcccgcctcccaggatagcaacaaagatgagccgaagtctggcctaaacgaggaccaggctatgatgcaggattgctactccaagattgtggacaagctatcctccgcaaaccctacaatggtgctccaggtgcagatgttagtcgctgagctgcgacgtgtgaccgtgttgtgggacgaactgtggctcggagttcttctccagcaacacatgtacgtgctgcggagaatccagcaactggaagatgaggtcaagcgcgtgcagaacaataatacattgagaaaggaggaaaaaatcgctatcatgagggaaaaacacaccgcccttatgaagcccatcgtgttcgcactggagcacgttcggtctattaccgccgcgccagcagagacacctcatgagaagtggttccaggacaactatggagatgccattgagaacgcccttgagaaattgaagacacctctgaatcccgctaaacccggtagtagctggattccctttaaggaaatcatgctgtctctgcagcagcgcgcacagaagagagcatcgtatattcttcgcctggaggaaatctccccatggctggctgcgatgaccaacaccgagatcgctctgcccggggaggtgtctgctagagataccgtgaccatccactcggtaggcggaacaattacaatcctgccgaccaaaactaaaccaaagaaacttttgttcttaggcagtgacggcaagtcctacccatacttgtttaaagggttagaggacctgcacctagacgaaaggatcatgcagttcctgtccattgtcaacactatgttcgccactatcaatcggcaggaaacgccccggtttcacgcccgtcattactctgtcactccccttggcacgcgttcgggacttatccagtgggtggacggagctaccccactttttgggctgtataaaagatggcagcaaagggaggcagccctgcaggcacagaaggctcaggactcgtatcaaacaccccagaaccctggaattgtacccagacccagtgagctgtattacagcaaaataggacccgccctgaagaccgtcggcttgagcctagatgtgtcccgacgcgactggccactgcatgtgatgaaagcagtattggaggaactgatggaggcgactccccctaatctcctagctaaagaactgtggtcctcatgtaccacgcccgacgagtggtggcgcgtcactcagtcctatgcgagatcaaccgcagtaatgagtatggtgggatatatcataggcttaggcgatcgccacctagataatgttctcatcgacatgaccacaggagaagtcgttcacattgactacaatgtctgttttgagaaaggcaaatctttgcgggtgccggagaaagtaccattccggatgacacagaatatcgagacagcccttggcgtcactggtgtcgagggcgtttttcggttgagctgcgaacaggtcttgcatatcatgcggcgggggagggagaccctgttgacgctgctcgaagcattcgtgtacgacccacttgtggattggaccgccggcggcgaagctggatttgcgggcgcagtgtacggaggaggtggccagcaggcagagagcaaacagtccaaaagagaaatggagcgcgagattacccggtccctcttttcaagccgggtggctgagatcaaagtaaattggttcaaaaatcgcgatgagatgctggtggtgctcccaaaactagacggctcactggacgaatatctcagtttacaggaacagcttacagatgtggagaagctgcagggcaagttgctcgaggagatcgaattcctggagggggccgagggggtcgatcatccttcacacactctccagcatagatatagcgagcacactcagttgcagacgcagcaaagggccgtacaggaggcaatccaagtgaagctgaatgagtttgagcaatggataacacactatcaggcagctttcaataacctcgaagcgacccagctggcctcactgcttcaagaaatatcaacacaaatggatctgggaccgccttcttacgtaccagctacagcctttttgcagaacgccgggcaggcacacctcattagccagtgtgaacaactggagggcgaagttggcgccttgcttcagcagaggaggagcgtgctgcggggctgtctggagcagctgcatcactatgctacagttgcactccagtatccgaaggctatcttccaaaagcacagaatcgagcagtggaagacctggatggaggagttgatctgtaatacaactgtggagcggtgccaggaactatatagaaagtacgaaatgcaatatgctccccagccccctccaactgtgtgccaatttatcacagctaccgaaatgaccctccagcgctacgctgcagacatcaactcacggcttatacgccaggtggagcgcctgaagcaggaagcggttacagtgcccgtgtgcgaggaccagctgaaagaaattgagcgttgcattaaggtttttcttcatgagaacggggaagaaggctctttatctctcgcctcggttataatatcggctctatgtactctgacaaggcgaaacttgatgatggagggagctgccagcagtgccggggaacagctggtagacctgacttcccgggacggcgcctggttcctggaggaactatgcagcatgtcaggcaacgtcacatgtttggtgcaactcctgaagcaatgtcaccttgtgcctcaggatctggacataccgaatcccatggaagccagcgaaaccgtgcatctggcaaatggggtttatacttccctccaggagctaaactctaatttcagacaaatcatttttcctgaggcactgaggtgtctaatgaaaggagagtacactttggagagcatgcttcacgagctggacggcctaatcgagcagacgaccgatggcgtgcccctgcagactctggtggaaagcttacaagcctacctgagaaacgcggccatgggactggaagaagaaacacatgctcattacattgatgtggcccgcctgctccacgcccagtatggggagctgatacaaccaagaaatgggtcagtggacgaaaccccaaagatgtccgccggtcagatgcttctggtggccttcgatgggatgtttgcacaggtcgagaccgcatttagcctcttggtggagaagctgaataagatggaaattcctatcgcctggaggaagattgacatcatccgagaagcgagatccacacaggttaacttcttcgacgatgacaatcacaggcaggtcctggaggagatcttcttcctgaagcggctccagacaatcaaagagtttttccggctttgcggcacattctccaaaacgctaagtggctccagctctctggaggatcagaatactgtgaatggcccggttcagattgtgaacgttaagacgctgttccgcaacagttgcttttctgaagaccagatggccaagcctatcaaagcttttacagcagatttcgtgcgacaactcctcattgggttgccaaaccaggcactcggactgaccttatgctctttcatctccgcccttggagtcgacatcatcgcccaagtggaggccaaggatttcggtgccgaaagcaaagtttccgtggatgacctttgtaaaaaggcagttgaacataacattcagatcggcaagtttagccagcttgtgatgaaccgggctaccgttctagcaagttcctacgacacggcatggaaaaagcatgatttggtgagacgtctcgagacgagcataagtagttgcaaaacctcacttcagagagtgcaactgcatatagcaatgttccagcagtggcaacacgaggatctactcatcaaccggcctcaggccatgtcagttactcccccaccaagaagcgccattctgacctctatgaagaaaaagctccatacactgagccaaatagaaacctccatcgctactgttcaggagaagctagcggcactcgaatctagcattgagcaacgcctcaagtgggcaggaggtgccaatcctgctttggcaccagtgctgcaggattttgaagccacaatcgcagagagacgaaacctcgtgctcaaggagtctcagcgtgcaagccaagtgaccttcttgtgttccaatatcattcattttgaatccctgagaacccgtacagcagaggccctgaacctagacgccgccctgttcgagcttatcaagagatgccaacagatgtgttcctttgcttcccagttcaactcatctgtgtcggaactcgaactgcggctgctccagcgggttgacacgggcctggaacacccaatcgggtcctccgagtggttgctctcagctcataagcagctgacgcaggatatgagcacccagagggccatacagacagagaaagagcagcagattgagactgtctgcgagactattcagaacctcgtcgacaatatcaaaacagtgttgactggacacaaccgtcagttgggcgacgtcaagcatctgctgaaggccatggccaaagatgaagaggcggctctggccgacggggaggacgtgccgtacgaaaactctgttcggcagttcttgggggaatataagtcctggcaagataatattcagacagtgctgtttacattggtccaggccatggggcaggtgcgctcacaagaacacgtggaaatgctccaggaaatcactcctacactcaaagaacttaaaactcaaagccagagcatttataacaacttggtctccttcgccagtccactcgttacagacgctactaacgagtgctcttctccaacttcttcagcgacttatcaaccttcattcgcagccgccgtgagatcaaatacagggcagaaaactcagcctgatgtcatgtcccagaacgcccgaaaactgattcaaaagaatctggccaccagcgccgacacgccaccctcaacagtgcccgggacaggcaagtccgtcgcttgcagtccaaagaaggctgtccgcgaccctaagactggcaaggcagtacaagagaggaattcctatgccgtgtccgtgtggaagcgggttaaggcaaagctcgagggtcgtgacgtggacccaaatcgccgaatgtccgtggcagaacaagtggattacgttattaaagaggcaaccaatcttgacaatctggcccagctgtacgaggggtggacagcttgggtctag

SEQ ID NO: 205417 - DNA, 10986 bp, synthetic construct
  misc_feature 1..10986: note = Description of Artificial Sequence: Synthetic coding sequence
  source 1..10986: mol_type = other DNA
atgagccggcgggcccccggcagccggctgagcagcggcggcggcggaggaggtacgaagtaccctcggtcttggaacgactggcaaccacgcactgattccgctagcgcggatccagataacttgaaatattcgagtagcagggatcgcggcggcagctccagctatggcctccaaccttctaacagcgccgtcgtctctaggcaaaggcatgacgatactcgcgtgcacgctgacatacagaatgatgagaaggggggttatagcgtgaatgggggaagcggggaaaatacatacggaaggaagagtttggggcaagaattgcgtgttaataacgtgaccagccccgagtttacgtcagtgcagcacgggagtcgagcactggctaccaaagacatgcgtaaatcgcaggaaagatccatgtcctactcagatgaaagccggctaagcaacctcctccgcagaatcacgcgcgaagatgatcgagatcggaggctggccaccgtcaagcagttgaaggaattcattcaacaacctgagaataagctggttctcgtgaagcagttggacaatattttagctgccgtgcatgacgtcctaaacgagtccagcaagctgctccaagagttacgccaggagggagcttgttgcctgggtctgctctgtgcctcgctctcttacgaagccgagaaaatattcaaatggatcttttcgaagttcagctcatctgccaaagacgaggtgaaactgttatatctatgcgcaacttacaaggccctggaaacagtaggcgagaagaaggctttttccagtgtgatgcagttagtgatgacatcgctgcagagcatacttgagaacgtggatactccagagctcttgtgtaaatgtgttaagtgcatccttctagtggcccggtgttatccccacatattcagtactaacttccgagatactgtggacatcttagtgggttggcacattgaccacacccagaagccctcactgactcagcaggtttccggctggttgcagtcactggaacctttctgggtggccgacctggctttctctacaaccttgctggggcagtttcttgaggatatggaagcctacgctgaggatttgtcccacgtggcctccggggagagcgtagacgaagacgtgccccccccttccgtgtctctccccaagttagccgctttgctgcgagttttttctacggtggtgaggagtatcggggagcgtttttctcccattcggggccctcccattaccgaggcctacgtgactgacgtgttataccgagtcatgagatgtgtcaccgctgctaaccaggtgttcttcagcgaggcagttctgaccgccgccaatgaatgtgtcggggtgctgctgggcagcctagacccctccatgacaatccattgcgatatggttatcacctatggccttgaccagctagagaattgtcagacatgcggcacagactacatcatcagcgtcctcaacctactgactctcattgtggaacagatcaacacaaagcttccaagtagcttcgtggaaaagttgttcatccctagtagcaaactgctgtttctgaggtatcacaaggagaaagaagtggtcgcggtggcacacgccgtttatcaggcagttttaagcttgaaaaacattcccgtattagagacggcctataagttgatactgggcgagatgacttgtgccctgaataatcttcttcatagtctgcagctccccgaggcttgttccgaaattaagcacgaggccttcaaaaatcacgttttcaacgtggataacgcgaagttcgtggtaattttcgacctgtcagctctgaccacaattggaaacgcgaaaaatagcctgatcggaatgtgggctctctctccaacagtatttgctttgctttctaagaacctgatgatcgtccattccgacctcgccgtccacttccctgccatacagtatgcggtgctgtacacattgtacagtcactgcaccaggcatgaccattttatcagctcgtccctgtcatcttcgtctccaagcctgttcgacggggcagtaattagtacagttaccactgccaccaaaaaacacttttccatcattctgaatctgctcggcattctgttgaagaaagataacctgaatcaggatactaggaaactcctcatgacatgggctttggaagcagcggtgttgatgaagaaatctgagacatatgcccccctgtttagccttcccagtttccataagttttgcaaaggactccttgctaataccctggtagaggatgtgaatatctgcttacaggcttgcagttccttgcatgcccttagttcctctctccccgatgatcttctgcagcgatgtgttgatgtttgcagagtccagcttgttcattccggaacccgcattagacaggcctttggtaaattattgaagtcgataccgctggacgtggtgctgagtaataataaccacaccgagattcaagaaatttccttggcgttaagaagccatatgagcaaagcccccagcaacaccttccatccccaggacttctctgacgtaatatccttcattttatacggtaactctcataggacaggcaaagacaattggctggagcgactgttctacagttgtcagaggttggataagagagaccaatccactattcctcgcaatctcctgaaaacagacgccgtcctctggcagtgggccatctgggaggcagcgcagttcaccgttctctccaagctgcgcacccctctgggccgggcccaggataccttccagacaatagaaggtatcatcaggagtctggctgctcacactttaaacccagatcaggatgtcagccagtggaccactgcggacaacgacgaaggccacggcaacaaccagctgcgtctggtcttgctcctgcagtatctggaaaatctggagaaactaatgtacaacgcatatgaaggttgcgccaacgcgctgacctcgcctcctaaggtgattcggactttcttttacacaaacaggcagacgtgccaggactggcttacaagaatacggctgtccatcatgcgcgtgggcctgttggctggccagccagctgtaaccgttagacatgggtttgacctgctcacagaaatgaaaaccacttcgctgagccagggcaacgagctggaagtgacaatcatgatggtggtggaggcactctgtgagctgcactgtcctgaggcaatccagggcatcgccgtctggagttcaagcatcgtggggaaaaacctactgtggattaattcagtagcccagcaggctgaaggtcgattcgaaaaagcctctgttgagtaccaggagcacctttgcgccatgacaggcgttgactgttgtatcagctcatttgacaagtcagtgctgacactagctaacgccggacgcaactcagcatcaccaaagcatagcctcaacggggagtctcgaaagactgtgctcagcaagccgacagactcatctccagaagtaatcaactatctcggcaataaggcttgcgaatgttacatcagtatcgccgattgggctgcagttcaggagtggcagaacgctattcacgaccttaagaagtccacaagttccacatccctgaacctgaaggcagatttcaactacataaaatccctctctagttttgagagcggtaaattcgtggaatgtacggaacagctggagcttcttcctggtgagaacataaatttgcttgcgggcggaagcaaggagaagatcgatatgaagaagctgctgcccaatatgttgtctccagatcccagggaactccagaaatctatcgaggtgcaattgctccggtcctctgtctgtctcgccaccgccttaaaccctattgaacaggatcagaagtggcaatctattacagagaacgtagtaaagtacctgaagcagacctcccgaatcgcgattgggccactacgactgtccaccttaactgtaagccagtccctgccggtactctccacattacaactttactgtagcagcgctctcgaaaacacagttagtaatcggctttccactgaggattgtctgatcccgctcttctctgaggcactaaggtcctgcaagcaacacgatgtccggccctggatgcaggcactccgatatacaatgtatcaaaatcaacttctggagaagatcaaagagcaaaccgttcctataagaagtcatctcatggagctgggccttacagcggccaagttcgcgcgcaaacgggggaacgtaagcctggccacacgattattggcccaatgtagcgaggttcagcttgggaagacaacaaccgcgcaggatctagtgcagcattttaagaaactgagcactcaggggcaggtggacgagaaatggggaccggagctagatatcgagaagactaagcttttatatacggcgggccagtctactcacgcaatggagatgcttagcagctgcgccatctcattctgcaaatctgtgaaggccgagtacgctgttgctaaaagtatcttgacccttgcaaagtggatacaggctgagtggaaggagatcagcggacagctaaagcaggtctacagggctcagcaccagcagaattttacaggcctttccacactgtccaagaacatcctcactctgatcgagctgcctagcgtgaacaccatggaggaggagtaccctcgaattgagagcgaatctaccgtccatatcggcgtgggtgaacctgactttatcctgggccagctctatcacttgtcttctgtgcaagcacctgaggtcgctaaatcttgggcagcactggcatcttgggcctaccgctggggccggaaggtagtggacaacgcctcacagggcgaaggggtgcgattgctaccccgcgagaaatcggaggtgcagaatcttttacctgataccatcacagaggaggagaaggagcggatctatggcattcttggccaggccgtatgcagacctgcagggattcaagacgaggatatcactcttcaaataaccgagtctgaggacaatgaggaggatgatatggtagacgtgatttggagacagctcatctcctcgtgcccatggctgagtgagcttgacgaatctgccacggagggcgtgatcaaggtgtggagaaaagtggtcgaccggattttctctttgtacaagctcagctgctccgcctactttaccttcttgaaactgaatgccggccaaatcccactggacgaagacgaccctcgtctacacttatctcatagggtggagcaatccactgatgacatgatcgtgatggcgacacttcgactattacggctactcgtcaagcacgccggtgagctaagacagtacctggaacacggactggagacaacaccaaccgccccatggcgggggatcattcctcagctgttcagtcggctaaaccatcccgaagtgtatgttagacagtcaatctgtaacctgctatgtcgtgtggcgcaggatagccctcatctgattctctatcccgcaatcgtcgggaccatctctctctccagtgagagtcaagcgtcaggcaacaaattttccaccgctatccctaccctccttggtaacattcagggggaggagctgctcgtgtccgaatgtgaaggcgggagtccccctgccagccaggactcgaataaagatgaaccgaagtcgggattaaatgaggatcaggccatgatgcaggactgctactccaagattgttgataaattgagcagcgctaatccaacaatggtcctgcaggtccaaatgctcgtcgcggagttgagacgcgtgacggttctgtgggatgagctctggctcggcgtcttgctgcagcaacacatgtatgtactcagacgtattcagcaacttgaggacgaagtaaagcgggtgcagaataacaacacccttaggaaggaagagaaaatagccattatgcgcgaaaagcacacagccctgatgaaaccgattgtcttcgccctcgaacacgtcaggagtatcactgccgccccagccgagacacctcatgaaaaatggtttcaagacaattatggcgacgccatagagaatgcactcgagaaactgaagacgccgctgaaccccgccaaacccggctcttcctggataccttttaaagaaataatgttaagtttacagcagcgcgcccagaaaagggcctcatatatcctgcggctagaggagatctcgccttggttggccgctatgacaaatactgaaatagcacttcctggtgaagtgagcgcccgggacacggttactatccacagcgtgggcgggaccattactatattgccaacaaaaaccaagccaaaaaaattactttttctggggtcggacggaaaaagttatccgtacctctttaagggcttagaggacctgcatctcgatgagcgcatcatgcagtttctgagcatcgttaacaccatgttcgccaccattaatcggcaggaaacacctaggtttcatgccaggcactactcagttacccctctaggaacaaggtctggccttattcagtgggtggacggagccacccccctgttcgggctctataaaagatggcagcagagagaagcggctctacaggcccagaaggcccaggattcctatcagacgcctcagaacccaggaatcgtacctagaccttctgagctgtactatagtaagattggccctgcgctgaaaactgttggactgagcctggacgtctcgaggagagactggcctctgcacgtcatgaaagccgtgctcgaggaattgatggaggcgactcctccgaatctgctcgcgaaagaactgtggagcagctgcactaccccggacgaatggtggcgtgtgacacagagctacgctaggtctaccgctgtgatgtccatggtgggctatataatcggcctaggggatcggcatctggacaacgtccttattgacatgacaaccggcgaggtcgtacatatcgactacaatgtctgcttcgaaaagggcaagagccttcgggtgccggagaaggttcccttccgcatgactcagaatatagaaactgcactcggcgtgaccggggttgaaggcgtgttccgcctctcatgcgagcaagtcctgcacatcatgaggagggggcgcgaaaccttgctgactctactcgaggcgttcgtgtatgatccactggtcgattggacagccggaggcgaggctggattcgccggagccgtttatgggggcggtggacagcaggccgagtcaaaacagagcaagagagaaatggagcgagagattacaagatcactcttttcatctcgtgtcgccgagatcaaggtgaactggtttaaaaatcgggatgaaatgctggtcgtcctgcccaaactggacggctctctggatgagtacctctccctccaggagcagctgaccgatgtcgagaagctccaggggaagctactcgaggagatcgaatttctggagggcgctgagggcgtagatcacccatcccatacgctgcagcaccgttattccgaacacactcagttacagacccaacaaagggcggttcaggaggccatccaggttaaattaaacgagtttgagcagtggattacacactaccaggccgcatttaacaatctcgaagccacccagctggctagcctgctgcaagaaataagtacccagatggatctgggtccaccgtcctacgttcccgctactgcttttcttcaaaacgccggacaagcccatttgatctctcaatgtgagcagctcgagggggaagtgggggccctcctccagcagaggcgctctgttttgcggggttgcttagaacaattacaccactacgcaaccgtggcactgcagtatccaaaggctatttttcagaaacatagaatagagcagtggaagacttggatggaggaactgatctgcaatacgaccgtcgagaggtgccaggagctctatcgaaaatatgaaatgcagtacgccccgcagccaccccctactgtttgccagtttattaccgccacagaaatgaccttgcagaggtacgccgccgatatcaactcgcgcttgattcggcaggtggaacggctcaagcaagaggccgtcacggttccagtgtgtgaggaccagctcaaggaaatagagcggtgcataaaagttttcttgcacgaaaacggagaagagggttccctgagcctggcctccgtcattatctcagcactgtgcacactgacaagacggaacctcatgatggaaggtgccgcgagctccgcgggtgaacagctagttgatctgaccagtcgcgacggtgcctggttcctcgaggaactctgctcaatgtcaggcaatgttacttgcctcgtccagctgctgaagcagtgccatttagtcccccaggacttagatattcctaacccaatggaagcctcagagacagtgcacctggctaatggcgtatacactagtttgcaggaactgaattctaatttcaggcagatcatttttcctgaagcgctgaggtgcctcatgaaaggagaatatacattggaatccatgctccatgagctcgacggtttgattgagcagactaccgatggggtgccccttcaaaccttggtcgagagtctccaggcctatctgcgtaacgctgccatgggactcgaggaggagactcacgctcactacattgacgtagcaaggttactacacgcacagtacggcgagctgatacagccacggaatggatcggtggatgagacacccaagatgtctgctggacagatgctcttggttgctttcgatgggatgttcgcacaggtggagacggcttttagtctgctggttgaaaagcttaacaagatggagatacccatagcgtggcgcaaaattgatatcatccgggaggcaagaagcacccaggtcaacttcttcgatgatgataatcatagacaagtgctggaagagatctttttcctaaagagactgcagaccatcaaggagttcttccgtctgtgtgggaccttctcgaaaactcttagcggatcttcctccttggaggatcagaacacagtcaacggccccgttcaaatcgtgaacgtgaagacgctgtttaggaattcttgcttctcagaagatcagatggcaaagccgataaaggctttcacagctgacttcgtgagacaactgctaatcggcctgcctaaccaggcgcttggcctcactctgtgttcattcatctcggcccttggtgtggatatcattgctcaggtagaggcaaaagatttcggagctgaatcaaaagtttcagttgatgacttatgtaagaaggccgtggagcacaacatccaaattggcaagttctcccagcttgtcatgaacagagccaccgtgctagctagttcctacgacaccgcatggaagaagcacgacctcgtaagaagactcgagacatctataagctcttgcaaaacatcactgcagcgggtccagcttcatattgccatgtttcagtggcagcacgaggatctgctcatcaacagacctcaggctatgagcgtcacccctcctcctaggagcgcaatcctaactagcatgaaaaagaagctgcataccttgtctcagattgagacttctattgccaccgtgcaagagaaactggccgccctggagtcttctatcgagcaacgtctgaagtgggcaggcggtgctaaccccgcactcgcaccagtgctgcaagacttcgaggccacaattgccgaaagaagaaacctggttctcaaagaatcacaacgagcgtctcaggtcacttttctgtgcagcaacatcattcacttcgagtctcttagaactaggacagctgaagccctgaatctagacgccgcactcttcgagttgattaagagatgccagcaaatgtgttcctttgctagtcagttcaatagttccgttagcgaacttgagctcagactactgcagcgggttgataccggcttagaacacccgatcggaagttctgagtggctcctgtcagcacataaacaactgactcaggatatgagcacacagagagctatccagacagagaaggaacagcagatcgaaaccgtctgtgagacaatccagaacctggtggataacattaagaccgtgctgacaggacataacaggcaactcggcgacgtgaaacaccttctgaaggctatggccaaggatgaggaggctgctctggccgatggggaggacgtgccttacgaaaattcagtgaggcagttcctgggcgaatataaatcctggcaggacaacatccaaacagtgctcttcactttagttcaggccatgggtcaggttcgatctcaagaacacgtcgagatgctacaggaaatcactcctacgcttaaagaactgaaaacccagtcccaatctatttataacaacctggtctcttttgcatcgcccctggtgaccgacgctactaatgaatgtagtagtccgacgagtagcgccacataccagccctcctttgcagccgccgtacggtcgaatactgggcaaaaaacccagccagatgtcatgagtcagaacgctcgaaagctgattcagaagaatttagcaaccagtgcagacacccccccatcgacagtgcccggtaccggtaagtctgtcgcttgctctcctaaaaaagctgtaagagaccctaagaccggcaaggctgtgcaagaaagaaatagttacgccgttagcgtatggaaaagagtgaaagcaaaactagaggggagagacgtggatccgaaccgcagaatgtccgttgctgagcaggtggactacgtcatcaaagaagcgacgaacctcgacaatctggcgcagctctatgaaggatggacagcgtgggtctag

SEQ ID NO: 205418 - DNA, 3051 bp, synthetic construct
  misc_feature 1..3051: note = Description of Artificial Sequence: Synthetic coding sequence
  source 1..3051: mol_type = other DNA
atgagccagggcccccccaccggcgagagcagcgagcccgaggccaaggtgctgcatacaaaaagactgtaccgagcagtggttgaagcagtgcacaggctcgacctgattctgtgtaataagacagcatatcaggaggtcttcaagcccgagaacataagtcttaggaacaaactgagggagctctgtgtgaaactgatgtttctccaccccgtcgattatggaagaaaagcagaggagttgctctggaggaaagtgtattatgaggtcatccagctcatcaaaacaaacaagaagcacatccattctagatccactcttgaatgtgcctatcggacacatctggtggccgggatcggtttttaccagcacctgctgctgtacattcagagccattatcaactcgagttacagtgttgcatcgactggacacacgtcactgaccccctgatcggatgcaagaagcctgtgtcagcttcaggcaaagaaatggactgggcacagatggcttgccacaggtgcctggtttatttgggtgatctctctaggtatcagaacgaactcgcgggagtggatacagagctgctggctgagaggttttactaccaagccttgtcagtagccccccaaatcgggatgccattcaaccagctcggtactttggccggcagcaagtactataacgtcgaggcaatgtactgctacctccgttgcattcaaagtgaagtgtccttcgagggagcatacgggaacctcaagaggctctacgacaaagctgcaaagatgtatcaccagctcaaaaagtgcgagactcgcaagctctcccctgggaaaaagcggtgcaaagacattaagagattattggtcaactttatgtacctgcagtcacttcttcaaccaaaatccagttctgtggactccgaactcacctcactgtgtcaatctgtacttgaggactttaatctctgtctgttctatctgcctagctccccaaatcttagccttgcatccgaagatgaagaagaatacgaaagcgggtatgcgtttcttccagacctcttgatttttcagatggtgattatctgcttgatgtgtgtccacagcctggagagagcagggtctaagcaatattccgctgctatcgcctttaccctggccctgttttcgcacttggtcaatcatgtcaacattcgcctccaagcagagctggaggagggtgagaaccccgtgcctgcatttcaatctgacgggactgacgagcccgagagcaaggaacccgtggagaaagaagaagaaccagatccggaacccccaccagttaccccccaggtgggtgaaggacgcaagagcagaaagttcagcagactgagttgtctgagacggcggcggcacccgccaaaggtgggggatgatagcgacctgagcgagggttttgagagcgatagttcccacgatagtgcacgcgcctcggaaggttccgacagcggaagcgataagtccctggagggcggggggacagcttttgatgccgagactgattcagaaatgaactctcaggagtctaggtctgatctcgaggacatggaagaggaggagggcacccgctcacctactctcgaaccccccaggggaaggtctgaggcaccagatagcttaaatggaccccttgggccaagtgaggcaagcatcgctagcaaccttcaggcaatgtccacacagatgttccagactaagaggtgttttcgtctagcacctaccttttccaacctgctcctgcagccaaccacaaacccccatactagcgcaagccacaggccatgtgttaatggcgacgtggacaagcccagcgagcccgccagcgaggagggctccgagagcgagggttccgagtcatccggccgctcctgtagaaatgaacggtcgattcaagagaagctgcaggttctgatggctgaaggtctgctcccagctgttaaggttttcctggactggctccggacgaatccagaccttattatcgtgtgcgctcagagcagtcaatctttgtggaaccgtctcagtgtcttactgaatctcttgcctgccgccggggagttgcaggaatcaggactggcactttgtcccgaggtgcaagacctccttgagggatgcgagctgcccgatcttccttcttctctactcctcccagaggacatggccctacgcaacctgcccccactgcgcgccgcccataggaggtttaactttgacaccgatcggcctctactgtcgacactggaggagtctgtggtacgcatctgctgtatccggagctttggacactttattgcaagactgcagggctcaattcttcagttcaacccagaagtcggaatcttcgtaagcatcgcccagtccgaacaggagagtctcttgcagcaggctcaggcacagttccgtatggcacaggaagaagctcggagaaatcggttaatgcgtgacatggctcagctgcggctgcagctggaagtaagccagctcgaaggatccctccagcagccaaaagctcagtcagccatgagcccttacttagttccagacacgcaagccctgtgtcatcatctcccagttatccggcagctggctacgtcaggacgcttcattgtgattatcccacgaacagtcattgatggactcgacctacttaagaaagagcaccccggcgccagagatggcattcgctacttagaagctgaattcaagaaaggtaacagatatatcagatgtcagaaggaggtgggcaaaagttttgagaggcacaagctgaagcgacaggacgcagatgcgtggacactgtacaaaattttagacagctgtaagcagttgacactagcccagggagccggcgaggaagacccatctggcatggtaaccattataactggactgcccctcgacaatccatcagttttgagtggtccgatgcaagcggcgctgcaggcggctgctcatgcatcagtggacattaaaaatgtcctggacttctacaagcaatggaaggaaatcggatag

SEQ ID NO: 205419 - DNA, 1125 bp, synthetic construct
  misc_feature 1..1125: note = Description of Artificial Sequence: Synthetic coding sequence
  source 1..1125: mol_type = other DNA
atgagccagggcccccccaccggcgagagcagcgagcccgaggccaaggtcctccacaccaaaagactgtaccgtgctgttgtcgaggctgtgcacaggctggatctgatcctctgtaacaagactgcataccaggaagtgttcaaacctgagaacatcagcctccgtaataagcttcgggagctgtgtgtgaaactgatgtttttacatcccgtggattatgggcgaaaggccgaggaactgctctggagaaaagtctactatgaggtgattcagctgattaagaccaataagaaacacattcattcgagaagcacactggaatgcgcataccgcacacacctggtcgccggcattgggttctaccagcatctgctgctgtacatccagagccactaccaactggaactgcaatgttgtattgattggacccatgtcacagaccctctgattggttgtaaaaagcctgtgagtgccagtggcaaagaaatggactgggcacagatggcgtgtcacagatgcttagtgtacctaggcgacctgtcgaggtatcagaacgagcttgcaggggtcgacactgaactgctggcggagcgattttattatcaggccctgtccgtcgccccacagatcggtatgcccttcaaccaactcgggacacttgctggctctaagtactacaatgtcgaggccatgtactgttacctacgctgtattcagtcagaagtgtcctttgagggcgcctacgggaatctcaagagactgtatgataaggccgcgaagatgtaccaccagcttaagaagtgtgaaacacggaagctgtctcctggtaaaaagaggtgcaaagatataaaacgtctcctggtcaattttatgtatctccagtcattgcttcagcctaagtcacgcggttgcacatcacattgccccacgtcggcgttatgtttaccattgagctccttccagggcagagaacaggcgccacccagggctgccgggtccctcgcttgcgcctccacggtgtcctgcgctcatcagccacaccggtgctgtgcgctgtgttcttggctactctgctgggaccggatgggatgccaagaagaaaagaaaggcggcgctgtgtag

SEQ ID NO: 205420 - DNA, 417 bp, synthetic construct
  misc_feature 1..417: note = Description of Artificial Sequence: Synthetic coding sequence
  source 1..417: mol_type = other DNA
tgattcatcgtgatcatcccccggaccgtgatcgacggcctggacctgctcaaaaaagagcatccaggagcgcgcgacggaatccggtacctagaggccgagttcaaaaaagggaatagatacatcagatgccaaaaagaagtgggaaaatctttcgagaggcacaaactcaagaggcaagacgccgatgcatggacactgtacaagattcttgattcgtgcaagcagctaaccttggcccaaggtgcaggtgaagaagacccgtcaggaatggtcactatcatcactggactccctcttgacaatccttctgtgctctcgggaccgatgcaggctgctctgcaggccgctgcgcatgccagtgtagatatcaagaatgtcctggacttttataagcagtggaaagaaattggctag

SEQ ID NO: 205421 - DNA, 3438 bp, synthetic construct
  misc_feature 1..3438: note = Description of Artificial Sequence: Synthetic coding sequence
  source 1..3438: mol_type = other DNA
atgctggtgaccgacctggagtacgccctggacaagaaggtggagcaagatctgtggaatcacgccttcaaaaaccaaatcaccaccctccaagggcaggcaaaaaatcgtgctaacccaaatcggtcggaagtgcaagccaatctgagcctcttcctggaggcagccagtggcttctatacccagctgttacaggaactctgtactgtttttaatgttgatctgccttgcagagtaaaaagttcacaattaggaatcatctccaacaagcaaacacatacttccgcaatcgtcaaaccccagtcgtcctcctgttcctacatctgccagcactgtttggtccatttgggagacattgccaggtatagaaatcagactagtcaagccgaatcatattaccgccatgctgcacaactggtcccctctaacgggcagccatataaccagctggcaatcctggcaagcagcaaaggtgatcacctaacaaccattttctactactgcagaagcatcgctgtcaaattcccttttcccgctgccagtacaaacctgcagaaagccctgtctaaggccctggaatcgagagacgaggtgaaaacaaagtggggggtctcggatttcatcaaggcttttataaagttccacggtcatgtctacctgtctaaatctctggaaaagttgagtcctctgcgggaaaaactggaagagcagtttaaaaggctgctgttccaaaaggctttcaatagccagcagctcgtgcatgttaccgtgatcaacttgttccagttacatcatctgcgtgatttcagtaatgagacagaacaacatacatatagccaggatgaacagctgtgttggacccagctgctggcattgttcatgtcctttctcgggattctgtgcaaatgtccactgcaaaatgagtcacaagaagagagttacaatgcctacccactgcctgccgtgaaggtatccatggactggctcagactgagacccagagtatttcaggaagccgttgtagacgaacgccagtatatctggccttggctgatatctctgctgaactccttccatccacacgaggaggacttgtctagcataagcgccacacctttacccgaggaattcgaattacagggcttcctcgcccttagacccagcttccgtaatttagatttctccaaaggtcaccaaggcataaccggtgataaagaaggccaacagcgaaggataagacaacagcgcctaatatctatcggcaagtggatcgccgacaatcaaccccgcttgattcagtgtgagaacgaggtgggtaaactgctatttatcaccgagattccagagctgatacttgaggacccttccgaagccaaggaaaatttaatcttgcaggagacctccgtgatcgaatcccttgcagccgatggtagtcctggcctgaagtctgtgctgtcaaccagtcggaacttgtcaaataattgcgatactggtgagaagccagtcgtcactttcaaggaaaacattaagacacgtgaagttaatagggaccaaggcagatccttccctcccaaggaggtgcggagagactactcaaagggtatcactgtgaccaagaacgacggcaaaaaggataataacaagcgcaagacagaaaccaaaaagtgcactcttgaaaagctgcaggaaactggtaagcagaatgtggcagtacaggtcaagagccagacagagctgaggaagaccccggtgtccgaagccagaaagacccccgtcactcagacgcccacacaagcaagtaattcacagtttatcccgatacatcacccaggcgcttttcccccccttcccagcagaccaggctttcccccaccaacatacgtgatacctccccctgtggctttttctatggggagtggttacacgtttcctgcaggggtgtctgttcccggaacctttctgcagcctactgcccactcccctgctggaaaccaggtccaggctggaaagcagagtcatatcccttacagccagcagaggcctagtggcccgggccctatgaaccaaggcccccagcagagccaacctcctagccaacagcccctgacctctttgcccgcccagccaactgcacagtccactagtcagttgcaggttcaggctcttacccagcagcagcagagccccaccaaggctgttcccgctctgggaaagagccccccacaccactccggcttccagcaatatcagcaggcagacgcctcgaagcagttgtggaatcccccacaggtacaaggccctctaggtaaaataatgccagtcaaacagccttactatctgcagacacaggaccccatcaagctctttgagccgtctctacaacccccagttatgcagcaacaacctctggagaagaaaatgaagcctttccccatggagccctacaatcataatcctagcgaagtgaaggtgcccgaattttactgggactcctcctacagcatggccgacaaccggtctgtaatggcacagcaggccaacatagatcggcgcggcaaacggagccctggagtctttagaccagagcaggatccagtcccgcggatgcccttcgaggatccgaagtctagccctctcctgcccccagacctgctgaaatctctagccgcattggaagaggaagaagagctgatttttagtaacccacctgatctctatccagctctcttggggcccctggcgagcctgcctgggcgaagtctgtttaagtccctattagagaaaccttccgaacttatgtcacactcctcctccttcttgtcactcacgggctttagtttgaatcaagaaaggtatcccaacaattcgatgttcaatgaagtgtacggaaagaacctcacgtcatcatcaaaagctgaactgagtccctcaatggccccacaggagacctccttatactcattgtttgagggaactccctggtcaccctccctgccagcaagcagtgaccattcaacccctgcgtctcagagcccacattcctccaatccttcttccctaccttcatcgccacctacccacaatcacaactcagtaccattctctaattttggaccgataggcacccctgacaaccgtgacagacggacagctgaccgctggaagaccgacaagcctgccatggggggcttcggcatagattacctgagcgcaacttcttccagtgagtctagctggcaccaggctagcactcccagcggcacttggaccggccacggtccgagcatggaggacagctcagccgtgctcatggaatcactcaaatccatttggtcaagtagtatgatgcacccagggcccagcgcccttgagcaactcctgatgcaacagaaacagaagcaacagcgtggtcaggggacaatgaaccctccacattag

SEQ ID NO: 205422 - DNA, 3414 bp, synthetic construct
  misc_feature 1..3414: note = Description of Artificial Sequence: Synthetic coding sequence
  source 1..3414: mol_type = other DNA
atgagcctgcagagcgcccagtacctgcggcaggccgaggtgctgaaagcggatatgacagacagcaagttaggcccagccgaggtctggacatcccgtcaggccctgcaagacttgtaccagaaaatgctggtgacagatctcgaatacgcccttgataaaaaggtggaacaggacctgtggaatcatgcctttaaaaaccagatcactacactccaaggccaggcaaaaaatcgcgccaacccaaatagatcggaagtccaggctaatctgtcattattccttgaggccgcctccgggttctatacacagctgcttcaagaactttgcacagtctttaatgtggacctcccgtgtcgggtcaagtcctcccagctaggaatcatcagcaacaagcagactcatacgtcggccatcgtgaagcctcagtcttcatcatgctcttatatttgtcagcattgtctcgtccacctgggtgacatagctcggtaccggaaccaaacgagccaggccgagagttactatcgacacgcagcgcaactcgttccctctaatggccagccatataatcagctagctatactagccagttctaagggggaccacctaaccacaatcttttactactgcaggtcgatcgctgtgaaatttcccttccctgctgcgtcaactaatctgcaaaaagcactctcaaaggctctcgagtctagggatgaagtcaagacaaagtggggagtgtccgattttatcaaggcatttatcaaatttcacggtcatgtatacctcagcaaatcgcttgagaaactgtctcctcttcgcgaaaaattagaagagcaatttaagaggcttctctttcagaaagcctttaactcccagcagctcgttcatgttactgttataaacctcttccagctccatcacctgcgggattttagtaatgaaaccgagcagcacacctacagccaggacgagcaactgtgctggacccagctgctggctctgttcatgtcttttcttggcattctctgcaagtgccccttgcagaatgaatcgcaagaggagagttacaacgcatacccactgcccgctgtgaaagttagcatggattggctacgtctgcgcccacgggttttccaagaggctgtggttgacgagaggcagtatatctggccttggttgatctctctgctcaattccttccatccccatgaggaggatctgtcctccatttccgccacccccctacctgaagaattcgagttacaggggttcttggccttgcggccttcctttcgaaacctcgacttctccaagggccatcagggaatcacaggcgacaaggagggccagcaaagaagaattcggcagcaaaggctgatatctatcggtaagtggattgccgataatcaacctcggctgattcaatgcgagaatgaagtcgggaaattgctgttcatcactgagatcccagagctgatcctggaggaccccagtgaggccaaggaaaatctgattcttcaggagacctcagtgatagagtccttagccgctgatggctcgccaggcctgaaatctgtcctcagtacttctcggaatctgtccaacaattgtgacactggagagaaaccggtagtcacttttaaagagaacataaagaccagggaagtcaatcgggaccaggggagatcatttccacctaaggaggtgcggcgagactactctaagggtatcacggtcactaagaatgacggaaagaaagacaataataaacgcaaaactgaaacaaaaaaatgtacactggagaaattgcaagaaactggaaagcagaatgtagccgtacaagtcaagtcccagactgagctgcgtaaaactccggtgtccgaagccaggaagaccccggtgacccaaacgccaactcaggcaagcaactcccagttcatcccaattcaccatccaggcgcttttccaccattgccttcccggcccgggtttcccccacccacttacgtgatcccccctcctgttgcattcagcatgggttccggatatacttttcccgccggggtgtcggtgccgggcacgtttctgcaaccaaccgcccactccccggcagggaatcaggtacaggctgggaagcagagccatattccttattcacagcaaaggcctagtggcccagggccaatgaaccagggccctcaacagtcccaacctccgagccaacaaccactgacttcactgcccgcccagcctaccgcccaaagcaccagccaactgcaggtccaggctctgactcagcagcagcagtccccaaccaaggcagtccctgccctcggtaaaagtccaccacaccattccgggttccagcaatatcagcaggctgacgcctctaaacaactgtggaaccctcctcaggtccaggggcccctcggaaaaattatgccagtgaaacagccatactaccttcagacacaggacccaattaaactttttgaaccatctttacagccccctgttatgcagcagcaacctctagaaaagaaaatgaagcctttccccatggagccttataaccacaatccatccgaggtgaaggtgcccgagttctactgggactcctcatacagcatggctgacaatcgctctgtgatggcccagcaggcaaacatcgatcgtcgcggcaagcgatctcctggcgtgttcagacctgagcaggacccagttccaaggatgcctttcgagaagtctctgttagaaaagcccagtgaactgatgtcccactccagcagctttctgagtcttaccggatttagtctaaaccaggaacggtaccccaacaattcaatgttcaatgaagtttacggaaagaatctcactagttcatccaaggcagagctctcaccaagcatggctccgcaggagacatcactgtatagcctgtttgagggaacgccttggagtccaagtttgccagcttcttccgaccactcaacaccagcctctcagtctccgcatagtagtaacccatccagccttccctcatcccctcccacccataaccataacagcgtcccattcagcaatttcgggccaatcgggacaccggataacagagatcgcaggactgctgaccggtggaagacagataaacccgctatggggggatttggcatcgactacctgtccgccacctcttcaagcgagtcatcttggcaccaggcctccaccccctctggcacctggacagggcacggcccctcaatggaagattcttccgcggtactgatggaatccctcaaatccatttggtccagttcaatgatgcatccggggcccagcgcactggaacagctgctcatgcaacagaaacagaagcaacagcgcggccagggcactatgaaccctccccattag

SEQ ID NO: 205423 - DNA, 3513 bp, synthetic construct
  misc_feature 1..3513: note = Description of Artificial Sequence: Synthetic coding sequence
  source 1..3513: mol_type = other DNA
atgcggaactggatgttcctgcagatcgtgatcgtgggcgagaacgtttcgttcaaaagtcagatgcgaacagaaaatttaaaatcagaagagcatctcaaaagctcaaacatccggcaggcggaagtccttaaggcagatatgacagacagcaaactcggacctgctgaggtgtggaccagtaggcaggcacttcaggacctttaccaaaaaatgctcgtgactgatctggaatacgcactcgacaaaaaagtcgagcaggacttatggaaccatgccttcaaaaaccagataacgacgctccagggccaggctaagaatcgggccaaccctaacagatccgaggttcaagccaacctctccctcttcctcgaagcagccagcgggttttacacccagttactgcaggagctgtgcacagtcttcaacgtggatctgccctgtcgcgtgaagtcctcacagttgggcatcatctcaaacaagcagacacacacatcagcaattgttaaaccacaatcttcctcctgttcttacatatgtcagcactgcctggttcacctaggcgacatagcccgctatcggaatcagacctcccaggctgagtcttactaccggcatgcggctcagttggtcccctcaaacgggcagccttacaatcaactcgccattctggcctcatcgaagggggatcacttaacaacaatcttttactattgccggtccatcgccgtgaagttcccattccctgcagcctccactaatctgcagaaggccctaagcaaggccctagagtcaagggatgaagtgaaaaccaagtggggagtctctgactttatcaaggcctttattaaattccacgggcacgtgtacctgagtaaatccctggagaaactcagccccctgcgggagaagttggaagaacagttcaagagactgctcttccagaaagctttcaactcccagcagttagtacacgtgaccgtaattaatctgttccagctccaccacctgagggatttctcaaacgagaccgaacaacatacatacagtcaggacgaacagctatgctggactcagctgctggcactctttatgtcatttctagggatcttatgtaaatgtcccctccagaatgagtcacaggaggagagctacaatgcgtacccgctacccgccgtgaaagtctccatggactggctccggctgcggcctagggtcttccaggaggcggttgtggatgaaagacagtatatctggccctggctcatctcccttctcaactccttccatccacacgaagaggacctctcgagcattagcgctacccctttacctgaggaattcgagctgcagggatttctcgcattgaggccatcttttaggaatttggattttagtaagggtcatcagggtatcaccggggataaggaggggcagcagcgacggattcggcagcagcgcctgattagcattggaaagtggatcgccgacaaccagccacggcttattcaatgcgagaatgaggttggtaagctcttgtttattacagagatcccagagctcattctagaggacccatctgaagcaaaggaaaacctcattctgcaggaaacatcagtcatcgagtcacttgcagctgacggctccccaggtttaaaatctgtgctatctacatctcgtaacctgtctaataattgcgacaccggcgagaagccggttgtcaccttcaaagaaaatatcaaaaccagggaggttaaccgggaccagggccggtctttcccgccaaaagaagtaaagagccagactgagttgcgtaagacccccgtgtccgaggcaaggaagacgccggtgacacagacccccacacaggcctccaacagtcagtttatccccatccatcatcccggagcgttcccccccctgccctccagaccagggttcccccccccgacttacgtcattcctcccccagttgcctttagcatgggctccggctacacttttccagctggcgtctcagtccctggaaccttcctacagcctacagcccattcgcccgccggcaatcaagtgcaggcagggaagcagagtcatatcccttatagccagcagaggccttctggccctggcccgatgaaccaagggccccagcagtcccagcccccctcccagcagcccttgaccagtctgcccgcccagcccaccgctcagtcaacctcccagttacaggtccaggcactgacccagcagcaacagtcacccactaaagctgtgccagccttagggaaatcaccaccacatcatagtggtttccagcagtatcagcaggctgacgcttcaaagcaactatggaatcctccgcaggtccaaggcccccttggcaagataatgccggttaaacagccttactacctgcagacacaggacccaattaagctcttcgaacctagcctccagccccccgtaatgcagcagcaacccctggaaaagaaaatgaagccctttcccatggaaccgtataaccacaatccatccgaggtcaaagtaccagagttctactgggatagcagctattccatggcagacaataggagtgtgatggcgcagcaggctaatattgatagacgaggtaaacgaagccctggcgtgttcagacctgagcaggatcctgtacccagaatgcctttcgaagatcctaaaagcagtccgttactgccgcccgacctcctcaagtccctggcagctctggaagaggaggaagagctgatttttagtaatccaccagatctctatccagcactcttggggcctttggcatccttgcctggtagaagtctgtttaaaagcttactggagaaaccctctgagctgatgagccactcttcgtcttttttgtcactgaccggcttctcactgaaccaggagaggtaccccaataacagtatgttcaacgaagtatacggcaagaatctcacaagcagcagcaaggcagaattatcaccctccatggcaccccaggagaccagcctgtactccctatttgagggcaccccatggtccccgtctctgccagcttcctctgaccatagtactcctgcatctcaaagcccccactcctcaaaccccagctccctgccatcctcaccacctacacacaaccataacagtgttccattcagcaattttgggcccattggcacacctgataaccgtgacaggcgtaccgccgatcgctggaaaactgacaagcctgctatggggggcttcggcattgactacctgtccgcaaccagcagcagtgagagttcttggcatcaagcgtcaacacctagcggtacctggactggtcacggaccctctatggaagactcctctgccgtgttgatggagagcttgaagtctatttggtcatcttccatgatgcatccaggcccctccgcactggagcagctgctaatgcagcagaaacaaaaacagcagcgtgggcagggtactatgaatccgccacactag

SEQ ID NO: 205424 - DNA, 2274 bp, synthetic construct
  misc_feature 1..2274: note = Description of Artificial Sequence: Synthetic coding sequence
  source 1..2274: mol_type = other DNA
atgctggtgaccgacctggagtacgccctggacaagaaggtggagcaggatctttggaatcatgcattcaagaaccagattactacactacaggggcaggccaagaaccgggccaatcccaaccggtccgaagtgcaggctaatctctctctcttcttggaggctgcctcaggtttttatactcagctcctccaggagctgtgtactgtgtttaacgtcgatctgccctgtagggtcaagtcttcccaactcggcatcatctccaacaagcaaactcatacctcagcaattgtcaaaccacagtcatctagttgttcctacatctgccagcactgcctcgtccacttaggagacatagcccggtacaggaatcaaacttcgcaggcagagtcctactaccggcacgccgctcagctggtcccatccaacggccaaccatataaccagttggccattctcgccagctccaaaggggatcatctgacaaccattttctattactgtagatccatcgctgtgaagttcccatttcccgcagcaagcacaaacctacaaaaagctctttcaaaggcgctggagagtcgggatgaagtgaaaacaaagtggggtgtttcagactttattaaggcgtttatcaagttccatgggcacgtgtatctgtccaagagcctggaaaagttatcccccctgagagagaaacttgaggaacagtttaagcgactcttgtttcagaaggcttttaactcacaacagcttgtgcacgttacagtaattaacttgtttcagttgcatcacctacgggatttctcaaatgaaacagagcaacacacctactcacaggatgagcagctgtgttggacacagttgctagctctctttatgtccttcctcggaatcctttgcaaatgtccactgcagaatgaaagccaagaagaatcatataacgcctatccgcttccagcggtgaaggtgagcatggactggctgcgacttcggccccgagtattccaagaggcggtagtggatgagcgacaatacatctggccctggctgattagtctgctcaattcgtttcacccccatgaggaagatctttccagcatctccgccacgccgttacctgaggagtttgaactgcagggcttcttggccctgcggcccagtttccgcaaccttgacttctccaaggggcatcaggggattacaggcgacaaagagggacagcagagacgtattcgtcagcagcgacttatttcaatcgggaaatggatcgcggataaccagcctcgactgatccagtgcgagaacgaagtggggaagctgctttttatcaccgaaatccccgaattgatcttggaagatccgtcagaagccaaggaaaacttaatactgcaggagactagtgtgatcgagtctcttgcggccgacgggtcccctggactgaagagtgttttgagcacctctcggaacctgagcaataattgcgatacaggcgaaaaacctgtcgtcacttttaaagagaacatcaagaccagggaggttaaccgggaccagggccgctcctttcctcccaaggaagtgaagtctcaaaccgaactccggaagaccccggtgagtgaggcccggaagactcctgtaactcagacacccacacaggcttcgaattcgcagttcattccaattcaccatcccggggccttccctcctctgccaagccggccagggttccctccccccacctatgtaatcccaccacctgtggcctttagcatgggatcagggtatacattcccggctggcgtgtccgtccctggaacgtttctccagccaaccgcacactccccagctgggaatcaggtccaagccggcaagcagtcccacataccttacagtcagcaaaggcccagtggtcccggtcccatgaaccagggtccgcagcagtcccaaccccctagtcagcagcccctcacatccctacccgcccaacctacagcccaaagtacatctcagctgcaggtccaggcactgacacagcagcaacagagcccgaccaaggccgtcccagcactagggaaatctcctccacaccactcaggctttcagcaataccagcaggcagatgcatctaagcagctgtggaacccccctcaggtacagggaccactgggcaagatcatgcccgtcaagcaaccctactatctgcagacccaggatccaatcaagctgtttgaacctagccttcagcctcctgtgatgcaacagcagcccttgtag

SEQ ID NO: 205425 - DNA, 3150 bp, synthetic construct
  misc_feature 1..3150: note = Description of Artificial Sequence: Synthetic coding sequence
  source 1..3150: mol_type = other DNA
atgctggtgaccgacctggagtacgccctggacaagaaggtggagcaggatctgtggaatcacgcctttaaaaaccagattaccacactccaaggccaggccaaaaacagagccaacccaaacagatcagaggtgcaagcgaatctaagtctctttttggaggccgcatcagggttctacacgcagttactgcaggagctatgcacagttttcaacgtggaccttccctgtcgggtgaagagttcccaactgggcatcatcagtaataagcagacccacacctctgccatcgtcaagccgcagagcagctcttgttcgtacatttgccagcactgcctagtgcatttgggcgacatcgcgaggtatcgcaatcagactagccaggccgagagctactaccgtcatgccgcccagctggtgccctccaatggccagccatacaatcagctggctatccttgccagttcgaaaggagaccatctgacaacaattttctactattgtcggtccatagcagtgaagttccccttccccgctgcaagcactaacctgcagaaggccctttcaaaagccctcgagagccgcgacgaagtgaagacgaaatggggagtgtcagacttcatcaaagcattcatcaaattccacggccacgtctatttaagtaagtctctggagaaactgagtccactgagggagaagttggaggagcagttcaaaagactcctctttcagaaggcctttaattctcagcagttggttcatgttactgtcataaacctgttccaattgcatcaccttcgggacttctcaaatgagacggagcaacacacgtattcccaggacgaacagctctgttggacacaactgctggcattgttcatgagctttctggggattttatgcaagtgtcctttgcagaacgaaagccaggaggagagctacaatgcttaccctctccctgccgttaaagtctccatggattggctaaggctaagacctcgggtgtttcaggaagccgtggtggacgagcgacagtatatttggccttggcttattagtctgttgaacagtttccacccccatgaagaggatctctctagtatcagcgccactcctttgccagaggagttcgagctgcaggggttcctggccctcaggcccagcttccgaaaccttgatttttctaagggacaccagggtatcactggggacaaagaaggccaacagcgaaggattaggcagcaaaggctgatttctattggaaaatggatcgcggacaatcagccaagactcattcagtgcgaaaatgaagtcgggaagttgcttttcatcacggaaatcccagaactgattttggaggaccccagcgaggccaaagagaacctgattctgcaggagacctccgtgatagaatcccttgctgccgacggtagcccggggctgaagagcgtcctttctaccagcaggaatctgtctaacaattgtgatactggggagaagccagttgtgactttcaaggagaacatcaaaacccgggaggttaaccgcgatcaaggaaggtccttccctcccaaagaggtcaaaagtcagaccgaactacgcaagacccctgttagcgaggccaggaaaactccggttacccagactccaacccaagcgtctaattcccagttcatcccgatacatcatcctggagcttttccacctctgccgagtcgacccggatttcctcctcctacatacgtgattccaccgcccgtggcgtttagcatgggatcaggctataccttcccagctggggtgtcagtgcctggtacctttttacaacctacagctcattcaccagccgggaatcaggtgcaggctggtaaacagagtcacatcccctactcgcagcagaggccctctgggcccgggccaatgaaccaggggcctcaacagtctcagccgccctcacagcagcccctgactagcctgcccgcgcaacctaccgcccagagcacctcccagttgcaggtacaggccctcactcagcaacagcaaagtcccacaaaggcagtccccgcactcgggaaatcacccccccaccacagcgggttccagcaatatcaacaggctgatgcctctaaacaactctggaacccaccccaggtgcaaggccctctggggaagatcatgcccgtcaagcagccatattatctccagacccaggatcctatcaaactcttcgaaccaagtctccagccgcctgtcatgcagcagcaacctctggagaaaaaaatgaagccctttcctatggaaccatacaaccataacccgtctgaggtgaaagttcctgagttctactgggactcctcatattccatggctgacaatagaagtgtgatggctcagcaggctaatattgacaggagaggaaagcgaagcccaggagttttcaggcctgagcaagatccggtccctaggatgcctttcgaaaagtccctcctcgaaaaaccaagcgagttgatgtcccactcttcttcctttctgtccctgacaggattcagcctcaatcaggagagatatccaaacaactcgatgttcaatgaggtatatgggaagaacttaactagctcgtccaaagcagagctcagtccctcaatggctccccaagaaacatcactctattctctgtttgaaggaacaccttggtctccaagtctgcccgcatcaagcgaccactcaaccccagcttcacaatcccctcattcttctaatccaagcagcctgccgagcagtcctccaacacacaaccataacagcgtgccattttctaactttggacccatcggtacacccgataatcgagatcgacgcaccgccgatcgctggaaaaccgacaagcccgcaatgggaggttttggcatcgattacctgtccgcaacttccagttccgagtcctcttggcaccaggcaagcacacctagcgggacatggacgggtcacggcccttcaatggaggattctagtgccgtccttatggaatccctgaaatcaatttggtcttctagcatgatgcaccccgggccgagcgcactggagcagctgctgatgcagcagaaacaaaaacagcagcgcgggcagggcacaatgaatccacctcattag

SEQ ID NO: 205426 - DNA, 3537 bp, synthetic construct
  misc_feature 1..3537: note = Description of Artificial Sequence: Synthetic coding sequence
  source 1..3537: mol_type = other DNA
atgagcctgcagagcgcccagtacctgcggcaggccgaggtgctgaaggctgacatgaccgattctaagcttggccctgccgaggtgtggacatcccgtcaggccctgcaggatctgtaccaaaaaatgcttgtcactgatttggaatacgctttggataagaaggttgagcaggacctgtggaaccacgcattcaagaaccagatcacaaccctccaggggcaggctaaaaaccgggctaatcctaatagatcggaggtgcaggccaatctgtcactgtttcttgaagctgcatccggcttctatactcagctgttgcaggaactgtgtaccgtctttaacgtcgatctgccatgtagggtcaaatcatcccagctgggaattatctctaataaacagacgcacacatcagcaattgtgaagccccagtccagttcctgcagttatatttgccagcactgtttagtacatctgggtgacattgccagataccggaatcagacgtctcaggcagagtcatattatagacacgccgcgcaactggtcccaagtaacggtcaaccctataatcagctggccattctggcctctagtaagggcgaccacttaactactatattttattattgccggtcaatcgccgtaaagtttccgtttccagccgcgagcaccaacctccagaaagccttatctaaagccctggaaagccgcgatgaggtcaaaaccaagtggggcgtctcggacttcattaaggcctttattaagttccacgggcatgtctacctgagcaaatccctcgaaaagctgagtcccctgcgggagaagctggaagaacaattcaagcgcctgctttttcagaaggccttcaactcccaacaattagtgcatgtgacagtgattaacctgtttcagttgcaccacttgcgcgacttctcaaacgagaccgagcagcacacatattctcaggatgaacagctttgttggactcagttgctagccttgttcatgtctttcctgggtatcttgtgcaagtgcccattacagaacgaatcacaggaggaatcatataacgcctaccctctgccggcggtcaaagtttctatggactggctgcgacttcggcccagagtgtttcaggaggccgtggtcgatgagcgacagtacatctggccatggctgatttccctactgaattctttccaccctcacgaggaggatttgtcttcgatatccgccactccattacctgaagaattcgagttacagggatttctcgccctgaggccctcattccggaacctggacttcagcaagggccaccagggcatcactggtgacaaagaagggcaacagcgccgtattaggcagcagcggctcatctccattggcaagtggatagcagacaatcagccgaggcttatacaatgcgaaaatgaagttggcaagctcctatttattaccgaaattccggaacttattcttgaagaccccagcgaggcaaaagagaatctaattttgcaggagacttcagttatcgagagtctggctgcagacggcagtcctggactgaaatccgtactgtcgacctctcgaaacctctctaataactgcgatactggtgaaaaacctgtggtaacattcaaagaaaacattaaaactcgcgaagtcaacagggaccagggacgctcgtttcctccgaaggaggtgaaatcacagaccgaactgcgcaagaccccagtctctgaagctcgaaagacacccgtcactcagaccccgactcaggcatccaattctcagttcataccaatccaccaccctggcgcttttcctccactcccaagtcggcccgggttcccacctcccacctacgtgatcccaccacctgtggccttcagcatgggctctgggtacaccttccctgcaggtgtgagtgtgcccggaactttcctgcaaccaaccgcccacagcccagccggtaaccaagtgcaggccgggaagcagagccatatcccttactcccagcaaagacctagcggaccaggacctatgaatcaaggccctcaacagtcccagccaccttcccagcagccattgactagtttgccagcccaaccaactgcacaatctacctctcagctgcaggtccaagcactgacccagcaacagcagtctcccacaaaggctgtcccagccctgggcaaatctcccccccaccactcaggcttccagcagtatcagcaggccgacgcaagtaagcagctctggaatcccccacaagtgcagggtcccctgggaaagattatgccagttaaacagccatattacttgcagacacaggatccaatcaaactcttcgaaccctccctccagcccccagttatgcagcagcaaccactcgagaagaagatgaagcccttccccatggaaccttacaaccacaacccctccgaggtaaaggtgcccgagttttattgggatagtagctattcaatggcagataaccgctccgtaatggcccagcaggcaaacattgatcggcgcgggaaaaggtccccaggcgtttttagacccgagcaggatccagttccccgtatgcccttcgaagaccccaagtcctcgccactgcttccccctgaccttctgaagagcctggccgcccttgaagaggaagaggagctgatcttcagcaaccctcccgatctctatcctgccctgttagggccactcgccagcctccctgggagaagcctgtttaaatctttgctcgaaaaacctagtgaactgatgtcccactctagttctttcttaagcctgaccggtttcagtcttaatcaggaaagatacccgaataactccatgtttaatgaggtatatggtaaaaatctcacatcaagttcgaaggcggaattgtcgccaagcatggccccgcaggaaacatcactgtacagcctattcgaagggacaccttggagtcccagcttgcctgccagttccgaccactccaccccggcatcacagtccccccattcctcaaatccgagctctctgccaagctcaccccccacccacaaccacaattccgtaccattctccaatttcggtccaatagggacacccgataacagagaccgacgaacagccgatcgctggaagacggacaaacccgccatgggagggttcggtattgattatctctccgctacttcaagtagcgaatccagctggcaccaggcgtctacaccgtcagggacatggactggtcatgggccttcaatggaagattccagcgccgtccttatggagagcctcaagaagcaacaacacggtgtgcagcagctgggcccaaagagacagagcgaggaagaagggtccagttctatctgcgtggcgcaccgaggcccgagacccctccccagttgcagcctccccgcctcaacatttcgggttaaattcaaggcagcaaggacatgcgcccaccaggctcagaagaagaccagacggcggcctttttggaaacggagaaagaaggggaagtag

SEQ ID NO: 205427 - DNA, 3276 bp, synthetic construct
  misc_feature 1..3276: note = Description of Artificial Sequence: Synthetic coding sequence
  source 1..3276: mol_type = other DNA
atgagcctgcagagcgcccagtacctgcggcaggccgaggtgctgaaggccgatatgaccgactccaaactaggccccgctgaggtctggacaagcaggcaggcactccaggatctctatcagaagatgctggtgacggatctggaatacgcgttggacaaaaaggtggaacaggacctgtggaatcacgcatttaagaaccagattaccacactccaggggcaggccaaaaatagggctaaccccaacagatctgaagtccaagcaaacctcagcctgttcctggaagccgcatcaggcttttatactcagctcctgcaggaactttgcacagttttcaacgttgacctgccctgcagagtgaagtcaagccaactcgggataatttccaacaaacagacccacacgtccgcgattgtgaaacctcaaagtagctcttgttcgtatatatgtcagcactgtttggtgcatttgggagacatcgcgcggtaccggaaccaaaccagtcaggcggagagttactaccgacacgccgctcagctggtcccctcaaatgggcagccatataaccagctcgcaatactagcgagctctaaaggcgaccatctgaccacaattttttattactgcaggtcgatcgcggtaaaattccccttcccagcagcgtccactaacttgcagaaagctctgtctaaagctcttgagagccgtgatgaggtgaagactaagtggggtgtcagtgatttcataaaggcattcattaaattccatggacatgtttacctcagcaagagcctcgagaaactcagccccctgcgagaaaagcttgaggagcagtttaaaagactgcttttccagaaggcatttaatagccagcagctcgtacacgttactgttattaatcttttccagttacatcatctacgggacttcagtaatgagacagagcaacacacgtacagccaggatgagcagctttgttggacccaactgctggcactgtttatgtccttcctgggaatcctgtgtaaatgtccattacagaacgaatctcaggaagagagttataatgcttacccactccccgccgtgaaggtgtctatggactggctgcggctcaggccgcgggtctttcaggaggcggttgtcgatgagaggcagtacatttggccttggttgataagcttattaaatagtttccatccccacgaggaagaccttagttctatttcagctacacccctgcccgaggagttcgaactgcagggattcctcgctctgcgccctagctttcgtaatttggatttcagcaaaggccaccagggaatcactggagacaaagaagggcagcagcgtagaatccgtcagcagcggttaatctctattgggaagtggattgcagacaaccaaccgcgcctgatccagtgcgagaatgaagtcggaaagctgctttttatcacggagatcccagaactgatactggaagacccatctgaagctaaagaaaacctcattctgcaggaaacatctgtgatagagagcctggcggcagatgggtctcctggtcttaagtcagtgctctccacaagtagaaacctgagcaataactgcgacacaggggaaaagcctgtagtcacctttaaggagaacatcaagactcgagaggtaaatcgagaccagggtagatcatttccacctaaagaggtgaaaagccagactgagctgcgcaagacacccgtcagtgaggcccgcaagacccctgtgacccagacccccacacaagcttcaaattcccagtttatcccaatccaccacccgggtgcattccccccactacctagtagaccgggatttccacctcctacctacgttatcccacctcctgtggccttctcaatgggttccgggtacacgtttcctgcaggtgtgagcgtccctggcacgttcttacagccgaccgcgcacagccctgccgggaatcaagttcaggctgggaaacaaagtcatataccctattctcagcaacgcccctcagggcctggccccatgaatcagggccctcagcaaagtcagcctccctcacaacagccactgaccagtctgccagctcaaccaaccgcccagtcaacatcccagctacaggtgcaagctttgacccagcagcaacagagcccaaccaaagcggtaccggccctgggcaagtccccgcctcatcattcagggttccagcagtatcagcaggcagatgcctctaagcagttatggaacccaccgcaagtgcaaggaccccttgggaagatcatgccagttaagcagccctactacttgcaaactcaggacccaatcaagctgttcgagccaagcttgcaaccccctgttatgcagcagcaacctctggagaagaagatgaaaccatttccaatggagccttacaatcacaacccgagtgaggtgaaggtcccggagttctattgggattcctcctactcaatggcagataataggtccgtgatggcgcaacaggcaaatattgacagaagaggaaagaggagtcctggagttttccggccagagcaggacccggtgcctaggatgcccttcgaaaagagcttgctggagaaaccatcagagctgatgagccattcatcttcttttcttagtctcactggcttcagcctgaaccaggagaggtatcctaacaactcgatgttcaatgaagtctatgggaaaaatttaacatcctcaagtaaagccgagctctcaccaagcatggcacctcaagagacttctttgtactctctgttcgaggggaccccatggagcccttcgctgccagcaagctcggaccactccacacccgcttctcagagcccccacagcagcaacccttcctcgttacctagttcacccccaacccacaatcacaatagtgtgccattcagcaatttcggtcccattggcactccagataaccgggatagacgcacagccgatcgttggaagacagataaaccggccatgggcggcttcggtattgattacctcagtgcaacttcctcttcagaatcctcttggcatcaggcctcaaccccgtctggcacttggacggggcatggacctagcatggaggacagctcggctgtgttgatggaaagcctgaaaagtatttggtccagcagtatgatgcacccaggaccatccgcgctagagcagttgctgatgcaacagaagcaaaagcagcagagagggcagggcacgatgaacccaccccactag

SEQ ID NO: 205428 - DNA, 2976 bp, synthetic construct
  misc_feature 1..2976: note = Description of Artificial Sequence: Synthetic coding sequence
  source 1..2976: mol_type = other DNA
atggccggccccgtgagcctgcgggacctgctgatgggcgccagcgcctggatgggtagcgaatcccccgggggatcccccaccgaggggggaggcagcgcagctggaggccctgaacccccatggagagaggacgaaatatgcgtggtcggcatttttggaaaaacggctctgaggctcaattcagagaagttttcactggtaaatactgtttgcgacagacaggtcttcccactcttcaggcaccaagatccaggcgaccctggacctgggatccggacagaagctggagctgttggggaggcaggtggtgcggaggatccaggggcagccgcaggagggagtgtgcgtggaagtggcgcagtggcagagggaaaccgtacagaagccggttcacaggactacagccttctgcaggcttattacagtcaggaatccaaggtgttgtatctgctgctgacctccatatgtgataattcccagctcctgcgagcatgccgcgcattgcagtccggggaagcaggcgggggactcagcctgccacatgctgaagcacacgagttctggaagcaccaggaaaaactccagtgccttagtttgctctatcttttcagtgtctgccatattctgctgttggtgcatcctacctgttcattcgatataacctatgaccgagtgtttcgcgcactggatggcctccggcagaaagtcctgcctctgctgaaaacagcaattaaggattgccccgtgggaaaggactggaaacttaactgccgcccgtgtccgcctagactcctctttctgttccagctcaacggggccctgaaggtggagccaccccgtaaccaggacccagcacatcccgataaaccaaagaagcactcaccaaagcggcgactgcaacatgctctcgaagatcagatctaccgcatttttaggaaatcgcgtgtccttactaatcagtccattaattgcttattcaccgtgcctgctaaccaggctttcgtctatatagtcccgggatcccaggaggaggatcccgttggaatgctgttggaccagctgcgcagccattgcaccgtcaaagaccctgagagtctgctggtccccgcacccctaagtggtcctaggcgatatcaggtaatgaggcagcactctcgccagcagttgtcattccacatcgatagctcctccagttcatcatcagggcaattagtagattttacactccgggaattcttgtggcagcatgttgagcttgtactttccaaaaagggattcgatgacagcgtcggcagaaaccctcagccgtctcacttcgagttacctacataccagaagtggatctcggcagcctcgaagctatatgaggtggcaatcgacgggaaagaagaggacctgggatcacctactggtgagctgactagcaagatactctcaagcattaaggttctggaaggcttcttagacattgataccaagttctcagagaaccgctgtcaaaaggcgctgcccatggctcatagcgcctaccagagcaacttgccacacaattacacaatgaccgttcataagaatcaattggctcaggccttaagggtgtactcacagcatgcaaggggacccgcatttcacaaatatgccatgcaactgcacgaggattgctataaattttggtcaaatggtcatcagctgtgtgaagagcggtcactgacagaccaacactgtgtccataagtttcactctcttcccaaaagcggcgagaaaccagaagccgaccggaaccccccagtactttatcataacagcagagcccgcagtactggagcatgtaattgcggacggaagcaggccccgagggatgatccttttgacatcaaggccgccaattatgacttttaccagttgcttgaagagaagtgttgcggaaagctcgatcacatcaattttcccgtgttcgaaccctccacgcctgatcctgcaccggccaagaatgaaagtagcccagctccaccagattcagatgccgataaacttaaggagaaagagcctcagacccagggcgagagcacttccctgagtctggcactaagccttggtcagagtacagattctctgggtacctatcccgccgacccgcaggccggtggtgataacccggaggtgcacggccaggtagaagtgaaaacggagaaacgccccaacttcgtggaccgacaggcctctactgtagaatatctccctggaatgctgcattctaactgccccaaaggcctgcttcccaagttcagcagttggtccctcgtaaagctcggtcccgccaaatcatataattttcataccggcctggaccaacagggctttatacctggcaccaactacctcatgccttgggacatcgtgattcggacccgcgctgaagatgaaggagacctggacacgaactcctggccagctcctaataaggccatccctggaaagcgctcggctgtcgtgatgggccggggtcggcggagggatgacattgccagagcattcgtaggatttgagtatgaggactcacgcggcaggcgatttatgtgttccggccctgataaagtgatgaaggtgatgggatctgggcctaaggagagcgcattaaaggccttgaattccgatatgcccttatacatactgtccagtagtcagggacgcgggctcaagccccactacgcacagctgatgcggctgtttgtcgtagtgccagacgcccctctgcagatcattcttatgcctcaggttcagccaggccccccgccttgccccgtgttttatcctgagaagcaggagatcactttgcccccggacgggctttgggtgctgcggtttccttacgcctacgtcactgagcgaggcccttgcttccctcccaaggaaaatgtgcagctgatgagttataaggtattaaggggggtcttgaaggccgtcactcagtag

SEQ ID NO: 205429 - DNA, 2925 bp, synthetic construct
  misc_feature 1..2925: note = Description of Artificial Sequence: Synthetic coding sequence
  source 1..2925: mol_type = other DNA
atggccggccccgtgagcctgcgggacctgctgatgggcgccagcgcctggatggggagtgaatcacccggcgggtcaccaacagaaggcggaggctctgcagcaggcggcccggagccaccttggagagaagatgagatttgcgtggtgggcatattcggaaaaaccgcactgaggctcaacagcgaaaagttctccttagtaaacaccgtgtgcgatagacaggtcttcccactctttcgccaccaggaccccggagatcctggacctggaatccggactgaggctggtgcagtgggcgaggcaggcggagcggaagatccaggggccgccgccggtggcagcgtgaggggctcaggcgcagtagccgagggcaataggaccgaagctggctcacaggattactccctgctccaggcatactactcccaggaatctaaggtgctgtatttgctgctcacttctatctgtgataactctcagttgctcagggcctgccgcgctctgcagtcaggagaagccggggggggactgagtctccctcatgcagaagcacatgagttttggaagcaccaggaaaagctgcagtgcctttctctactttacctgttctcagtgtgtcacattctgttactggttcatcccacttgtagctttgatattacatacgacagagtgttcagagccctggacggccttcgacagaaagtgctgccgttactgaagaccgcaatcaaggattgtccggtggggaaagactggaagcttaattgtaggccatgtcctcccagacttctgtttctgtttcagcttaacggggcactcaaggtggaacccccacgcaaccaggatccagcccacccagataaacctaaaaagcattcacccaaacggcggctgcagcatgccctggaggaccagatctatagaatttttagaaaatctcgggtgttaacgaatcagtccataaactgtcttttcacagtccctgctaatcaggcattcgtatacattgtcccaggtagccaggaagaagaccctgtgggtatgcttctggaccagctgaggtctcactgcactgtcaaagaccccgaaagcctgctggtgccagcgcccctgagcgggccgagaaggtatcaggtgatgaggcagcactccagacagcagctcagcttccatatagacagttcatcatcctcaagcagcggccagttggtcgattttacactccgggaattcctctggcagcacgttgagctagttctcagcaaaaagggcttcgacgactccgttggtagaaacccccagccctcgcacttcgaactgccaacttaccagaagtggataagcgccgcgagcaaactctacgaggtagcaatcgatggcaaggaggaggacctcggctcccccacaggagagcttacatctaagatcctttcctctatcaaggtcctcgaaggctttttagacatagataccaaattcagcgagaacaggtgccaaaaggccttgccaatggcacatagcgcataccagtctaatctgccacataactatacaatgacggtgcataaaaatcagctggctcaggctctgagagtctattcccagcacgccaggggtcccgctttccacaagtacgcgatgcagctccatgaggactgctataaattttggagcaatggtcaccagctttgtgaagagaggtccttgaccgaccaacactgcgtgcacaagttccactcgctgccaaagagcggcgaaaagccggaggctgatagaaatcctccagtgttataccacaattcacgcgccagatccaccggggcatgtaactgcgggcgcaagcaggctcccagggatgatcccttcgatattaaagccgccaactacgatttctaccaattgctggaagagaagtgctgcgggaaattagatcacatcaattttcctgtcttcgagccctccacccccgaccctgcacccgccaaaaatgaaagctcacctgccccgcctgacagcgacgcagacaaactgaaagagaaagagccccagacccagggagagagcacatcgttatcactggctttgagcctgggtcagagtacagacagtttggggacatatcccgctgatccacaagcaggtggagacaacccggaggttcacggccaagtggaggtgaagaccgaaaaacgtcccaacttcgttgaccgccaggcctctacagtggaatatctcccagggatgctccattcaaattgtcctaaagggctgttgcctaaattcagttcgtggtcattggtgaagctgggacctgctaagagctataattttcataccggcctggatcagcagggctttattcctggcacaaattatctgatgccatgggacatcgtcatccggacccgggcagaagacgagggggatctcgacaccaacagctggcctgcacccaacaaagcaatccccggtaagcgtagtgctgtggtcatggggcgtggaagaaggcgcgacgatattgcaagggccttcgtggggtttgagtatgaagattcccgcgggcgccgattcatgtgttccgggcctgataaagtaatgaaagtgatgggatccggccctaaggaatccgccttaaaggctctgaattctgacatgcccctctacatcctcagctcttctcagggccgcgggctgaaaccgcactacgcgcaactcatgcgcctatttgtggtggtgccggacgctcccctgcagatcatactcatgccccaggtgcagcccgggcctcctccatgccccgtcttctaccctgaaaagcaagaaattacactgccacccgatggactttgggtgcttagatttccttacgcatacctgcgagaggatctcgtgagccccctgagaaagatgtgcagctag

SEQ ID NO: 205430 - DNA, 1563 bp, synthetic construct
  misc_feature 1..1563: note = Description of Artificial Sequence: Synthetic coding sequence
  source 1..1563: mol_type = other DNA
atgagcgagagcggccacagccagcccggcctgtacggcatcgagcgaagacgtcggtggaaggagccgggctccggcggccctcagaacctctcaggccccggaggacgggaaagagactatatcgctccctgggaacgtgaacgacgcgatgcttcagaggaaacttccacatcggtgatgcagaaaacacctattatcttaagtaaaccccctgcagaaagatcaaagcaaccccctccccctaccgccccagcagctccccctgctcccgctccgctcgaaaagcctatcgtactgatgaaaccaagagaggagggaaaggggcctgtggccgtaactggtgcttccaccccagaaggcacggccccgccccccccagccgcgcctgcacctccaaaaggtgagaaggaagggcaacgtccaacccagccagtttatcagatccagaatcgaggaatgggaactgctgctccagctgccatggaccccgtcgtgggccaggctaaattgctccctcccgagcgtatgaagcactctattaaattagtcgatgaccagatgaactggtgcgacagtgcaatcgaatacctcctggaccagaccgatgtgctggttgtcggagtgctaggacttcaagggactgggaaatccatggtcatgagtctgctgagcgcaaatacacccgaagaggaccagagaacatacgtattcagagcgcagagtgccgagatgaaggaacgcgggggtaatcaaaccagtggaatcgacttcttcatcactcaggagcgtatagtgtttttagatactcagcctatcctctcaccctcaatccttgatcacttaataaacaacgatagaaaattaccaccagaatataacctgccgcatacttatgtagagatgcaaagcctccaaatcgccgcatttctgttcacagtgtgtcacgtggtaatagtggtgcaggactggttcactgacctctccttataccgttttttacagacagccgagatggttaagccctccactccttctcccagccacgagtcttcctcctcttctggcagcgacgaaggtactgaatactatccacacttggtgttcctccaaaataaggcccgaagagaggacttctgccctagaaaactgcgacagatgcacctcatgattgaccagttgatggcccatagccacctgaggtacaaaggaaccctatcaatgctgcagtgtaacgtgtttcctggtctaccccccgatttcctggatagcgaggtaaacctcttcctggtccccttcatggacagtgaggccgagtccgagaatccacccagagccgggcccggttccagtcccttgttctctctcctgcctgggtatcggggtcatccctcatttcagagccttgttagcaagttgcggtctcaggtgatgtcaatggcaaggccccagctgagccacacaatcttgactgagaaaaattggtttcattacgcggcccggatttgggacggggtgaggaagtcctcagcactggctgagtactcacgtttgctggcttag

SEQ ID NO: 205431 - DNA, 2742 bp, synthetic construct
  misc_feature 1..2742: note = Description of Artificial Sequence: Synthetic coding sequence
  source 1..2742: mol_type = other DNA
atggccgacgaggccctggccggcctggacgagggcgccctgcggaaattactggaggtgaccgccgatcttgctgagaggaggcgcatcagatccgcaatcagagaactgcagcgacaagagctcgaaagggaagaggaagccctcgcttctaagcggttccgggcagagcgacaggataacaaggagaactggttacactcacaacagcgggaggccgagcagagagccgccctggccaggcttgcaggccagttggagagcatgaacgatgtggaagagctcaccgctctgttgcggtctgccggcgagtatgaggaacgcaaattaatccgcgcagccattcgccgggtgcgtgcccaggaaatcgaggcagctaccctcgctggcagactgtacagcggcaggcctaattctggcagtcgagaagacagtaagggccttgccgcacacaggttggaacagtgtgaggttccagagagggaagaacaggagcagcaggcagaagtcagcaaaccgacaccgacacccgagggaacgtctcaggatgtcactacagtaacactcctgttgagggctcctcccggctctacgagctcgagcccagctagtccatcctcctctcctacacccgcctcaccagaaccgccgttagagccagctgaagcacaatgtttgaccgcagaggtccctggaagccccgagcccccaccttcacctcctaagacgacatccccagaaccccaggaatcacctacccttccttcaacagaagggcaggtagttaacaagctgctgtctggcccaaaagagactccggcggcacagagccccacaagaggcccgagtgataccaagcgtgcggatgtggcgggcccaagaccttgtcagaggagtttgagcgtgctatctccacggcagccagcgcagaatcgggagtctacccctctggcctctgggccatcctccttccagcgcgctggatcagtccgcgatagagtgcataagttcacatcggacagtcctatggcagcgcgactgcaggatgggaccccgcaggccgccttgtccccactgccacgcaaggcccccgggccactgccccaccagcaccacccctgtctgctgttgcagcgcctgttactgagcggacctgatacatcatcaagattctctaaagaacagcggggcgtggcgcagcccttggcacagctccgatcctgccctcaggaggaggggccccggggacgcgggctggccgctaggcctctggaaaatcgcgcaggaggccctgtcgcacgaagcgaagaacccggtgccccactgccagttgcggtgggcacagctgagccagggggcagcatgaagactacattcacgattgagatcaaagatgggcgcggtcaggcctccacagggcgggtgctgttgccaaccggcaatcagcgggcagaacttacactggggctgagggcccccccgacattgctgtccacgtcctcaggcggaaagagcactattacaagagtgaactcccctgggacattggccagactgggatctgttacgcacgtgacaagtttctctcatgcccctccttcttcccggggaggatgctcgatcaaaatggaggctgagccagcagagccccttgctgccgccgtggaggcagccaacggcgccgagcaaacacgggtgaataaggcacccgaggggaggagccctctgtctgccgaggagttaatgacaatagaggatgaaggcgtgctggacaagatgctggatcagtcgacagactttgaagagcgcaaactgatcagagccgccttaagggaactaaggcaacgaaagcgggatcagagagataaggagcgagagcgtcgcctccaagaggcaaggggaaggccaggagagggccgaggcaatacggcgacggagaccacaacccgccacagccagcgggccgctgatggatcagccgtgtcaacagtaacaaagactgagagactggtgcatagcaatgacggaaccagaacggccagaacgacgacggtggagtcaagttttgtgcggagatctgaaaacgggtcagggagtaccatgatgcaaaccaagacgtttagctccagctcttccagcaaaaaaatgggcagtattttcgacagggaggaccaggcgtccccgagggccggttcactcgctgcactggagaagcggcaggcggagaagaagaaagaactaatgaaggcccagagtctccccaaaaccagtgccagccaggctcggaaagcaatgatcgaaaagctggagaaggaaggcgcagcgggatctccagggggacctagggccgcagtgcagcgcagcacaagttttggagtgccaaacgccaactctatcaagcaaatgctgctggattggtgcagagctaaaactcggggctatgaacacgtcgacatccagaatttcagctcctcctggtccgatgggatggcattctgcgccctcgtgcacaacttcttcccggaggcctttgactatggccagctctccccacagaatcgcagacagaattttgaggtagctttttcaagtgcagaaacacatgccgattgcccgcaactgctggacacagaggatatggtaaggcttcgtgaacctgactggaagtgcgtgtacacatacattcaggaattctatcgctgcttggtccaaaagggcctggtcaagactaagaagtcctag

SEQ ID NO: 205432 - DNA, 2748 bp, synthetic construct
  misc_feature 1..2748: note = Description of Artificial Sequence: Synthetic coding sequence
  source 1..2748: mol_type = other DNA
atggccgacgaggccctggccggcctggacgagggcgccctgcggaagctgctggaggttaccgcggacctggctgagaggcgaagaataagatcagcaatcagggagctgcagaggcaggagctggagagggaggaggaagccctggcctctaaaaggtttcgagccgagcgacaggataacaaagaaaactggctgcacagccaacaaagagaggccgaacagagagccgccttggccagactggctggccagctggagtcgatgaatgatgtcgaggagctgacagctttgttaagatccgcaggagagtacgaggaaaggaagctgatcagagctgccatacgacgtgtccgcgctcaggagatcgaggccgcaactttggccggcaggctgtatagtggtcggcccaacagtggctcacgcgaagactctaagggactggctgcacatagactggaacagtgcgaagtgccggagcgcgaggagcaggagcaacaggcggaagtcagcaaaccaacccctacacctgaagggacctcccaagatgtaacaacagtgaccctccttctgagggctcctcccggcagcacttccagtagcccagcttcaccgtctagtagcccaacacccgcttctccggagcccccgctcgagccggctgaagcccagtgcctcacggccgaagtgccaggatctccagagcccccaccgtctccccctaaaactaccagtcctgaaccgcaggagtcgccgaccttgccttctacagaaggccaggttgtgaacaagctgcttagcggtcccaaggagacgccagccgcacagtcaccaacccgtggtccttcggacactaagagggccgacgtggccggaccacgcccgtgccaaaggtcactgagcgtgctgtctccaagacagccagcccagaacagagagagcactccccttgcctccggtccttcctctttccagcgtgctggcagcgtcagggacagggtccacaaattcacgagtgactctccaatggccgcacggctccaagacggaaccccgcaagccgccttaagccccctcaccccagctcggctactaggtcctagtctcacaagcactactcccgcttcttcctcgagtggcagttcctcccggggcccttcagatacctcttctagatttagcaaggaacagagaggcgtcgctcagcctctcgcacagcttcggtcttgcccccaggaagaggggcctcggggtagaggactggcagccaggccactcgagaacagagcggggggacccgtggctcggtcagaggaacctggcgcccccctgccagtggctgtgggcaccgccgaacctgggggcagcatgaagacaacctttacaatcgaaatcaaagatggtagaggccaagccagcaccggccgagtactactgcccacaggcaaccaaagggccgaattgaccctggggctgagagcccctccaacgttactttctacatctagcggaggaaaatcaaccattacccgggtgaacagtcccggcacactggcacgactggggagtgtgacgcatgttaccagtttctcccacgcccctcccagcagtcggggaggctgctcaatcaaaatggaggctgaaccagcagaaccactcgctgccgctgtggaggctgcgaatggggccgaacagactagggtgaataaggcacctgaaggaagaagtccactgtctgccgaagagctaatgaccattgaggacgagggagtacttgacaaaatgttggatcagtcaacggattttgaagagcgtaagctgatccgcgccgcactcagagagttgcgtcagagaaagagggatcagagggataaggaaagagaacggcgactgcaggaggcccgggggcgcccaggggaagggaggggcaacacagccacagaaaccactactcgacatagccagagggcggccgacggcagcgcggtcagcactgtaacaaagacagagagactggtccattccaacgacggcactcggacagcacgcacaacaacagtcgagagctcttttgtgcgtaggtccgagaacggatccgggtcgacaatgatgcagaccaagacctttagtagctcttcttcaagcaaaaaaatgggctcaatctttgacagggaggaccaagccagcccacgcgccgggagtctcgccgccttggagaaacgccaggccgagaaaaaaaaggagctgatgaaagcacaatcacttcctaagacatctgcttcccaagcgcgaaaagccatgatagagaagctcgaaaaggagggcgccgccggaagtccgggtggccctagagccgcagtgcagcgctccacctctttcggagtacctaacgccaattccatcaaacaaatgctcctggattggtgtcgggcaaaaacccgagggtatgaacatgtggacattcaaaatttttctagctcttggtcggacgggatggcgttctgcgctctggtccacaatttttttcccgaggcgtttgactatggacaattatctccgcagaatcggaggcagaattttgaagtggctttctcttctgccgaaacacatgccgactgccctcagttactcgacacagaggacatggtgcggctccgggagccagattggaagtgcgtgtacacatacattcaggagttttacaggtgccttgtgcagaagggcctggtaaaaactaagaagtcctag

SEQ ID NO: 205433 - DNA, 2754 bp, synthetic construct
  misc_feature 1..2754: note = Description of Artificial Sequence: Synthetic coding sequence
  source 1..2754: mol_type = other DNA
atggccgacgaggccctggccggcctggacgagggcgccctgcggaagctgttagaggtgacagctgatctggccgaacggagaaggatcagaagtgccatccgagaattgcagcgacaagagctggagcgcgaagaggaggcgctcgccagtaagaggttccgggccgagcgacaggataacaaagagaattggctccactctcagcagagggaggccgaacaaagagccgccctggcccgcctggcaggtcaactggaaagtatgaatgacgtggaggagctaacagccttgttgcggtctgccggagaatacgaagagaggaagctgatcagagccgctatccgtcgtgtgagggcccaggaaatagaggctgccaccctcgccgggagactttattcagggaggcccaattctggctctagggaagactctaaaggtcttgcggcccataggctggagcagtgcgaagtgcctgagcgggaagaacaagagcaacaggccgaggtcagcaaacctacacctactccggagggtacctcccaggacgttacaaccgtgactcttctgttgcgcgcgccccctgggtctaccagctccagccctgcctctcccagtagtagccccacgcccgcctcccctgagccgcctctcgaaccagcagaagctcagtgtctgaccgcagaagtgcccgggtctccggagccaccaccatccccacctaaaacaacatcacccgagccccaagagtcccccacactgccctcaacggagggccaggtggttaacaagctcctctcaggacctaaagagactcctgctgcccaaagccccacacgtggaccttctgacaccaaacgggcggacgtggctggaccgaggccttgccaacgctccttgagtgtgcttagtccccgccagccggctcagaatcgagaatccactcccctcgcctctggtccctcatctttccaaagagccgggtccgtgcgagacagggtgcataagttcacgagcgactctcccatggccgccaggctgcaagatgggacaccgcaggcagccctctctcccttgacccctgcccgattgttaggcccatctctgaccagcacaactccagcttcgagcagtagcgggtcttcgtctcgcggccccagtgacactagcagcaggttttccaaggagcagcgtggggtggcccagccactcgctcagttgcgcagctgcccccaggaggaaggccctcgcggccgcgggctagcggcccgcccccttgagaaccgggctgggggacctgttgccagaagcgaagagccaggggctcccctccccgtggctgttggtactgccgaacccggggggtccatgaaaaccaccttcaccattgagatcaaggacggccgaggtcaggcatccactggaagagtactgctgcccactggaaatcagagggccgagttgaccctggggctccgtgcccctccgacactgctatctacgagctctggcggtaaaagcaccataactcgggtgaattccccggggacgctggcccgcctggggtccgtgactcacgttacctcgttctctcacgctccgccctcaagtagaggcggatgttccataaagatggaggctgaacctgccgagcctctggccgccgccgtggaggccgccaacggggcggagcagacacgcgttaataaggccccggaaggcaggtcacccctatccgccgaagagctaatgacgatagaagatgaaggcgtgctagacaaaatgctggaccagtctactgacttcgaggagagaaagctaatccgcgcggctctgcgagagcttcgccaaaggaagcgcgatcaacgcgataaagaaagggagcgacgcctgcaggaggctcgaggacgcccgggagagggaagggggaacacagccactgaaaccacgacaagacattcacagagggccgcggacggaagcgccgtcagcaccgtgacaaaaactgagagactagtgcactcgaacgacggcacccgcacagctcgcaccacaacagtggagtcatcttttgtccgccgcagtgaaaatggctctggaagtactatgatgcagactaaaacattctctagctcttcttccagtaagaaaatggggagcatcttcgacagagaagatcaagcctccccgcgtgccgggagcctggccgctctcgagaagcgtcaggcagaaaaaaagaaggagctgatgaaagcacaatcccttcctaagacttccgcatcccaagccaggaaggctatgatcgaaaaactagaaaaggagggagccgcaggctccccaggcggccccagagctgcagtgcagcgtagcacctccttcggcgtgcctaatgctaacagtattaaacagatgctgctcgattggtgtagggctaagactcgcggctacgagcacgtggatatccagaatttctcttcttcctggtccgacggcatggccttttgcgccctggtgcacaatttttttccagaagcttttgattatggtcagctttcgccacagaacaggcgccaaaacttcgaagtagcgttttcctcagcggagatgctggtggattgcgttccactagttgaggtagatgacatgatgattatgggcaaaaagcccgaccccaaatgcgttttcacgtacgttcaatccctatacaatcacctccgtaggcacgagttgagattgcgcggtaagaatgtgtag

SEQ ID NO: 205434 - DNA, 888 bp, synthetic construct
  misc_feature 1..888: note = Description of Artificial Sequence: Synthetic coding sequence
  source 1..888: mol_type = other DNA
atggaggccgagcccgccgagcccctggccgccgccgtggaggccgcaaacggagccgagcagactagagttaataaggcccctgaaggcagatcacccttaagtgctgaggaacttatgaccatcgaagacgagggcgtgctcgataaaatgttagaccagtcaaccgatttcgaagagcggaagttaatcagggctgcattgcgggagctaagacaacgcaagagagacggcagtgggagcaccatgatgcagacgaagaccttcagcagctcctctagctcaaagaagatggggagtatattcgaccgtgaggaccaagcatcaccgcgtgctggcagccttgccgcactggaaaagcgccaggccgagaagaagaaggaactgatgaaagcgcaaagcctgcccaagaccagtgcaagccaagcgaggaaggcgatgattgagaagctggagaaagagggcgctgctggatctcctgggggacctcgagctgcagttcaacgctcgacctccttcggcgtcccaaatgccaactccataaagcagatgctcctggattggtgcagagccaagacgcgaggttacgagcacgttgatatccagaactttagttcctcatggtctgatggaatggcgttttgtgcactggtgcataactttttccctgaagcttttgactacggccaacttagcccccaaaacaggcgacagaattttgaggtcgcattctcctctgccgaaacccatgccgattgtccacagctgttagatacagaagacatggtgagattaagggaaccagattggaagtgcgtgtacacttatatccaggagttctatcgatgcctggtgcaaaaaggcctggtgaagaccaagaaatcttag

SEQ ID NO: 205435 - DNA, 2817 bp, synthetic construct
  misc_feature 1..2817: note = Description of Artificial Sequence: Synthetic coding sequence
  source 1..2817: mol_type = other DNA
atgacctgcctgagccaccccctgcagctggaggtgaccgccgacctcgccgaaagaagaagaatccgatcagctatcagggagttgcagaggcaggagctggagagggaggaggaagcgctcgcctctaagcgatttagagctgagagacaggacaataaagaaaattggctacactcccagcagagagaggcagagcaacgggcagccctcgcaaggcttgccggacagctggagtccatgaacgacgtcgaggagctgaccgcactactgcgaagtgctggggagtacgaagaaaggaagttaattcgcgctgccatccggagggtgcgcgcacaggagattgaggcggctacactcgcaggaagactctactcaggcagaccaaacagcggctcacgtgaggacagcaaaggcttggccgcacaccgcctggaacagtgtgaggtgccagagcgcgaggaacaagaacagcaggccgaggtctcaaagcctactccaacccctgaaggcacaagccaggacgttaccacagtcactcttctgctaagagcaccgccgggctccacttccagcagtcctgcttccccaagtagctcccccactccagcctctcctgaacccccactggaacctgctgaggcccaatgcctcaccgcggaggtccccggtagtccggagcctcctccgtcaccccccaagacgaccagtcccgaaccgcaagaatcccctacgctgcctagtaccgaaggccaggtagtgaataaactcctgagtggcccgaaagaaacccccgcggctcaatcccccacgaggggaccgtctgacaccaaaagagcggacgtggcaggaccacggccttgtcagaggtctctttccgtactaagtcctcgccagccagctcagaatagggaatccacaccacttgcaagcggcccttctagtttccagcgggctggatctgttcgagatcgggtgcacaaatttacttccgattctccaatggccgccaggctgcaagatgggaccccccaggccgcactgtcacccctcactccagcgcgactgctcgggccaagcttgacaagtacaacccccgcctccagtagctccggcagcagcagtaggggcccttcggatacatccagccgcttctctaaggagcagcggggggtggcccagcccctggcacagctgcgtagttgtccacaggaggagggccctcgggggcggggattagctgccagacccctcgaaaaccgggctgggggaccagtggcacggagcgaagagcccggggctcctttaccggttgctgtaggcaccgctgagcccggcggcagcatgaaaactacattcacgatcgagattaaggacggccgaggccaggcaagcacgggacgtgtactcctgcccacagggaaccaacgcgccgaattaaccctgggcctgcgcgccccccccactctgttaagcacgtcctcaggtggcaagtccactatcacccgggtcaacagtcccggcaccctcgcccggttgggctctgtcacacatgtgacctccttcagtcatgccccgccatcgtccagggggggttgctccattaaggctgccgaggatgcaggtacacccgtcgctcatccccccgccttctctacaagacgacgatcctctaccgggaccactaggagcacaagcctcatggaagcggagccagcagagcccctggctgcggcagtggaggccgcaaacggggcagaacagaccagggttaacaaggcaccagaggggcggagtccgctgagcgctgaagaattgatgaccatcgaggacgagggggtactggacaagatgctggaccagagcacagactttgaagagagaaagctcatcagagctgcattgcgcgagctgcggcagcgaaagcgcgatcagagggataaggagcgtgaacgccgtctgcaggaagcccgcggtcggcccggggagggccgagggaacaccgcgacagagacgaccacccgtcactctcagcgagccgcagatggttctgcggtatcgacagtcaccaagacagagaggctggtgcactcaaatgacggaacgcgcacggccaggactactactgtggaatcgtccttcgtgcgcaggtccgaaaatggtagtgggagtacaatgatgcagaccaagaccttttcatcctcatcctcctccaaaaaaatggggagcattttcgacagagaagatcaagcatcgcccagggctggctccctggcggcccttgaaaagcgtcaagccgagaagaaaaaggaactaatgaaagctcaaagcttgccgaagacctccgccagccaggcccgaaaggcaatgatcgagaagctggaaaaggaaggcgcagccggaagccccggaggccccagggctgcggtccagcggagtacttccttcggagtcccaaacgctaattcaattaagcaaatgctgctggactggtgcagggccaaaacccgggggtatgagcacgtggacatccagaatttctcttcttcttggagtgacgggatggctttctgtgcgctcgtgcataacttttttcctgaggcatttgactacggtcagttaagccctcagaaccggcgtcagaacttcgaagtcgctttttcgtccgccgaaacgcatgcagattgtcctcagctgttagatactgaagatatggttaggctgcgagaacctgattggaagtgcgtctacacttacattcaagaattctatcgatgcttggtgcagaagggtttggttaagaccaaaaagagctag

SEQ ID NO: 205436 - DNA, 114 bp, synthetic construct
  misc_feature 1..114: note = Description of Artificial Sequence: Synthetic coding sequence
  source 1..114: mol_type = other DNA
atggccgacgaggccctggccggcctggacgagggcgccctgcggaagttgctagaggtcactgccgacctggccgagaggcgtagaatccgcagcgctattcgcgaactctag

SEQ ID NO: 205437 - DNA, 2823 bp, synthetic construct
  misc_feature 1..2823: note = Description of Artificial Sequence: Synthetic coding sequence
  source 1..2823: mol_type = other DNA
atggccgacgaggccctggccggcctggacgagggcgccctgcggaaacttctcgaagtcaccgccgacctagctgaacgacggcggatcaggagcgcaatacgcgagctccaaagacaggaactggagcgcgaagaagaggcactggccagtaagaggttccgagcagaacggcaggataataaagaaaattggttgcacagtcaacagcgcgaagctgagcagcgagcagctctggctcggcttgcgggacagctggagagcatgaatgatgtggaggaactgaccgccctgctgcgctcagccggggaatacgaagaacgcaagctgattagagctgctataaggcgggtgagggcccaggagattgaagctgcaacattggccgggcgcctgtacagcggtcgaccgaacagtggctcaagggaagattcaaaaggcctagctgctcacagactggagcaatgcgaagtgcctgagagggaagagcaagagcaacaggctgaggtctccaagcctacccccactcctgagggaacaagccaggacgtaacgacagttactcttctgttgagagccccacccggaagcacttctagcagccctgcctcgcccagtagcagccctactccggcttctcccgagcctcctctggagccggcggaggcccaatgcctgacggccgaggtgcctggctcccctgagcctcctccttcacccccaaaaacaactagcccggaaccccaggaaagcccaacgttgccttctaccgaggggcaggtggtcaataagctgctgagtggtccaaaggaaacccctgctgcacagagccccactcgaggtccttctgacaccaaacgggcagatgttgccggcccaaggccttgtcagaggtcactaagcgtgctaagcccccgccaaccggcgcagaatcgggaaagcactccactcgcttccggaccatcctcttttcaacgtgccggtagcgtgcgggaccgtgtccataagttcacgtccgactccccaatggcagctagattgcaagacggaactcctcaagcagctctctcgccgttgaccccggcgcgattactgggtccgagccttaccagtacaacccccgcatcatcgtcctccggatcttcttcccgcggaccctccgacacttcctccagatttagcaaggagcaacgcggagtggcccagcccctcgctcagttgaggtcttgtccgcaagaagagggtcctcgtggaaggggcctggcagcccgccccctagagaatagggcagggggacccgtcgctcggtcagaagagccaggcgcccctttgcccgtcgccgtagggacggcagagccaggcgggagcatgaagacaacctttacgattgaaattaaagatggccgcggccaggctagcacaggtagggtgctgctgcccacgggcaaccagcgggccgagttaactctcggattgcgagcccccccgacccttctctccacatctagtgggggcaagagtactattactcgtgttaattcgcccggcaccctcgctcgacttgggtcggtaacccacgtgacctcattcagccacgcccccccctcttccagaggcggatgtagcattaaaatggaggccgagccggccgagcccttggctgccgcagtcgaagccgcaaacggggccgaacaaactagagtaaataaagccccagaaggcagaagcccgctgtctgctgaggagctgatgacaatcgaggacgaaggcgttctcgataagatgcttgatcagtctacagatttcgaggaaaggaagctgatccgggccgcattacgcgaactcagacaaagaaagcgggaccagcgcgacaaggagcgggaacgccgattgcaggaagcacggggaagaccaggagaagggagaggaaatacagccactgaaaccacaacacgccacagtcagcgcgctgccgatggttcagctgtttcaactgtgactaagaccgagcgcttggtccacagtaacgacggcactagaaccgctcggactacaactgtggaatcctctttcgtccggcgaagtgaaaacggcagcggatccacaatgatgcagaccaagactttctcatccagttcatcatctaagaagatggggagcatatttgaccgtgaagaccaggcaagccctagggctggatcactcgccgcccttgaaaagcggcaggctgagaaaaagaaggagttaatgaaagcccaaagtctgcctaagacctccgcatcccaggctagaaaggccatgatcgagaaactcgaaaaagagggcgctgcggggagcccgggcggtcccagagcagcggtccagcgttccacatccttcggcgtcccaaatgctaattccataaagcaaatgctgcttgactggtgcagagccaagactaggggctatgagcacgtggacatccagaatttctcctcctcatggtcagatggcatggccttttgtgcgctggtacataattttttcccagaggcattcgactatggccagctatccccacagaacagacggcagaactttgaagtcgcattcagtagcgccgaaacgcatgcagactgtccccagctactggacactgaggacatggtacgcctacgggaaccagattggaagatgctggtcgactgtgtcccattggtggaggttgatgacatgatgatcatgggtaagaagccagatcccaaatgcgtctttacttatgtccagtccctctataaccacctgcgccggcatgagctgaggctcagaggcaaaaacgtctag

SEQ ID NO: 205438 - DNA, 1374 bp, synthetic construct
  misc_feature 1..1374: note = Description of Artificial Sequence: Synthetic coding sequence
  source 1..1374: mol_type = other DNA
atggagcagaaggagggcaagctgagcgaggacggcaccaccgtgtcccccgcagccgacaaccccgaaatgagcggcggaggagcgccagcggaagaaacaaagggtacagctgggaaagctattaatgaggggcccccaacggaaagtgggaagcaggagaaggcacccgccgaagatggaatgtccgcagagctgcagggggaagcaaatggactggatgaggttaaagtggagagccagcgggaggctggcggtaaggaagacgccgaagctgagctcaaaaaagaagatggagagaaagaggaaacgacggtgggcagccaggaaatgacaggccgaaaggaggagacaaagtccgagccgaaagaagccgaggagaaggagagtactctggcctccgagaaacagaaggcggaagagaaggaggccaaacctgagagcggccaaaaggccgatgctaacgaccgcgacaagccagaacccaaagcaaccgttgaagaagaagatgccaaaaccgcctctcaggaggagacagtagtagaggatgaagctaaagcagagccaaaagaaccagatggaaaggaggaggcaaagcacggagctaaagaagaggcggacgagcctgggtccccctcagaagagcaggaacaggacgttgaaaaagagcccgaaggcggagctggagttataccaagttcccccgaagagtggccggaatcgccaacaggcgaagggcataacctttccaccgacggcttaggaccagattgtgtcgcctcggggcaaactagcccatccgcctctgaaagcagccccagcgatgtgccgcagtccccacctgagagcccctcctcaggggagaagaaggagaaagcacccgaacgacgagttagcgctcccgcgaggcctcgaggccctagggcccagaacagaaaggccatcgtagataagtttggaggggcagccagcggaccaaccgcattatttcggaacaccaaggctgccggtgcagcgattggaggcgtgaagaacatgctgttggagtggtgccgagcgatgacaaagaagtacgaacatgtcgatattcagaattttagctctagttggagttctgggatggccttctgtgcgctcatacataagttctttccagacgcattcgactacgctgaactggacccagcaaagcggcggcataacttcaccctggcattcagcacagcggagaaactggcggattgcgctcagttacttgacgtcgatgatatggttagattggctgtgcctgattctaaatgcgtctacacctacattcaagagttgtaccggtcattagtgcaaaaaggcctagtgaagactaaaaagaaatag

SEQ ID NO: 205439 - DNA, 1539 bp, synthetic construct
  misc_feature 1..1539: note = Description of Artificial Sequence: Synthetic coding sequence
  source 1..1539: mol_type = other DNA
atgctgcccggcgccgtgggcgagagcgactgcagcgccgaggccagggagaagatggaacagaaagaagggaagctttcagaggatggaacaactgtgtcgcctgcagctgacaatccggaaatgagtgggggaggcgccccggctgaggaaactaagggcaccgctggcaaggctatcaatgagggacctcctacagaatcgggtaaacaggaaaaagcacctgcggaggatggcatgagcgctgagcttcagggcgaggcaaacggactggacgaggtcaaggtggagtcccagcgcgaggcaggcgggaaggaggatgctgaggctgaattgaaaaaggaggacggcgagaaagaggaaacaactgtgggttcccaggagatgacaggacgtaaagaagaaaccaagtcggagccgaaagaggccgaggagaaagaatctaccctggcctcggaaaaacaaaaggctgaggaaaaagaggctaaaccagagagcggtcaaaaagccgacgccaacgaccgggacaagccagagcccaaggccacggtcgaagaggaagatgccaaaaccgcatctcaggaggaaacaggacaaaggaaagagtgcagtacagagccgaaggagaaagccaccgacgaagaggctaaagctgaaagccaaaaagccgttgtggaggacgaggccaaggccgaaccgaaagagcctgacgggaaagaagaggctaaacacggcgctaaagaggaggctgatgccaaagaggaggccgaggatgccgaggaggcggagccaggcagtcctagcgaagaacaggaacaagatgtggagaaggaacccgaagggggggctggggtgatcccctctagccccgaggagtggcctgagagtcctaccggcgagggccacaacttgtccaccgacggactcgggccagattgtgtggcctcaggccaaactagcccctctgcctccgaatcatctccatctgacgtgccacagtcaccccctgagagtcctagctcaggtgagaagaaggagaaggcacccgaacggcgggtttcggctccagcaagaccccggggcccacgtgcccaaaaccggaaggcaattgtcgataaatttggcggcgccgcctccggaccaactgctctgtttcggaatacaaaggctgctggagcagcaattgggggggtaaagaacatgttacttgagtggtgccgggcgatgacaaagaagtacgagcacgtggatatccagaacttcagcagctcatggagctctggaatggctttttgcgcacttatccataagttcttccctgacgcctttgattatgcggaattggaccctgcaaaacgcagacataacttcacactggcattctctaccgcagaaaagttggcggactgtgctcagctgctggacgttgatgacatggtgaggctggctgtcccagactccaagtgcgtgtatacctatattcaggagttgtaccgctcattggtacagaaggggctggttaagacaaaaaagaagtag

SEQ ID NO: 205440 - DNA, 1485 bp, synthetic construct
  misc_feature 1..1485: note = Description of Artificial Sequence: Synthetic coding sequence
  source 1..1485: mol_type = other DNA
atggagcagaaggagggcaagctgagcgaggacggcaccaccgtgagtcccgctgctgacaaccctgagatgagcgggggaggcgctccggctgaagagacaaagggtaccgcaggaaaagctattaatgagggacccccaaccgaatctggaaaacaggaaaaggcaccggctgaagacggtatgtctgcggagttacaaggcgaagccaacgggctggacgaggtgaaggtagaatcgcaacgcgaagcagggggaaaggaggacgccgaggccgaactcaaaaaggaagacggtgagaaggaggaaacaacagtaggttcccaggaaatgaccggccggaaggaggagaccaaaagtgagcccaaggaagccgaagaaaaagagagtaccctcgcctctgaaaaacagaaggctgaagaaaaagaagccaagccagaatcaggacagaaagccgatgccaatgatcgggacaaaccagagccaaaggccacggtggaagaggaggatgcaaagactgcctcccaggaagagacagggcagaggaaagagtgttcaacagagccgaaggagaaagctactgacgaggaagctaaggcggagtcgcaaaaagctgtggttgaggacgaagccaaggctgaacctaaggagcctgatgggaaggaggaggccaaacacggtgccaaggaagaggccgacgccaaagaggaagccgaggacgcagaagaggctgagcctggaagtcctagcgaagaacaagaacaggatgtggaaaaggagcccgaggggggcgcgggggtgatcccctcttccccggaggaatggcccgaaagccctacaggagaagggcataatctgtctacagatggcctaggtcccgattgcgtggcctccggacaaacgagccccagcgcttcagagtcttcaccatccgatgtgccacagtccccaccggagtctcccagctcgggggagaagaaggagaaggctcccgagcggcgcgtgtctgcccccgcgcgcccaaggggaccccgcgcacagaatcgaaaggccattgttgataaattcgggggggctgcctccgggcctacagccctattcagaaacacgaaggccgccggcgctgccattgggggcgtcaaaaacatgctgctcgagtggtgccgagctatgactaagaagtacgaacacgttgatatacagaatttttccagctcttggtcttcaggaatggcattctgcgctctgatccataagttctttcccgatgcattcgattatgctgaactcgacccagccaaacggaggcacaactttactttggcattctccacagccgagaaactggccgactgtgctcagctgctggatgttgacgatatggtccgcttggcagtcccagactccaaatgcgtgtatacatacatacaagaactttatcgaagcctggtgcaaaagggactggtgaaaactaaaaagaagtag

SEQ ID NO: 205441 - DNA, 312 bp, synthetic construct
  misc_feature 1..312: note = Description of Artificial Sequence: Synthetic coding sequence
  source 1..312: mol_type = other DNA
atgagcgaggagaagcccaaggagggcgtgaagaccgagaacgaccacatcaatttaaaagtggcagggcaggacggctcggttgtccaatttaaaatcaaacggcacactccactgtccaagttaatgaaagcctactgcgaacgtcaaggactctccatgcgacagattagattccggtttgatggccagccaattaatgagaccgacactcctgcgcagcttgagatggaggacgaagatacgatagatgtgtttcaacagcagactggaggtgtcccagaatcttcactagcaggccactcattttag

SEQ ID NO: 205442 - DNA, 426 bp, synthetic construct
  misc_feature 1..426: note = Description of Artificial Sequence: Synthetic coding sequence
  source 1..426: mol_type = other DNA
atgagcgaggagaagcccaaggagggcgtgaagaccgagaacgaccatatcaacctcaaggttgcaggacaggacggatccgtcgtgcagtttaagataaaaagacacaccccactatctaagctcatgaaagcctactgtgaacggcaagttcggcatctggcccccccacaaagccttccggtgtgcgctctggtgctttgcgtgccgggaatccctcgggctagagctagtaggggctggactcagatgcagctccctgagggtctgtcaatgcgtcagattcggtttaggtttgatggacagccaatcaacgaaacagatacacctgcccaactcgaaatggaggacgaggacactatcgacgtattccaacagcaaactggaggtgtgcccgagagtagtctggccgggcactcattttag

SEQ ID NO: 205443 - DNA, 288 bp, synthetic construct
  misc_feature 1..288: note = Description of Artificial Sequence: Synthetic coding sequence
  source 1..288: mol_type = other DNA
atggccaacgagaagcccaccgaggaggtgaagaccgagaacaacaatcacattaatttaaaggtcgcaggtcaagacggatcagttgttcagttcaagatcaagcgacaaacccccctctctaagctgatgaaggcatattgtgaaccccgggggctgagcgtcaagcagattcggtttcgcttcgggggtcaacctattagtggaactgacaagcctgcccagctagagatggaagatgaagacacaattgacgtatttcagcaaccaaccggcggggtgtactag

SEQ ID NO: 205444 - DNA, 411 bp, synthetic construct
  misc_feature 1..411: note = Description of Artificial Sequence: Synthetic coding sequence
  source 1..411: mol_type = other DNA
atggccggcgccggcagcgccgccgtgagcggcgccggcacccccgtggctggccccaccggcagggacctgttcgcagagggcctgctggagtttctcagaccggctgtccagcagcttgactctcatgtgcatgcggttcgtgagtcccaggttgaactgcgcgagcagatcgacaacttggctacagagctatgtaggattaacgaggaccaaaaggttgctctcgatctggacccctacgttaagaagctgttgaatgccaggcgtcgggtggtcctcgttaataacattctgcaaaacgctcaagagcggcttcggcgtctcaaccacagtgtggccaaagagaccgcccgacgccgagcaatgctggatagtgggatttatccaccggggtccccagggaagtag

SEQ ID NO: 205445 - DNA, 2298 bp, synthetic construct
  misc_feature 1..2298: note = Description of Artificial Sequence: Synthetic coding sequence
  source 1..2298: mol_type = other DNA
atggccggcttcaagcggggctacgacggcaagatcgccggcctgtacgatctcgataaaacacttggccggggccacttcgccgtcgttaaactggctcggcacgtgttcaccggagaaaaggtggccgtgaaagttattgacaagaccaaactcgacaccctggccacagggcacttgttccaagaagttcggtgtatgaagctagtgcagcaccccaatatcgtgcggctatacgaagtgattgacacgcagacaaagttgtacctaatcctcgagctcggtgacgggggggatatgtttgactacatcatgaagcatgaagaaggtctgaatgaggacctggccaaaaagtactttgcacagattgtgcatgcgatttcatactgtcacaagctgcacgttgtccaccgggacctgaaaccagaaaatgtggtgttttttgaaaaacagggtctggtgaaattgactgacttcggctttagcaacaaattccagccagggaagaagcttaccacaagctgcggctcactggcttattccgctccagaaatactattaggtgacgaatatgacgctcctgctgtcgacatatggagtctgggtgtgatcctgtttatgctagtctgcgggcagcctccattccaagaggccaacgattctgagacactgacaatgatcatggactgcaagtacacagtcccgtcccatgtgagcaaagagtgtaaggaccttatcacaagaatgctgcagcgggatccaaagcgcagagccagccttgaggagatcgaaaatcacccttggctgcagggcgtagacccctcaccggcaacaaagtacaacatcccgctcgttagttacaagaatctctctgaggaggaacacaatagcattatacaacggatggtcttgggtgacatcgcagatcgagatgccatagtggaggccttagaaaccaatcgctataatcatattaccgccacatacttcctcctcgccgaaagaattctccgagagaaacaggaaaaggaaattcagactaggagcgcctccccgagcaacatcaaagcccagttccggcagagctggcctactaaaatcgacgttccgcaggacctggaggacgatctcactgcaacgccattatcacacgcaacagtgcctcagtcgccagccagagccgccgatagcgttctcaacggtcataggagcaaaggtctttgtgactccgctaagaaagacgacctgccagaacttgccggtcctgccctgagtaccgtcccaccagcgtcgctgaagcctaccgcctcagggaggaaatgccttttcagagtggaggaggatgaagaagaggacgaggaagacaagaagccaatgagcctcagtacacaggtcgtcttacggcgcaaaccgtcagtcactaatcgactcacgagtcgcaaaagcgcacccgtgttgaatcaaatcttcgaggaaggcgagagcgacgacgaattcgacatggacgagaacctgcccccgaaattatcaaggctcaagatgaatatcgcatctcctgggacggttcataaacggtatcataggcggaagtctcaaggtcgggggagtagctgttctagcagcgagacttccgacgatgactctgagtctcggaggaggctagataaggacagcggcttcacctattcctggcaccggcgagatagctccgagggaccccctggatccgaaggcgacggagggggacagtcaaagcctagtaacgcgagcgggggcgtcgacaaagcaagcccgtccgaaaacaatgcaggaggcgggtctcccagcagcggctcaggggggaaccccaccaacacaagcggcacaacgcgtcggtgtgcgggcccaagtaacagcatgcagcttgcctctcgttctgccggagaacttgtggaatcgttgaaacttatgagtctctgtctaggttcgcaactgcacggcagcacaaagtacattatagatccccagaatggtctaagttttagtagcgtgaaagttcaggagaagtccacctggaagatgtgtatctcctctacggggaacgctggccaggtcccagcagtgggcggcatcaagttttttagcgatcacatggccgacaccaccaccgagttggaacggatcaagtctaaaaacctgaaaaataacgtccttcagctgcctttgtgtgagaaaactatttcggtgaacatacaaaggaatcccaaagagggtctgctctgcgcaagctcacccgctagttgctgccatgtgatctag

SEQ ID NO: 205446 - DNA, 2298 bp, synthetic construct
  misc_feature 1..2298: note = Description of Artificial Sequence: Synthetic coding sequence
  source 1..2298: mol_type = other DNA
atggccggcttcaagcggggctacgacggcaagatcgccggcctgtatgatcttgacaagactctgggaaggggacacttcgccgtcgttaagttggcacgacacgtcttcaccggggaaaaagtggctgtgaaagtgatcgacaagacaaaacttgataccctagccacaggacatctttttcaagaggttcgttgcatgaagttggtccagcatcctaatatcgtgaggctatatgaagtaattgatacccagaccaagttgtacctgatcctcgaactcggagacggcggtgatatgtttgactacatcatgaagcacgaggagggactgaatgaggacctggcgaagaagtatttcgcccagattgtgcacgcgatatcatactgccacaaactgcacgtcgtccacagagacctaaagccagaaaacgttgttttcttcgagaagcaggggctggtcaagttaacagattttggattttccaataaattccaaccggggaaaaaactaactacatcctgcggctcactggcctacagtgcccccgagatcctgttaggtgacgagtacgatgcccccgccgtcgacatttggtcccttggggtaatcttgtttatgcttgtgtgcggtcagccaccctttcaagaggctaacgactcagaaaccttaaccatgatcatggattgcaaatatactgtccctagccacgtgagcaaagagtgtaaagatttaatcactcgtatgctgcagcgagaccccaagaggcgcgccagcctggaagagattgaaaatcacccttggctgcaaggcgtggaccccagccccgccaccaagtataacatccctctggtgtcatacaaaaatctgtccgaggaggagcacaacagcattattcagcgaatggttctgggggacatcgctgaccgtgatgcaattgttgaggccttagaaactaaccgatacaaccatatcacggcgacttactttctgctggctgaacgaatcctcagagaaaaacaggagaaagagattcaaacccggtccgcgagcccctcaaatatcaaagctcaattccggcagtcttggccgacaaaaattgatgttcctcaggacctggaggatgatctgactgctacccccttgagccatgctacagtaccgcagagtcccgcaagggccgccgactccgtcctgaacggccacaggtctaaggggctttgcgatagcgctaaaaaggacgatctgcccgagttggcaggccccgcactcagcaccgtaccgccggctagcctcaagcctactgcaagcggaaggaaatgtctgttccgcgttgaggaagacgaagaggaagacgaagaggacaaaaaacccatgagcctgtctacacaggttgttctccgccgaaaaccatccgtcaccaaccggctcacttcaagaaagtcggctcctgttcttaaccaaatcttcgaggagggcgagtctgatgatgaattcgacatggacgaaaacctcccacctaagctgagccggctgaagatgaacatcgcctctcccggaacagtgcacaagaggtaccacaggcgcaagtcccaaggtagagggtcatcctgcagctcctccgaaacatccgatgatgactccgaaagccgccgcaggctggacaaagactccggatttacgtactcttggcataggagggatagctccgagggccctccaggatccgaaggcgatgggggggggcagtcaaaaccctctaatgcatcagggggcgtcgacaaggcctcccctagtgaaaataatgcagggggaggctcccccagttcaggcagcgggggtaatcctactaatacatccggcaccacccgacgatgtgctggtccctccaacagcatgcaactggcaagtcggtccgccggcgagcttgtggagtcactaaaactgatgagtctgtgtctcgggagccagctccacggaagcaccaaatacatcatcgatcctcagaacggcttaagcttttcttccgtcaaggtgcaggaaaagagcacatggaaaatgtgcatcagctcaacggggaatgcaggccaggtcccagcagtgggcgggatcaagttcttctctgaccatatggcagatacaactactgaactggaaagaataaagagcaagaacctgaagaacaatgtgctgcagctgccactgtgcgagaaaacaatcagtgtcaacatccagcggaacccgaaagagggactcctttgcgcctcttctcccgctagctgctgtcatgtgatttag

SEQ ID NO: 205447 - DNA, 2298 bp, synthetic construct
  misc_feature 1..2298: note = Description of Artificial Sequence: Synthetic coding sequence
  source 1..2298: mol_type = other DNA
atggccggcttcaagcggggctacgacggcaagatcgccggcctgtatgatttggacaagaccctcggccgtgggcacttcgctgtggttaagctggcaaggcacgtttttacaggagaaaaagtggccgtcaaggtcatagataaaaccaagctggataccttagccaccgggcacctatttcaggaggtgagatgcatgaagctcgtccagcaccccaatatcgtgcggttatatgaagtgatagacacgcaaaccaagctctatctgattttggagttgggcgatggaggcgacatgtttgattacatcatgaagcacgaggagggcctgaatgaagatcttgctaagaagtacttcgcccagatagtgcacgccatttcctattgtcacaaattacacgtagttcacagggatcttaagccagagaatgtggttttctttgaaaagcaggggttggttaaactgactgacttcgggttctccaataaatttcagcctggcaagaagctgacgactagttgcggaagcctggcttacagcgctcccgaaatcctcttgggggacgagtatgatgcgcccgctgtcgatatttggagcctgggggtgatcctattcatgctggtttgcgggcagccacctttccaggaggcgaacgattcagaaacattaactatgattatggactgtaagtataccgtgccttcccatgtttccaaggagtgcaaggatctaatcactcgcatgctgcagcgcgacccaaaaagacgagctagcttagaggaaatcgagaatcatccatggcttcagggcgtggatccaagccctgcgacaaagtacaatatccctttagtcagttataagaatcttagcgaggaagagcataattccatcatccaacgcatggtactcggagacattgcagaccgcgatgcaatcgtcgaggctttggagactaaccgttacaaccatataaccgctacatattttctccttgcagagcgtatcttaagagagaagcaggagaaggagattcagactagatccgctagcccatccaatatcaaagcccagtttcgacagagctggccaacgaagattgacgtgcctcaagatttagaggatgacctaacggctacccccctgtctcatgcaactgtgcctcagagtcccgcacgcgcagccgatagcgtgctgaatgggcaccgatctaagggactgtgtgattccgccaaaaaggacgacttaccagagctagcaggtccagccctgtcgaccgtcccacccgcctctctcaagcctaccgctagcgggcgaaaatgtctattccgagtggaagaggacgaggaagaagatgaagaggataagaaaccaatgagccttagtacacaagtggtgttacggcgcaaaccaagcgtgactaacaggctcacatctcggaagtccgcgcctgtcctgaaccagattttcgaagaaggcgagtctgacgacgagtttgacatggatgagaatctcccaccaaaactcagcagattgaagatgaacatagcatcgcccggcacagttcacaagagataccaccgtaggaaaagccaaggacgggggtcttcctgctcaagttccgaaaccagcgacgatgacagcgaatcccgtcggagattagataaagactctgggttcacctactcctggcataggagggactctagcgagggaccgccaggctcagaaggggacgggggggggcaatctaagcccagtaatgcatcaggcggagtggataaggcatccccaagtgaaaataatgcaggaggagggtcgccaagctcggggagtggagggaaccctaccaatacctctggaacgacccgccgctgcgctggaccttctaactccatgcagttagcttcgcgatctgccggcgaattggtcgaaagcctgaagctcatgtctctctgcttagggtcacaattgcatgggagtacaaaatatatcatcgacccacagaatggattatcattttcatccgtgaaggttcaggaaaaatcaacctggaagatgtgtatctcaagtactggaaacgctggtcaggtacccgctgtcggcgggatcaagtttttcagtgaccatatggcggacactacaaccgagcttgaacggatcaaaagcaagaacttgaagaataatgttcttcaactgcccctgtgcgagaaaacgattagcgtgaatattcaacgtaatccaaaggaaggcctactctgcgccagctcccctgccagctgttgtcacgtcatttag

SEQ ID NO: 205448 - DNA, 9693 bp, synthetic construct
  misc_feature 1..9693: note = Description of Artificial Sequence: Synthetic coding sequence
  source 1..9693: mol_type = other DNA
atgcagagcagccccagccccgcccacccccagctgcccgtgctgcagactcaaatggtttctgacggcatgaccggaagtaaccccgtgagcccagcatcctcgtcaagtccggcttcgagtggggccggcgggatcagcccccagcacatagcccaggattccagtctagatgggccgcctgggcctcccgacggtgcaactgtgccattagaaggcttttcactgtctcaggcagctgatttggccaataagggtccgaagtgggaaaagtctcacgcagagattgccgagcaggctaaacacgaggccgaaattgaaacaaggattgccgaactccggaaggagggattctggtcactcaagagactgcccaaggtccccgagccgcctcggccgaagggccactgggactatctgtgtgaagagatgcagtggcttagcgccgattttgctcaggagcggaggtggaagcggggcgtagcccgaaaagtggtgagaatggtgatacggcaccacgaagaacagcggcagaaggaggaacgggcgagaagagaggagcaggcaaagcttcgcaggattgcctctacaatggccaaggatgtgcgtcagttttggagcaatgttgagaaggttgtccagttcaaacagcagtcccgcctagaagaaaagaggaaaaaagccttagacttgcatctggattttatcgttggacaaaccgaaaagtactctgaccttctgtctcagtcactcaaccaacccctaacctcatccaaagccggtagttctccctgtctcggcagttcctcggcagcaagttctccgcctcctccagctagccgcctggacgacgaagacggagacttccagccccaagaggatgaggaggaagacgatgaggaaacgattgaggtggaagagcaacaggagggaaacgacgccgaagcacagcgaagggaaatcgagttactacggagagaaggggagttgcctctggaagagctcctccgatcattgccgccccagcttcttgagggtccaagcagcccctcccaaaccccgtcttcccacgacagtgacacccgagacggacccgaagagggggccgaggaagagccgcctcaggtgctggagataaagccccctccgtctgcagttactcagcgcaacaagcagccttggcacccagacgaggatgacgaggaatttactgcaaatgaggaagaggcagaagacgaggaggacaccattgccgctgaggaacagctggagggtgaggtggaccacgctatggagctgtccgaactcgcacgggaaggggaactttcaatggaagagctgctgcagcagtacgctggcgcctacgcacccggttctggtagctcagaggatgaagatgaagacgaagttgacgctaacagtagtgactgcgagccagagggccctgtggaggccgaggaacctccccaggaggactcctcttcacagtccgattccgttgaggatcgaagcgaagacgaggaggatgagcacagcgaggaggaagaaacttctggatccagcgcctcggaagagagcgaatctgaggaaagtgaggatgcccaatctcagtcgcaggcagacgaagaagaggaggacgacgacttcggagtggaatatttactggctcgggatgaggaacagtccgaggccgatgccggttccgggcctcccacacccggtccgaccacgctggggccaaagaaagagatcaccgacatcgccgcggcagccgaatctttgcagccaaaaggctacactctcgccactactcaggtgaaaacccctatccctctgctgttgcgcggacagttgagagagtaccagcacattggactggactggctggtcacgatgtacgaaaaaaaactcaatgggatcctagcggacgaaatgggtcttggcaagactatccagactatctcacttcttgctcatctcgcctgtgagaagggaaattggggtccacacctaattatagtgccaactagtgtgatgctgaattgggaaatggaactaaaaagatggtgcccaagcttcaaaatactaacatattatggcgcccagaaggagcgaaaactcaaacgacagggatggactaagccgaatgccttccatgtttgtatcaccagctataaactggtgttacaggaccatcaagccttcagacggaagaattggcgatatttgattctggatgaggcccagaatatcaagaattttaagtcccagcggtggcagagcctgttaaacttcaactcacagcgccgcttactgctgacagggacaccactgcagaactccctcatggagctatggtccttaatgcacttcctaatgcctcatgtgttccagtcccaccgggagttcaaggaatggttttccaacccgttaaccgggatgatagaggggtctcaagagtacaatgagggtttggtgaagcgactccacaaggtgctacgaccgttcctgctccggcgagtaaaagtcgatgttgaaaaacaaatgccaaagaagtatgagcatgtcattcgctgtaggctgagcaagcgacagcgatgtctttacgatgacttcatggcacagaccaccacaaaggagacgctagccaccggccacttcatgtccgtcatcaacatcttaatgcagctgcggaaagtctgcaatcacccgaacctgttcgaccctcggcccgttacctcacccttcataacccccggaatctgtttttctacggccagcttggttctaagggctacagacgttcacccactgcaacgcatcgatatgggtagatttgacctaatcggactcgaaggtcgagttagcagatacgaggcagatacatttctgcctcggcatcggctttcacggagagttctgctggaggttgctaccgcacctgatccccctccacggcctaaacccgtcaaaatgaaagtgaacaggatgctacagccagtacccaagcaggagggaagaacggtggtggtggttaataaccctcgagcgccactggggccagttccagtccgccctccccccggtcctgagttaagtgcacaacctactcccggccccgtaccacaggttcttcccgctagcctgatggttagtgccagccccgctgggccccctctgattcccgcttctcgaccacctggacccgtcctgctgcccccattgcagcccaattccgggagcctgcctcaggtcctgccatcaccactgggtgtactctctgggacatctagaccacctactcctaccctcagcctgaagccaacacctcccgcccccgtccgactttcgcccgcacctccccctggttccagttcccttctaaagccgctgactgtgccgccagggtataccttccctcctgccgccgctaccacaacaagtacaactactgccaccgcaaccaccaccgctgtgcctgcgcctacccccgcgccacaacggcttattttgagtcctgatatgcaggcgcgcctgccaagcggagaggtggtgtcaatagggcagctcgcctcactggctcagagaccggtagccaatgccgggggcagtaagcctttgaccttccagattcagggcaacaagcttacactgaccggtgcccaggttagacagttggccgtcggccaaccacgacctctgcaaagaaacgtcgtgcacctcgtctccgcgggggggcaacatcatctgataagccagccagctcacgtggctttgattcaggccgtggctccaacgcctggcccaacaccagtgagcgtgctgccttcatccacgccctccactactcccgccccaactgggctgtcactgcctttggcagccaaccaggttccaccaactatggttaacaatactggtgttgttaagattgtggttaggcaagccccacgagacggcctgactccggtgcctcctctggcccctgcccctagacctccctcaagcgggcttcccgcagtgctgaatccacggcctaccctgactccggggaggttaccgacgcccacactgggaactgctcgggcaccgatgcccactcctacattggtgcgtcccttgctaaagttggttcactccccctcacccgaagtgagcgcttccgctcctggagctgcccccctgacgattagctcaccactgcatgtccccagcagcttgccgggccccgcatccagccctatgcctattcccaattcttcccccctcgccagtcctgtgagcagtaccgtgagtgtccccctgtccagcagcctccctatcagtgtgccaactactctgccggcacctgctagcgcccccctgaccatccctatcagcgccccccttaccgtatccgcctccggcccagcgctgctaacctccgtgactcctcctctcgcaccggtcgtcccggctgcacccggccctccctctctggcaccaagtggcgcaagtccaagcgcttccgcgttgacattgggattggccactgcacccagcctctcatcttcacaaacccccgggcatcctctgctgctggcccccacctcaagccacgtgccgggcctgaatagcaccgtggctcccgcctgcagcccggtcttggtccctgcaagcgccctcgctagccctttccccagcgcacctaatcctgcccccgctcaggcctccctgctagcccctgcgagcagcgccagccaggcactagcaaccccgctggctccaatggccgcaccccagaccgccatcctggcaccttctcctgcacccccccttgcccccctgccggtcctggccccctcgcccggagccgctcctgttctggctagtagccagacacccgttccggtgatggccccaagcagcacacccggcacttcattggctagcgcatccccggtacccgctcctactccagtgctcgctcccagctctacccagacaatgctccccgctcctgtgccgagtcccctgcccagccctgcttctactcaaacactggccctcgcccccgctctcgcccccaccctagggggctctagtcccagccaaacacttagcctggggacaggtaatccacaggggccctttccaacccagaccctgagtctgaccccagcaagtagcctcgtcccaactcctgctcagaccttgagcctggcccctgggccccctcttggtccaacccagacactgtcccttgctcccgcacctccgctggctcctgcatctcccgtgggacccgctcccgcacatacattgacgctcgcgcccgcaagctcatctgcatcattgctggccccagcttctgtgcagacgctgactctgtcgcctgcgccagtcccaactctggggcctgccgccgcccaaactctggccctggcacccgcaagtacccagtctcccgccagccaagcgagcagccttgtggtctccgcttcaggggctgccccactccccgttacaatggttagccggctgccggtaagcaaggacgaacctgatacccttacactgcggagtggaccaccctctccaccgagcacagccactagctttggaggccctagacctaggagacagcctccacctccaccacgcagccccttttacttggattctttggaggagaagaggaagcgccagcgttccgagcgcctcgaacgaatcttccagctgagcgaggcccatggagccctggcgcccgtgtacggcacagaagtcctagacttctgtacattgccacagccagtggcttcccccattgggcctcgctcaccagggcctagtcacccaactttctggacgtataccgaagctgcacatagggctgtgctgttcccccagcagaggctggaccaactgagcgagatcatcgagcggtttattttcgtgatgccgcctgtggaggctccccctccctccctgcatgcctgccacccgccaccatggctggcaccccgacaagctgcatttcaggaacaactggctagcgaactgtggccccgtgccaggccccttcaccgaattgtgtgtaacatgcgaacccagtttccagacctgagacttatccagtatgactgcggtaaactgcagaccctcgctgtgttgcttagacagctcaaggcggagggacatagagtcttaatctttacccagatgacccgaatgctagatgtgttggagcaatttctcacttatcatggccatctctatctaagactggatggttcaacccgcgtcgagcaaagacaggctctgatggagcggtttaatgccgacaaaagaattttctgctttatcttgtccacccgctctgggggagttggtgtgaacctgactggcgctgacactgtggtgttctacgactcagattggaaccccactatggatgcgcaagcgcaggacagatgccaccggatcggtcagacacgcgacgttcacatctacagattaatttcagaacgtacggtggaagaaaatattttaaaaaaagccaaccagaagcgtatgctgggcgacatggctatcgagggtggcaactttaccactgcttattttaagcagcagaccatacgcgagctcttcgacatgccattagaggagccgagctcttcatctgtgcctagcgcacctgaggaggaagaggaaacagttgcctcaaagcagactcacatactcgaacaggcactatgtcgtgctgaggatgaggaggatattagggccgcaacccaggcaaaggccgagcaggtagccgagcttgccgagttcaatgagaatgatggcttcccagccggggaaggggaagaggctgggagaccaggcgctgaggacgaagagatgagcagggctgagcaggagattgccgctctggtcgagcaactgacacctattgaaagatatgcaatgaaatttctagaggccagcttggaggaggtgtccagagaggagctgaaacaggcggaggagcaggtagaggccgccaggaaggatttggaccaggctaaggaagaggtgttccgcctgccccaggaggaggaggaaggcccaggcgctggtgacgaatctagttgcggaacagggggaggcactcatagaagaagtaagaaggccaaagcccctgagcgtccgggcaccagggtgagcgagcgcctgaggggagcccgggccgaaacccaaggcgctaaccatactccggtcattagcgcccaccaaacccgcagtaccaccactcctccgaggtgtagccccgctagagagcgcgtgccaaggcccgcgccgcggcccaggccaacgcctgcgtcggccccggcagcgatacctgcgctcgtgcctgtgccagtgtcagctcctgtccctatcagcgcaccaaatcctattactatcctgccagtccacatattgcccagccctccacccccgtctcagattccaccttgctcaagccctgcctgcacccctccccccgcgtgcactccgcccccggcccacactccacctcccgcacagacctgtctcgttacaccctcaagtcctctcttgctcggcccacccagtgtaccaatcagtgctagtgtgaccaatctgccgctgggactgcgccccgaggctgaattgtgtgcccaggccctcgcatctcccgaatcgctggagctggccagcgtcgcttcctcagagacaagctcattgtccctcgtgcccccaaaggacctgctacccgtcgccgttgagatcctgcctgtgtccgaaaaaaatttgtcactgactccatcagccccgagcctgactctggaggctggcagtattcccaatggtcaagagcaagaggccccagactctgccgaaggaaccacactcacagtgctgccagagggggaagagctgcccctgtgcgtgagcgagtcaaacgggctagaactgcctccctcggcagcgtcagatgaaccgctccaggagccattagaagccgatagaaccagtgaggagttgacagaggccaaaactcccacctcttccccggagaaacctcaggagctggtgacagcagaggtcgccgcaccatccacatcaagtagtgcgactagctcccctgaaggtcctagcccagcaagaccaccaagacgccggacctccgcagatgtggagataagaggccaggggactgggcgccctggccaaccccccggtccaaaagtgctgagaaaactgccgggaaggttagtgacagttgtggaggagaaagagctggttcggcggagaaggcagcagcgcggagccgcaagtacacttgtgcccggtgtgtcagagacaagcgcttccccaggttctccgagtgtacgatcgatgagtggtccagagtcatctcctccaattggaggaccttgcgaggccgccccaagttctagtctcccaactcccccccagcagccttttatcgcgcgacggcacatagaactgggagtaactggcggagggagccccgaaaatggcgacggtgctttgctggcaattacacccccagcagtcaaacggagacgaggccggcctcctaagaagaaccggtctccagcagacgccggccgaggtgttgatgaagcccccagcagtacgcttaaggggaagacaaatggcgcagacccagtcccagggcccgagacactaattgtcgcggatcccgtcctggagcctcagcttatcccggggccacagcccttaggcccacagcctgttcatcggcccaacccgttactgtccccggtcgagaaaaggcgtcgcggtagaccacctaaggcccgcgaccttcctattcccggtactatttcttcagccggagatggcaacagcgagtcccgcactcaacccccaccccacccatctcctttaactccgcttccgccactgcttgtttgtccaaccgcgacagtcgccaacacggtcacgactgtgaccatttcgacaagtccgccaaagaggaagaggggtagacccccgaagaacccaccctcaccacgtcccagtcaactaccggtcttagacagagattccacctccgtactggagagttgcggtctcggccgcaggcggcagcctcagggtcaaggtgagtccgaggggagcagtagcgacgaagacggtagtagaccattgactagactggcccgactgaggttggaagccgaggggatgcgtggtagaaaaagcggcgggagtatggttgtcgccgtgatccaagacgatctggatttagctgatagcgggccagggggactggaactgaccccaccagtggtgtccctcacaccaaagttgcggtctacaagattgcggccaggctctctcgtgcctccactcgagacagagaaactgccgcggaagcgggccggggcaccagtgggagggtcgccaggtttggccaagcgaggaaggctgcaaccccccagtccactgggccccgagggcagcgtagaagagagcgaagcggaggccagtggtgaggaggaggaaggcgacggcactcctaggagaaggcctggcccgcgtaggcttgtgggcacaacgaatcagggcgaccagaggattttgaggagcagtgccccacctagccttgcagggccagcagtgtcgcacaggggtagaaaagctaagacctag

SEQ ID NO: 205449 - DNA, 9219 bp, synthetic construct
  misc_feature 1..9219: note = Description of Artificial Sequence: Synthetic coding sequence
  source 1..9219: mol_type = other DNA
atgcagagcagccccagccccgcccacccccagctgcccgtgctgcagactcagatggttagcgacgggatgactggatccaacccagtaagccctgccagctcaagttcaccagcatcttctggtgccggtgggatctcacctcaacacatagcccaggactctagcttggatggaccacctggcccgccagatggagcgactgttcctctggaaggtttttcactctcccaggccgcagacctggccaataaaggacctaaatgggagaagtctcacgctgaaatcgccgagcaggccaaacatgaggccgagatcgagaccaggattgctgaactgcgcaaggaggggttctggtcgctgaaaaggctccccaaggtgccggagcctccaagaccaaaggggcattgggactacctctgcgaagaaatgcagtggctgtccgcggacttcgctcaggaaaggcgctggaaacgcggagttgcaaggaaggtggtaagaatggtgatccgccatcacgaggagcaacggcaaaaggaggagagagcacgtcgcgaagaacaggcaaagctgcgccgaatcgcatcaaccatggcgaaagacgtccgccagttctggagcaatgtcgaaaaggttgtccagttcaaacaacagagtaggctggaggaaaagaggaagaaagctctggacttacatctggacttcatcgtagggcagaccgaaaagtacagcgacctgttgtcacagagcctgaaccaacccttgacatcaagcaaggccgggagctcgccatgcctcggctctagtagcgctgcttcatcacctcctccaccggcctcccggttggacgacgaagacggagacttccagccgcaggaagacgaagaagaggacgacgaggaaactattgaagttgaagagcaacaggaagggaatgatgctgaggcccagaggcgggagatagaacttcttagaagagagggcgagctcccactcgaggagctgctccgctcactcccaccccagctgctggagggaccgtcttcgccctcacagactccctccagtcacgacagcgacacccgagacgggccagaggagggtgcggaagaggaacccccgcaggtcctggaaatcaagccgcctcctagcgccgtgacgcagcgaaataaacagccttggcatcccgatgaagatgatgaggaattcactgctaacgaggaggaagcagaggatgaagaggatactatcgccgccgaggaacagctcgagggtgaagtggatcacgcaatggagttgagtgagctagctagagaaggcgaactgtccatggaggaactcctgcagcagtacgcgggggcctatgctcctggttccgggtcctcagaggacgaggatgaggacgaagttgacgcaaatagcagcgactgtgagcctgagggccctgtcgaggcagaggaaccgccacaggaagactcttccagtcagagcgattctgttgaagatcggagcgaggatgaggaggatgagcattctgaagaggaagaaacgtccggctccagtgcctcagaggaaagcgagtctgaggaaagtgaggatgcccaaagccaaagccaagcggatgaggaggaggaagacgatgacttcggtgtagagtatcttctagcgagagatgaggagcagagcgaggccgatgccggcagtgggcctcccactccaggcccaactactctcggtcctaagaaggaaataacggatatcgccgctgctgcagagtctctgcagccaaagggctacactcttgccactacacaggtgaagactcccatccccctgctactgcgtggtcagctgagagagtaccaacacattggtctcgattggctcgtgactatgtacgaaaagaaacttaacggaatcttggccgacgagatgggcttaggaaagacgattcagactatttctctgttagcacatttagcttgcgaaaaaggcaactgggggccccacttaattattgtgccaacatctgttatgctcaattgggagatggaactgaaacgatggtgccctagctttaagatccttacatactatggagcacaaaaagaaagaaagctcaaacgacaggggtggaccaaaccaaatgccttccacgtttgtatcacctcctataaattggtgttacaggatcaccaagccttccgcaggaagaactggcggtatctgatcctggacgaagcccagaatatcaaaaacttcaaatcacaaagatggcaatctctactgaattttaatagtcagcgacggctgctactcactggtacacctctccaaaactctttgatggagctgtggtcactcatgcactttctgatgccccatgtctttcaaagtcaccgtgagtttaaggaatggttcagtaacccattgacaggcatgattgaagggtcccaggaatacaacgaaggcctcgtgaaaagactacataaagtgctgagacccttcctactgagaagggtcaaggtggacgtcgagaagcaaatgcctaaaaaatacgagcacgtaattcgctgtaggctgagcaagaggcagagatgcctttacgacgactttatggcacagaccactacaaaggagaccctagccacgggacactttatgtctgtgataaacatcctcatgcagctgaggaaggtgtgtaaccatccgaacctgttcgatcccagacctgtgactagcccatttatcacccctggaatctgtttttctacagcaagtctcgttctgagagcgacagacgttcacccactacagaggattgatatgggcagattcgatttgatcggcctggaggggcgtgtgtcacgatacgaagccgataccttcctgccacgacaccgtctttccaggagggttctgctggaggtggcgacagcacctgaccccccgccccgtccaaagccagtgaaaatgaaagtcaacaggatgctgcagcctgtacccaaacaggagggacgtacagtagtggtggtcaataaccctcgtgctccccttggccctgtcccagtgcgccccccaccgggccccgaactgagcgcccagccaacaccaggacccgtgccccaagtcctcccagcttctctcatggtctctgcaagcccagctgggccccctctcatacccgcaagtagaccccccggcccggtgctgctaccccctctgcagcccaacagtggaagcctgcctcaggcaggcgaggttgtcagcatcggacaactggcttcactagcgcaacggcccgtagctaatgctggcggcagcaaacctctgacatttcaaatccaggggaacaagttgacactcaccggtgcacaagttcggcaactggccgtgggccagccaagacctctgcagatgccaccaactatggtgaacaatactggtgtcgtgaaaatcgttgtccggcaagcccctcgggatgggctgactcccgtgccccccctggcacctgcccctagacctccaagctcaggactgcccgcagtgcttaaccctaggcctaccctcacacccggacgactgcccacccctaccctgggcaccgctcgagcccctatgcctacacctactctggttaggcccctcctcaaactggttcattctcctagccccgaagtaagcgccagtgctcctggtgccgctccgctcaccatctcctctccccttcacgtacctagctctctcccaggaccagcctcttcacctatgcccatcccaaattcctcccccctggcatccccggtgtcttctaccgtctctgtcccgttatctagcagtctgcccattagcgtgcccacaacgctgcccgctccagcgtctgccccattaacaatcccaatctcggctcccttgactgtgtccgcctccggaccagcacttctgaccagcgttacaccaccactggctcctgtggtcccggctgcccccggaccaccgtccctggcccctagcggcgccagtccaagtgcgtctgccctgactctagggctggccacagcacccagcctgagctcgagccagactcccggacatccgctgttgttggcccccacctcaagccatgttccaggactgaactccaccgtcgcccctgcctgctctcccgtcctagtgcccgcatcagccctggctagcccctttccctccgcacccaaccccgctcctgcccaggcatccctgctcgcgcccgcaagcagcgcaagtcaggctctagcaacccctctggccccgatggccgctccccaaacagccatcctggcccctagccccgccccacctctggcgccgttacctgttctggcaccctctccaggcgctgcccccgttctggccagttcccagaccccagttcctgttatggcacccagctctacccccggaactagcctcgcatctgccagcccagtgcctgcccctacacccgtgttggcccctagcagtactcagaccatgctgcctgcacctgtgccatctccccttccctctccagcaagcactcagacccttgccctggccccagcactggctcccactcttggaggctcctccccctcccagaccctttcgcttggaacaggcaatccccagggtccgtttcccactcaaacgctgtcattgacccccgcttcttcgctcgtgcccacacctgctcagactctgagtttggcgcccgggccacctctcggtcccacacagacattatccctggcgccagcaccgcccttggcccccgccagcccagtgggccccgccccagcccacacactgacactggccccagcttccagtagtgcttctctgctggctccagcctctgtccaaactctcacattgtccccagcccctgtgcccaccctggggcccgcagccgcccagactctcgccctcgcccctgcaagcacccaatctcctgcctcccaggctagctccctcgttgtgagcgcttctggggccgctcccttgcccgtcaccatggtgtcaaggctgcctgtgtctaaagatgagccagatacccttacactgcggtcaggtcccccgagtcctccgtcaacagcaactagtttcggtggaccccggccaagaaggcagcctccacctcctccaaggagtcccttctacctggatagcctggaggagaaacgcaaacggcagaggtccgaaagactggaacgaatctttcaactgtctgaggcccacggcgccctcgcacccgtttatggtaccgaagtgctcgacttttgcactcttccccagcctgtcgccagccctatcggtccccgaagccctggaccttcccatcctactttttggacctacaccgaggcagctcatcgcgccgttttattcccccaacaaaggttggatcaactttcagaaataatcgagcgatttatttttgtgatgcctccggttgaggcgccgcctccctcacttcacgcttgtcaccctcccccttggctagccccccgccaagccgcgttccaggagcaactggccagtgagctgtggcctcgggcccgcccactgcacagaatcgtatgcaatatgagaacacagtttcccgatctgcggctgatacagtatgattgtggcaaattgcagactctcgcagttttgctgcggcagctaaaggctgaagggcaccgcgtcctgatctttacacagatgaccagaatgttggatgtgctagagcagtttctgacataccacggacatctgtatctgaggttggatggatcaactcgggtcgagcagcgccaggccctgatggagcggtttaacgcagataagcggatattttgttttattctttccacacgaagcggcggcgtgggagtgaacctgaccggcgccgacactgtggtcttttacgactcagattggaaccccaccatggatgcacaggcacaggacaggtgccacaggattgggcagacccgggatgtccatatctacagactaatttcggaaagaactgtcgaagagaacattcttaagaaagccaatcagaaacggatgctgggcgatatggccattgagggcggcaactttaccacagcttactttaagcagcagactattcgtgaattattcgatatgccactagaggaacctagctcctcaagcgtgccttccgctccggaggaggaagaagaaaccgtcgcctcaaaacagactcacattctcgagcaagcactgtgtcgagcagaagatgaagaggacatccgggctgctacacaggcgaaagcagaacaagtggctgaacttgcagagtttaacgaaaatgacgggtttcctgctggtgaaggggaagaggcaggtaggcctggcgcagaagatgaggaaatgtctcgagccgagcaggagatagccgccctcgtcgagcagcttacccccattgaaaggtacgctatgaagtttttggaggcatccctagaagaggtcagcagagaggagctaaagcaggctgaagaacaggtcgaagccgcacggaaggacctggatcaggcaaaagaagaggtttttaggctccctcaggaggaggaagaggggccaggcgcgggcgacgagtccagttgtgggacgggcggcgggactcatcgacgatctaaaaaagctaaggctccagagaggcccggtaccagagtgtcggagaggctgcgcggggcaagagccgagacccagggggcaaatcatacccctgtgatcagcgcccaccagacaaggtctacaaccaccccacccaggtgctctcccgcgcgtgagcgtgtcccacgtcccgcaccacgcccgaggcccactccagcgtctgctcccgcagctatacctgcactggtccctgtacctgtgagcgctcccgtcccgatcagtgcccccaatccgattacgatcctgcctgttcacattcttcctagcccccctccaccttcacagattcctccatgcagcagccccgcatgtacccccccaccagcctgtacgcccccacctgctcatacccccccccccgcccaaacatgcttagtcaccccttccagtccgttgttgctcggccccccaagtgtcccgataagtgcttccgtgacaaatctcccactgggattacgccccgaagcagagctttgcgcccaggccttagcctcacctgaaagcttggagctcgcgagtgttgccagctcagaaaccagcagtctttccctcgtgcctcccaaagatctcctaccggtagcggtggagattttacccgtctcagaaaagaaccttagcctgacaccatccgcgccttctctcactctggaagccgggtcaatcccgaacggtcaggaacaagaggcaccggatagtgccgaagggacaactttgacagtattacctgagggtgaggaactgccactgtgtgtgtctgaatctaatggcctggaactcccccccagcgctgcatctgacgagcctctgcaggaacctcttgaggccgacagaacgagtgaggagctgaccgaggctaaaacgccaacctcgagccctgaaaagccccaggagcttgtgacagcagaggtagcagccccaagtactagctccagtgccacttcctcgcccgaagggccatcacccgcccggcctcctcggcggcgaacttctgccgatgttgagatccgtggacagggaacgggacgccccggtcagccacctggacctaaggttctcaggaaattgccaggcaggctcgtaaccgtggttgaagaaaaagaactcgtgagacgcagacgccagcagcgcggggccgcctctaccctcgtccccggcgtctcagaaacctccgccagtcctggatccccctccgtgaggagcatgtctggacccgaaagctcaccacccatcggaggtccctgtgaggctgcaccgagttcttccttacccactccgccccagcagccttttatcgcacgtcgccatatcgaactgggggtaacagggggtgggtcacccgagaatggcgacggggccttgctggcaattacgccaccagcggttaaaaggcgcagagggaggccacctaaaaaaaatcgcagtcccgctgatgccggcaggggcgttgatgaggcaccatcaagcacacttaaagggaaaactaatggggcggaccccgtgcctggaccagagaccctgattgtagctgacccagtcctcgaaccacagctgatccccggcccccagcctctcggcccccagcccgttcacagaccgaaccccctactatcgcccgtggaaaaaaggcgccgcggccgcccccctaaggctcgcgacctgccaatcccaggtactatatctagcgctggcgacgggaacagtgagtcccgtacccagcccccgccgcacccatccccgctgacaccactgccgcccttgctcgtgtgcccgaccgctacagtcgccaacacagtgactacagttaccatttctacttcaccaccgaaacgcaaacgaggaaggcctcctaagaacccacccagtcctagaccttctcagttacctgttctcgaccgagacagcacatctgttttagagtcatgtgggctggggcggagaagacagcctcagggccagggggagtctgaagggagtagctctgatgaggatggctcccggcctctgacaagactggcacggctgagactggaggcggaaggcatgaggggtagaaagtctggcggctccatggttgtggcagtcatccaggacgacttggaccttgcagattcgggtccaggagggttggagctgaccccgcctgtggtctctcttacaccaaagcttcgctctaccagactcaggccagggtccctggtaccccccctggaaactgagaaactcccaagaaagcgtgcaggcgcacctgtgggcggatcccccgggctagctaagagaggccggttgcaacccccctccccgttgggtccagagggctccgtagaagaaagcgaagctgaagcatccggggaggaggaggagggcgatggcacccctagacgaaggcctggaccccgccggctggtgggaaccaccaatcaaggcgatcagcggatcctgcggtccagtgcacccccctctttagctggccccgcagtgtcacataggggtagaaaggctaaaacttag

SEQ ID NO: 205450 - DNA, 9507 bp, synthetic construct
  misc_feature 1..9507: note = Description of Artificial Sequence: Synthetic coding sequence
  source 1..9507: mol_type = other DNA
atgcagagcagccccagccccgcccacccccagctgcccgtgctgcagacacaaatggtaagtgacgggatgaccgggtcaaaccccgtatcgcccgcatcaagctcaagtcccgcctcttctggcgctggtggaatatctccccagcatatcgctcaggacagcagtctagacggaccccctgggcctcccgacggagccacagttccactggaaggcttctcactgagccaggccgccgatctggccaataaaggtcccaagtgggagaagtctcacgcagagatcgcggagcaggcaaaacatgaagcagagatagaaacccggatcgccgagttgaggaaagaaggattctggagtttaaagcggctcccaaaggttcctgagccgccccgccccaaagggcattgggactacctgtgcgaagagatgcaatggcttagcgccgacttcgcccaggaacggaggtggaagcggggagtggccagaaaagtggtccgaatggtgattcgccaccacgaggaacagagacagaaggaggaacgggctcgtagggaggaacaagcaaagttgaggcggattgcgtctactatggcaaaagacgtgaggcaattctggtccaacgtggagaaagtggtccagttcaagcaacagtctagactggaagagaagcgtaaaaaagcattggatctgcaccttgacttcatcgtaggtcagacagaaaaatattcagacctcctgtcccagtcattgaatcaacctctgacaagttcaaaggcaggctccagtccgtgccttggaagctcatcagccgcgagctccccccctcctcctgcttccagattagacgatgaagacggggactttcagccccaggaggacgaggaggaggacgatgaggagaccattgaagttgaggaacagcaggagggtaatgacgccgaggctcagcgacgtgagattgagctcctaagacgggagggtgagttgcccttggaggaattactacggtctctgccacctcagcttctcgagggccctagtagtccttctcagactccctctagccacgattccgacactcgcgacggcccggaagagggcgcagaggaggagcctccacaggttctggagatcaagcccccaccgagcgcagtcacccagagaaacaagcagccatggcatcccgacgaagacgatgaagagttcaccgccaatgaagaggaagcggaagatgaagaggatacgatagcggccgaagagcagttggaaggggaggtggaccacgcgatggagctgtctgagctcgcccgtgaaggtgaactgagtatggaagaactactacagcaatatgctggagcctatgcccccggaagcggctcctccgaggacgaggacgaagatgaggttgatgccaattcatcggactgcgagcctgagggacctgtcgaggccgaagagcccccgcaggaagattccagcagtcagtctgacagcgtggaagacaggagcgaagacgaagaagacgagcatagcgaagaagaagagacaagcggcagtagtgcatccgaagagagtgagtctgaagagtctgaagatgcccaaagccagtcccaagctgatgaggaagaggaagacgatgatttcggggtggagtacctgctggcacgcgatgaggagcaatctgaggcggatgccggctccggaccccccacccccggaccaaccaccttgggccctaaaaaggagatcaccgacatcgctgctgcagccgagagcctccagccgaaggggtatacgcttgccactacccaggtaaaaaccccgattccactgcttctgcgaggacagctgcgggaataccaacacatcgggctggactggctcgtgactatgtacgaaaagaaactgaatggcatccttgctgacgaaatgggactgggtaagacaattcagaccatcagcctgcttgcacatcttgcctgcgagaaaggcaattggggccctcatctcatcattgtgccaacctcggtgatgctcaactgggagatggaattgaagaggtggtgtccatcctttaaaatcctgacatactacggcgcccagaaggaacggaagctcaaaaggcagggctggaccaaaccaaacgctttccatgtatgcattacatcatacaagctcgttctgcaggatcatcaggcctttcggcgaaagaattggagatacctcatactggatgaagcccagaacattaagaatttcaagtcacagcgatggcagagtctgcttaatttcaattctcagcgcaggcttttgctgacagggacacctctgcagaactccctaatggagttgtggtctctaatgcattttctgatgccacatgtgttccagtcccatcgtgagttcaaagagtggttttccaaccctctgacaggtatgatcgaaggatcccaggagtataacgagggtttagtgaagcgactccacaaggttctgaggccgttccttcttaggagagtgaaggtagatgtggaaaagcagatgcccaagaagtatgaacatgtgattaggtgtagacttagtaaaagacagcgctgtttgtacgacgacttcatggcacagaccactacgaaggagaccctggcaacagggcactttatgagcgtcattaacatcctgatgcaacttcgcaaagtgtgcaatcatccaaacctgtttgacccacgtcccgtcacgtcccctttcattactccagggatttgcttcagcacagcttccctcgtcctgcgtgctacagatgtccatccccttcagagaatcgacatgggtcgatttgacttgattggtctggaaggcagagtgagccggtacgaggcagacaccttcctgccccgtcacagactcagccggagggtgctgctggaagtggccacagccccggatcctccaccaagaccgaagcccgtgaagatgaaggtcaatcgtatgctgcagcccgtcccgaaacaggagggtcgtacagttgttgtcgtcaataacccacgcgctcctctcggacctgtcccagttcgccccccccccggtcccgagttgtcagcccagcccacgcccgggcctgtgccccaagtactccctgcttcccttatggtatcagcctctcctgccggtccacccctgatacctgcctcaaggccacctggcccagtgttactccctcccctgcagcctaactccggtagtttgccccaggtgttgccaagtcctctgggagtgctgtccggtacctcgagaccgcccaccccaactctctccctcaagccaaccccaccagccccggtgcggctaagcccagctccccctcccggctcttcaagccttctaaagcctctgaccgtgcctcccggctacaccttccctcccgctgccgcaacaacaacctccacgactactgctactgccactacaactgcagtgcctgccccgactcctgccccacagagattgattctgtcaccagacatgcaggccagactgcctagcggcgaagtagtatcaattgggcagctcgccagcttggcacaacggcccgtcgctaacgccggcgggtccaagcctttgacttttcagattcagggcaacaagctgacactgactggcgcccaggtacggcagttggccgtgggccagcctaggccgttgcagatgccacctactatggtgaacaatacaggcgtcgtcaaaattgtcgtgcggcaggcgccgagagacggcttgacgccggtgcctcctctggcacccgccccacgaccaccctcctccggcctaccagccgttcttaacccccgcccaacactgaccccgggaagactccctactcctacactgggaacagcacgggctccaatgccgaccccaacccttgtgcgaccgctactgaagctggtgcactctccatccccagaggtcagcgcttcagcccctggagctgctcccctgaccatcagtagccccctgcacgttccttcctcgctgccggggccagcaagttcccctatgcctattccaaatagcagccctcttgcctctcctgtgtcaagcactgtaagcgtgcccttgtctagttcacttcctatatcggtccctaccactctgcccgcccctgcttccgcccccttaacaattccaattagcgccccacttacagtctcagcctccggcccagccctcctcacctcagtgacacctcctttagctcccgtcgtgccagcagcccctgggcccccctcacttgccccttcgggagcgtcaccctctgcgagcgcactgactctggggctggccactgcaccttccctgtcctcaagccaaacacctgggcaccctttgcttttagcccctacttcctcccacgtgcctggcctcaatagtaccgtcgcccctgcctgctcccccgtcctagtcccagcaagtgcccttgctagcccctttccaagcgctccaaatcccgcccccgcccaggcgagccttctggctcctgcctcaagtgcatcacaggctctggcaactcctcttgcgccaatggccgcaccgcagacagcaattcttgctccatccccggcaccacctctcgctcccctgccagtcctcgccccttccccaggagcagcaccagtgctcgcatctagccagacacccgtaccagttatggcgcccagctcgactcccggtacctccctggcaagtgcctcccccgtccctgccccaaccccagtgctggctcccagttccacccagaccatgctgcctgcaccggtgccctcccctctgccaagccccgctagcacacagactcttgccctcgcccctgctctggcaccaactctgggcggttcttcgcccagccaaacgctgtccctaggcacgggtaaccctcaagggcctttcccaacacaaactctaagtctcactccagcgagctcacttgtcccaactcctgcccagactctgtcactggcccccggcccccccttgggccccactcagacccttagcctggcccccgctcccccactagcacccgcttccccggttggtcccgccccagcgcatacgttaaccctggcaccagcctcctcatccgccagccttctggccccggccagtgtgcagaccctgaccctgagccctgcccccgtgccaactttaggccccgctgctgctcagaccctggccttggcccccgcctctacccagagcccagctagtcaggcctctagcctggtggtgtcagcttcaggtgccgccccgctacccgtgacgatggtgagccgccttccagtgagcaaagacgagcccgataccctgacactcagaagcgggcctcccagcccgccctccactgctacaagtttcggcggaccccggccccgccgacagcccccgcctccgccccgttctcctttctatttggacagccttgaagagaaacggaagcgacagagatcggaacgtttagagagaatttttcaactgagtgaggctcatggtgctcttgctccggtctatggaaccgaggttttggatttctgtacacttccgcagcccgtggcctcccctatcggccctcgctcgcccggacctagtcatccgacgttctggacttacacagaagccgcccaccgcgccgtactgttcccgcagcagaggttggaccaattgtcagagatcattgaaagattcatcttcgttatgcccccggtcgaagccccaccccccagcctgcacgcatgccatcccccaccttggctcgctccacgtcaagctgctttccaggagcagcttgctagcgaattgtggcctagagccaggcccctgcatcgaatcgtgtgtaatatgagaacacagttccccgacctgagactgatccagtacgattgcggaaagctccagactcttgccgtgctcttgcggcagttaaaggcagagggccatcgggtgttgatctttactcagatgacacggatgttagacgtactggagcagttccttacatatcatggccatctctatctcaggctcgacggcagcactcgtgtagagcagcgccaagccctgatggaacggttcaacgccgataagcgaatcttctgcttcattctttccaccagatctggaggagtcggagtgaacctgactggcgctgacaccgtcgtgttctacgattcagattggaatcctaccatggacgcccaggctcaagatagatgccaccggatcggccagacgagagatgtccatatttaccggctcattagtgagcgtacagtggaggaaaatatcctgaaaaaggctaaccaaaaacgaatgctcggagacatggcgattgagggaggcaactttactacggcctactttaaacagcaaaccatcagggagctattcgatatgcccctggaagagcccagctcctcatccgttcccagcgcacccgaagaagaagaagagaccgtggcttcaaagcagacccacatcctggaacaggccttatgcagggctgaagacgaagaagatatacgcgccgcaacccaggcgaaagctgaacaggtcgcggagctcgcggaattcaacgagaacgatggatttccagccggtgagggcgaagaggctggccggcctggcgccgaagatgaggaaatgtctagggctgagcaggaaatcgccgctttagtggaacagctcacccctattgagaggtacgccatgaagttcttggaggcaagcctggaggaagtgtctagggaggagctgaagcaggctgaggagcaggtggaggcagcacgcaaagatctggatcaagcgaaggaagaagtattccggctgcctcaggaagaagaagagggaccaggagcaggcgatgagtcatcttgcgggaccggtggtggaactcacaggcgaagcaagaaggccaaggcacccgagcgtccagggacccgcgtcagcgaacgacttcgaggagcaagggccgagactcagggtgcgaatcacaccccagtgatcagcgcacaccagacccgctctaccacaacaccacccagatgcagccctgcgcgtgaacgggtccccagacccgcccctaggcctcgacccacccccgcgagtgctccagccgccatccccgcactggtgcctgtgcctgtctctgcccctgtgccgatctctgctcctaaccccatcaccatactgcctgtccatattcttccttctcctccccctccctcccagatccccccctgctcctccccagcctgtacacctcctccggcatgcacaccaccgcctgcccatacaccacctcccgcacagacatgtcttgtcacaccatcatcacctctcctcctcggccccccctccgtgcctatctcagcttcagtgaccaacctaccccttggcctgcgacctgaggctgaactgtgtgctcaggcgctggcgtccccggaatcattggagctggcctcagtggcgagttcagagacatcctcactctctctggtgccgccaaaagatctgctcccagtcgcggtggagatcctccccgtctctgagaaaaatctgagtcttacaccttcagccccttccctgacgttggaggcaggctcaattccaaatggacaggaacaggaagccccggacagcgcagagggcaccacactcacagttctgccggaaggcgaagaacttccactgtgcgtgtccgagtccaatggcttagagctgcccccctctgcagcctccgatgagcccctccaagagccactcgaagcagatagaacaagtgaggaacttacagaagctaaaaccccaacctccagtcctgagaagccccaagaactggttaccgcggaagtggcagctccatcaacttcttcttctgccactagcagtcctgagggcccatccccagcacgcccaccacgacggcgaacaagcgcagatgtggaaattcgcgggcagggcacagggcggcctggtcagccgcccggccccaaggtccttcgaaaactgcccggccgcctggtcacagtggtggaggagaaggagcttgtcagaagacggcggcagcagagaggagcagcctccaccttagtgcccggtgtgtccgagacttcagctagtccagggagcccttctgtgcggtccatgtccggtcctgagagcagccctcccatcggaggcccctgtgaggccgcaccaagctcatctcttccgactcccccacagcagccatttatcgctagaaggcatatcgaactcggagtgacgggaggaggtagtccagagaacggagatggggctctgctggcgatcacgccacccgccgttaaaaggagacgtggccgccctcccaagaaaaatcgcagccctgctgacgcggggaggggtgttgacgaagccccatctagtaccctcaaggggaaaacgaatggcgcagaccctgttcctggacccgaaacacttattgtggcagatcccgtgctcgaaccacagctgatcccaggtccacagccactggggcctcaaccagttcaccgtcctaacccactgctttctccggtggagaagcgcaggcgaggtcgccctcctaaagcccgcgacctacctatcccaggaaccataagttctgctggcgatggaaactccgaatccagaactcagcccccaccccacccttctccgttgactcctctgccaccgttactggtttgccctacagccacagtggccaacacggttacaacagttaccatctctacaagtccccccaagaggaaacgcgggagaccccccaagaaccccccatcaccacgaccatctcaattacctgtgctggacagggatagcacttccgttctggagagttgcggactggggagaaggagacagcctcagggacaaggtgagagtgagggttcatcttccgatgaggatggctcgcgaccactgactagactcgcccgactccgcctggaagccgagggtatgcgcggacgcaagtctggaggctcaatggtcgtggccgtaattcaggatgatctggacctggccgactctggccctggcggattggaactcactcctcctgtcgtgtccctgacccccaagctgagaagcacccggttgcggcccggttctctggtgcccccgctggagaccgagaaactgcctcgaaaacgtgcaggggctccggtgggggggagccccggattagccaaacgcggccgcttgcaaccaccctcacctctgggcccggagggatccgtggaggaatccgaagcagaggcctctggggaggaggaggagggcgacgggacgcctagacggcggcccggccctcgccgactggtcggaaccacgaatcagggtgaccagcgtatccttaggagctccgcacccccaagccttgctggacctgcagttagccatcgcggacgaaaggccaagacttag

SEQ ID NO: 205451 - DNA, 180 bp, synthetic construct
  misc_feature 1..180: note = Description of Artificial Sequence: Synthetic coding sequence
  source 1..180: mol_type = other DNA
atgcagagcagccccagccccgcccacccccagctgcccgtgctgcagacccagatggtgagcgacggcatgactggcagtaaccctgtcagccctgcctcctctagctccccagcctcatcgggggctggtggcattagccctcaacacatcgctcaggattcctctttggatgggtag

SEQ ID NO: 205452 - DNA, 774 bp, synthetic construct
  misc_feature 1..774: note = Description of Artificial Sequence: Synthetic coding sequence
  source 1..774: mol_type = other DNA
atgcaccggcggggcgtgggcgccggcgccatcgccaagaagaagctcgccgaggccaagtataaggagcgcggaaccgtcctggccgaagatcagttggctcagatgtcaaagcagctggacatgtttaaaacaaaccttgaagagttcgcttctaaacataagcaagagattagaaagaatccggaattcagagtgcagttccaagatatgtgcgctaccattggcgtggaccccctggctagcggtaagggcttctggtctgaaatgctgggcgttggtgatttctattacgaactcggcgttcagattattgaggtttgtctagcgctgaagcaccggaatgggggactaataactctggaggaattacaccagcaggtgttaaaagggcggggcaaattcgcacaagacgtctcccaggatgaccttatccgggccattaaaaaactcaaagcgcttggcacgggattcggtatcatacctgttgggggcacttatctgattcagtccgttcctgctgagctgaatatggatcatactgtggtgttgcagctcgccgagaacggctacgtcacagttagtgagatcaaagcgtcacttaagtgggagactgaacgagccagacaggtgcttgagcatctgctgaaagagggcctcgcctggctggatctacaggcccctggagaggcacattattggttgccagcattgtttacggacctctactcccaggaaatcacagcagaggaggcgcgtgaagccctgccttag

SEQ ID NO: 205453 - DNA, 777 bp, synthetic construct
  misc_feature 1..777: note = Description of Artificial Sequence: Synthetic coding sequence
  source 1..777: mol_type = other DNA
atgcaccggcggggcgtgggcgccggcgccatcgccaagaagaagttagctgaggcaaagtataaggagagaggtaccgtgctggctgaggaccagctcgcacagatgtctaagcagcttgacatgttcaagactaacctggaagaattcgcttccaaacataagcaggagatccgcaagaatccagagttccgggtgcagtttcaggatatgtgtgccaccattggcgtcgacccccttgcaagcggtaagggattttggtccgaaatgcttggtgtgggagacttttactacgagttgggagttcagatcattgaggtgtgcctggccctcaaacacaggaatggagggctgatcacactggaggagctgcatcagcaggtcttgaaagggaggggcaagtttgctcaggatgtatcacaggacgacctaatccgggcaataaagaagctaaaagcgcttggtaccggctttggcatcatacccgtgggtggcacttatctgatccagagcgtgcctgcggagcttaacatggatcacaccgtggtgctccaactcgccgaaaagaatggctacgtcaccgtgtccgaaataaaggccagcctcaaatgggagacggagcgcgccaggcaagttctcgagcacctcttgaaggagggtctggcttggctggatcttcaagcccccggcgaagctcattattggctgcccgccctcttcactgacctgtacagccaggagatcaccgccgaggaggctcgagaagcactcccctag

SEQ ID NO: 205454 - DNA, 1611 bp, synthetic construct
  misc_feature 1..1611: note = Description of Artificial Sequence: Synthetic coding sequence
  source 1..1611: mol_type = other DNA
atgagcagcagcctgggcaaggagaaggacagcaaggagaaggacccaaaggtgccatccgccaaagaacgcgaaaaggaggctaaagcttctggcggtttcggaaaagagtctaaggagaaagagccgaagactaaaggaaaggatgcgaaggacggaaagaaggatagctccgcagcacagcctggcgttgccttctcagtagacaacacaatcaagcgccccaacccagccccagggactcggaagaaatcatctaacgcagaggtaataaaagagttaaataagtgtcgcgaagagaatagcatgcggctggatctaagcaagagaagtatccatattctgcctagtagtatcaaagagctcacccagctgactgaactatacctatattccaacaaactgcagtccctgcctgccgaagtcggatgtctggttaacctgatgaccttggcactcagtgaaaactctctgacctctctcccagacagtctcgataacctgaaaaaattaagaatgcttgacctcagacataacaaattacgagaaatccccagtgtagtctaccgcctggacagcctgacaactttgtatctcagatttaaccgtatcaccacagtggagaaggacattaagaaccttagcaaactcagcatgctgtccatcagggagaacaaaatcaaacagctgcccgcagaaatcggaaaccttagctctcttagccgactgggcctgcggtataatcggctgagcgctatcccccgatcgctcgctaaatgcagcgcccttgaggagctcaatctggagaataacaacatttctacactgcccgagagcttactttcctctctggttaaactgaacagtctcaccctcgctcgcaactgctttcagctgtacccagtgggaggccccagccagttcagcaccatttactcgctcaacatggagcataatcgtatcaataaaattcccttcgggatctttagccgagccaaggtgctgagcaaacttaacatgaaggacaatcagctgactagcctacctctggacttcgggacatggacaagcatggtggaactcaatctggccactaatcagctgaccaagatcccggaggatgtgagtggtctggtcagcctggaggtgcttatcctcagcaataacctcttgaagaagctgccccatggcctgggcaatctcaggaaattgagggagctggacctggaagagaacaagcttgaatcactgccaaacgaaatagcttacctgaaagatcttcagaagcttgtgctaacaaacaatcaactaaccactttgccccgcgggattgggcaccttacaaatcttactcacttgggactgggtgagaacttactaacccatctgccagaggagattggaactctcgaaaaccttgaggaactgtacctgaatgacaaccccaacctccactcacttcccttcgaattagccctctgcagcaagctctccattatgtccatcgagaactgccccctcagccatctgcccccacagattgtggccggcggtccctcgtttattatacagtttctgaagatgcagggcccttatcgagcaatggtgtag

SEQ ID NO: 205455 - DNA, 1749 bp, synthetic construct
  misc_feature 1..1749: note = Description of Artificial Sequence: Synthetic coding sequence
  source 1..1749: mol_type = other DNA
atgagcagcagcctgggcaaggagaaggacagcaaggagaaggaccccaaggtgccaagcgcgaaagagcgggagaaggaggctaaggcatcaggaggcttcgggaaagagagcaaggagaaagagccaaagactaagggcaaggacgcaaaagatgggaaaaaagattcaagtgctgctcagccgggagttgcattctcagtcgacaacaccataaaaaggcctaaccccgcgccaggtacgcgcaaaaaatcaagcaacgctgaagtgattaaagaactcaacaagtgcagagaagagaattcaatgcgactcgatctgtctaagaggtctatccacattctgccttcatctatcaaagaactgactcagctgactgagctgtacctttactccaataaactccagtccctcccggccgaggtgggttgcttggtgaatttaatgacattagccctgagcgaaaattcactgaccagcttgccagactcgttggacaatcttaagaaactgcgaatgctcgatctcaggcacaacaagttgcgggagattccatcagtggtgtacaggttggatagcctgaccaccttgtatttaagatttaaccgcatcacaacagtcgagaaggacatcaagaatctttcgaagctgagcatgctatccatcagggagaataaaatcaaacagttgcccgctgagatcggggagctgtgcaacctgattaccctagatgttgctcataaccagttagaacacttgcctaaagagatcggtaactgtacccagattacaaatctggacctgcagcataacgaattactcgacttacctgatacgatcggaaacctgagtagcttgtcgcgcttggggctgagatataaccgcctttccgctattccaaggtctctggcaaagtgtagtgccttagaggaattaaacctggagaataacaacatatcaacgcttccggagtctctgctgtcatcattggtcaaattgaacagtctcacactggccaggaattgctttcaactttatcctgtcggaggcccttcccagtttagtacaatctactcgctcaatatggagcacaataggattaataagattccattcggcatattcagtagggccaaggtcctgtccaaattaaatatgaaggacaaccagctgaccagtctgcccctagacttcggtacttggacctctatggtcgagctgaatctggccactaatcagttaactaagatacctgaagatgtaagtggtctggtctcccttgaagtgctaatcctgtcaaataatctgctaaagaagctgccgcacgggctgggcaacctgagaaaactgcgagaattggatttggaagaaaataaattggagagccttccaaacgaaattgcctacttaaaagacctgcagaagttggtgttgacaaacaaccagttgacaacattacctagaggaatcggccaccttactaaccttacccacctgggactcggggagaacctcttaactcatctccctgaagagatcggtactttggaaaatctggaagagctgtatctcaatgataaccctaatctgcatagcctgccgttcgaactggccctctgcagcaagttatccatcatgtccatcgagaattgtccgctcagtcacctcccccctcaaattgtggccggagggccttcattcattattcagtttctaaagatgcaaggaccataccgggcgatggtgtag

SEQ ID NO: 205456 - DNA, 1119 bp, synthetic construct
  misc_feature 1..1119: note = Description of Artificial Sequence: Synthetic coding sequence
  source 1..1119: mol_type = other DNA
ctggacaacctgaagaagctgcggatgctggacctgcggcacaacaagctgagagagatcccgtctgtggtgtaccgactggattccctgacaaccctgtacctgcgcttcaatcggatcactacggtggagaaagacatcaaaaacttgagcaagctaagcatgctatctattagagagaataaaatcaaacaactgcccgccgagataggaaacctgtcttcattatcccgactcggactgcgatacaaccgcttaagtgctattcccaggtccctggcaaagtgttccgcactagaggagctaaatctcgagaataataacatctctacactgcccgagtctctgctgtcttcactggttaagctgaacagcctcactctggcccggaattgctttcagctgtatcccgtgggcggtccttcacaatttagtaccatctactcccttaatatggaacacaacagaataaataaaatccccttcggaatattcagcagagcaaaggtgttaagtaaattgaacatgaaagataatcagctgacatcattacctctcgatttcggaacctggacgtcgatggtggagctcaacctcgctaccaatcagttgacaaaaatcccagaagacgttagcggactggtctcacttgaagttcttatcctgagcaacaacctcctgaagaaactgcctcacggtctggggaatcttagaaaactccgggagctggatctcgaagagaataagctagagagtctccccaatgagatcgcatacctaaaagacttacaaaagctagtgctcaccaacaaccagctaactaccctacctaggggaattggccaccttacaaatctcactcatctgggccttggagagaatctgttgactcacctgcctgaggaaatcgggacactcgagaatctcgaagaactgtatctgaacgataacccgaacttacattccctgccctttgagctggctctctgcagcaagctctctattatgtccatcgaaaactgtcctctgagccacttgcctcctcagattgtcgcaggcggacctagctttataatccagtttcttaagatgcagggtccgtacagagcaatggtttag

SEQ ID NO: 205457 - DNA, 588 bp, synthetic construct
  misc_feature 1..588: note = Description of Artificial Sequence: Synthetic coding sequence
  source 1..588: mol_type = other DNA
atgctgcgggacggccggttcgcctgcgccatctgcccccaccggccggtgctcgataccctcgccatgctgactgcacatcgagccggaaagaagcatctgtccagcctccagcttttttacggaaaaaagcagccaggcaaggagcgtaaacaaaatcctaaacaccagaacgaacttcgtagagaagagaccaaagcagaggcaccattattgacccaaacaaggcttattacacaaagcgccctacatagggcccctcattacaatagctgctgcaggcggaagtaccggcccgaagcacccggcccgagcgtgagcttgtcccccatgcccccatccgaggtaaagctccagtcaggaaagatttcaagggagcccgaaccagccgccgggccgcaagccgaggagagcgcaaccgtgtcagcccccgcaccaatgtccccaacgcgtcgcagagccctggaccactacctgaccctccgcagttccggttggatccctgatgggcgcgggaggtgggtgaaggacgaaaatgtggaatttgactctgatgaagaagaacctcctgatctcccccttgattag

SEQ ID NO: 205458 - DNA, 693 bp, synthetic construct
  misc_feature 1..693: note = Description of Artificial Sequence: Synthetic coding sequence
  source 1..693: mol_type = other DNA
atgagcttcaagcgggagggcgacgactggagccagctgaacgtgctgaagaagcgaagggtgggagacctgctcgcatcctatatccccgaagatgaggccctgatgctgcgcgatggtcgttttgcttgtgcaatttgtccccacaggcccgtgttggatactcttgccatgctgacagcccatcgtgcaggtaagaaacacctctcaagcctgcaacttttttacggaaagaagcaacctggaaaggaacgaaagcagaatcctaagcaccagaacgagctgcgtcgcgaggaaacaaaggccgaggccccactccttacacagacccgtctcatcactcaatcagcccttcacagagcaccccattacaacagctgctgcaggcgaaagtacagacctgaggcgcccggtccctctgtcagcctgtcgccgatgcccccgagtgaagtgaaactacagtctggcaagatttctagggaacctgagcccgctgctggaccccaggccgaagagagtgccacagtgtccgcccccgctccgatgtcacccactaggagaagggcattagaccactatctgacattaagatctagcggctggattcctgatggacgtggccgatgggtgaaagacgagaacgtcgagttcgactccgacgaggaggagccaccagatctaccgctggactag

SEQ ID NO: 205459 - DNA, 1038 bp, synthetic construct
  misc_feature 1..1038: note = Description of Artificial Sequence: Synthetic coding sequence
  source 1..1038: mol_type = other DNA
atgtacaaggactgcatcgagagcaccggcgactacttcctgctgtgcgatgctgaaggtccttggggaattatactcgagtctctggccatcctgggcattgtagtaacgattctgctgctgttggcattcctctttctgatgcggaagatacaggactgctcacaatggaacgtattgcccactcagctgctcttcttgttgagtgtgctgggcttatttggcctggcattcgctttcatcatcgagctgaaccagcagacggcccctgtgcggtattttctgttcggtgttctgtttgccctgtgctttagttgcttactagcccacgcctctaacctggtgaagctggtgcggggttgcgtgagtttctcttggactaccattctgtgcatcgctattggatgttcattactgcaaattataattgctactgaatatgtaacactaatcatgacacgggggatgatgttcgtgaatatgactccatgccagctcaacgtggattttgtggtgctgctcgtttacgttctcttcctgatggccctcacgttcttcgtcagcaaagccactttctgcggcccatgtgaaaattggaagcagcacggtcgcttaatctttatcaccgttctgttctccatcattatttgggtggtttggatcagcatgttgctgcgcggcaatccacaatttcagcgtcaaccccagtgggatgatccggtggtgtgtattgctctcgtgaccaacgcctgggtatttttactgctctacattgtgccagaattgtgcatcttataccgctcttgtcgccaagagtgtccactgcagggaaatgcctgtccagttaccgcctatcagcactccttccaggtggagaaccaggaactgagtcgagccagggacagcgatggtgctgaggaggatgtcgctctcacatcttacggaacaccgatccagccgcaaacagttgatcctacccaggaatgctttattcctcaggccaagctgagtcctcaacaggacgctggcggcgtgtag

SEQ ID NO: 205460 - DNA, 2076 bp, synthetic construct
  misc_feature 1..2076: note = Description of Artificial Sequence: Synthetic coding sequence
  source 1..2076: mol_type = other DNA
atggagggcaacaagctggaggagcaggacagcagccccccccagtccactccgggcttaatgaaagggaacaaacgagaggagcagggcctaggaccagaacctgcagccccccaacagcccactgctgaggaagaggcattgatcgagttccaccggtcatacagagaactgttcgagtttttttgtaacaatacgaccattcacggagcaatcagactagtgtgctcccagcataaccgcatgaaaactgccttttgggcagttttgtggctgtgcactttcggaatgatgtactggcagtttgggctgctgtttggagaatattttagctaccctgtgagcctcaatattaatctcaatagcgacaaattggtgttccctgcagtgacaatttgcaccttaaacccctacaggtatccagaaatcaaagaagaactcgaagagctggaccgcatcactgaacagactctcttcgatctgtacaagtattcctctttcaccactctcgttgccggcagtagaagcagacgggatttgaggggcaccctccctcaccctctccagcggttacgggttccacctcctccccatggggcacgtcgagcaaggtcagtcgccagttcgctccgcgacaataacccccaagtagattggaaggactggaagataggctttcagttatgcaatcagaataaatctgactgtttctaccagacctacagctccggcgtggacgctgtgagggaatggtatcggtttcattatattaatatcctctcacggcttccagagaccctcccctcattggaggaagacacgctaggaaattttatcttcgcatgcaggttcaatcaggttagttgcaaccaggctaattacagccatttccaccatcccatgtacggcaattgctacaccttcaacgataagaacaatagtaatctgtggatgtcctctatgcctgggattaataacggcctatccctgatgctgagggcagagcaaaacgattttattccattgctcagcacggtgacaggggctcgggtaatggtgcatggccaggatgaacctgcttttatggatgatggcggcttcaacctaagaccgggagtggagacaagcatttctatgagaaaggagacactggaccgcctagggggggattatggcgactgcacaaagaatggctccgatgtgcctgtagagaatctatacccatcaaaatatacacagcaggtgtgcatccatagctgcttccaggaaagtatgatcaaggagtgtggatgcgcctatatcttttatccgaggcctcagaacgtagagtactgcgactacagaaagcactcatcctggggtcaggtccggagcctcaccccagtgattccagccctctgggaggccgaagcgggtaggtctcgaggatactgctattacaagctccaagtcgacttctctagcgatcacctcggatgctttaccaagtgtcgcaaaccttgcagtgtaaccagctaccagttgtctgcaggctactctcggtggcccagcgtgacctcccaggaatgggtgttccagatgctatctagacagaacaattataccgtaaacaacaaacggaatggcgtggcaaaggtcaatatcttttttaaagagctcaattacaaaaccaactcagagtccccatctgtcaccatggtgactctactgagcaacctagggtcacagtggtccttatggtttggttcttcagtgttatccgtagtggagatggcagaacttgtgttcgacttactggtcattatgttcctgatgttacttcgccgcttcaggagtaggtactggtcacccggaaggggagggcgtggcgcccaggaagtggcgagtaccctcgccagttcacccccttctcatttctgtccacaccccatgagcttgagtctgtcacaaccgggaccagccccatcgcctgccctgaccgcacctccacccgcttacgcgaccctggggccccggccctccccaggggggtctgctggggcctcaagctccacctgtccgttgggcggtccctag

SEQ ID NO: 205461 - DNA, 2058 bp, synthetic construct
  misc_feature 1..2058: note = Description of Artificial Sequence: Synthetic coding sequence
  source 1..2058: mol_type = other DNA
atgctgctgcacatcaaccccgcctacctgttcaagctgctgcacggtttccctccatggatcatgccaactgacgggaatctgggggacaaaaatttccagatgggaaaacccggacatagagaaggcgcaaccatgcatgtgaagaagtatttgctgaagggtttgcatcggttgcagaagggccctggttatacctacaaagagctcttggtatggtactgcgataacacaaacacccacggcccaaagaggattatttgtgagggtccgaaaaagaaagccatgtggttcctgctcacactgctgtttgctgcattggtctgctggcagtggggaattttcattcggacctacctaagttgggaggtctcggtaagcctgtcggtgggatttaaaacaatggatttcccagccgtgacaatttgtaatgctagtccctttaagtacagcaaaatcaaacacctcctgaaagacctggatgagctgatggaagccgtcctagagcgcatcctggccccagagctgagtcacgccaatgccacaaggaatctgaacttctccatctggaatcacaccccgttggtcctcattgacgagcgcaatcctcatcaccctatggtgttagacctgtttggagataaccacaatggcctgacctcaagtagtgcctctgagaagatctgtaacgcacacggctgtaagatggcaatgcgactgtgttctctcaaccggacacaatgcactttcaggaattttacttctgccacgcaggccctgactgaatggtacattctacaggcaactaacatcttcgctcaggtgcctcagcaggagcttgtagaaatgtcataccccggggaacagatgatattggcgtgcttgtttggagcagagccctgtaattaccgaaatttcacatctattttctatccgcattatggaaactgctatatctttaactgggggatgaccgaaaaagctctgccaagtgcgaatcccggaacggaattcggtctgaagctcatcctggatattggacaggaggactatgttccgtttctggcctccaccgccggagtgagactaatgctgcatgagcaacgctcttatccatttatcagagacgagggcatctacgcaatgtcaggaacagagacaagtattggtgtgttagtggataagctgcagagaatgggcgagccgtactcaccctgcacagttaatggttctgaagtcccagtgcagaacttctatagtgactacaacactacttattcaattcaggcatgtctgcgatcatgttttcaagaccacatgattcgtaactgcaattgtggtcattatctgtatccactgccccgcggggagaagtactgtaacaatagggactttccagactgggctcactgctattctgacctgcagatgagtgttgctcagagagaaacgtgcattgggatgtgtaaagaaagctgtaatgatactcagtacaagatgaccatctctatggctgattggccttcagaggctagcgaggattggatattccacgttctttcacaggagcgcgaccagtcaactaacatcactctgagcagaaagggcatcgtgaagttgaacatctatttccaggagtttaactataggacaattgaggagagtgccgcaaataacattgtgtggctgttgtctaatctgggaggccagtttggtttctggatgggcggaagcgtcctgtgtctcatagagtttggggagatcatcatcgacttcgtctggatcactattatcaagctggttgcacttgcaaagtcactcaggcaacgcagagcccaggcgtcctatgccggacctccaccaactgtagccgagttagtcgaggcccatactaatttcggatttcagccagataccgctcctcggagccctaacacagggccctatccctcagaacaggcacttcctatccccggaacaccccctccaaattacgactccctgcggctgcaacccctggatgtcatcgaatccgactcagaaggagacgccatatag

SEQ ID NO: 205462 - DNA, 1923 bp, synthetic construct
  misc_feature 1..1923: note = Description of Artificial Sequence: Synthetic coding sequence
  source 1..1923: mol_type = other DNA
atgcacgtgaagaagtacctgctgaagggcctgcaccggctgcagaaagggccgggttatacttacaaagagctgctcgtgtggtactgcgacaacactaacacccacggacctaaaagaattatatgcgaaggcccaaagaagaaggccatgtggtttcttctaacgctgttgttcgccgcactggtgtgctggcagtggggcatttttatcagaacatatctcagttgggaagtatccgtcagcctttcagtgggctttaagactatggatttccccgctgtcacaatttgtaacgctagccccttcaagtactccaaaataaaacacctcctgaaggatttggatgagcttatggaggctgttctagagaggatactggcgccagagctgtcccatgccaatgccaccaggaatctgaactttagcatctggaatcacacacccttggttctgatagacgaacgcaatcctcaccacccaatggttctggacttgttcggagacaaccataacggtctaaccagtagcagtgcaagcgaaaaaatctgcaacgcgcacggatgtaaaatggccatgcgactctgctcactgaatcgcacacagtgtacattcagaaatttcacgagtgctacacaggctttgacggagtggtacatccttcaagccacaaacattttcgcacaagtgccacagcaggaattggtcgaaatgtcctacccaggcgaacagatgattcttgcctgtctatttggagccgaaccttgcaattacagaaactttaccagcatcttctatcctcactatggcaactgttatatcttcaattggggcatgactgaaaaagctctgccatctgcaaatccagggactgaatttgggctgaagctgatcttagacatcggccaagaggattatgtgcccttcttggcctcaaccgccggtgtcaggctgatgctgcatgaacagcgctcatatccttttatcagagacgaaggcatctatgccatgagcggtaccgaaacttccatcggagtcctcgttgacaagttgcagcgcatgggggaaccctactccccgtgcactgtgaatggaagcgaggtccccgtgcagaacttttatagtgactataatactacatacagtatacaggcatgtttgagatcttgcttccaggatcacatgatcagaaattgcaattgtggccactacctgtaccccctacctcgaggggagaagtattgcaacaacagggactttcctgactgggcacactgttactccgatctccagatgtcagtggcgcaacgcgaaacctgtattggcatgtgcaaggagtcgtgcaatgacacacagtataagatgacaatttccatggccgactggccttccgaagcctccgaggactggatttttcacgtgctcagtcaggaaagggatcagtcgacaaacattaccctctcaagaaaagggattgtaaagctgaacatctactttcaggaatttaactatcgcaccattgaggagagcgccgccaacaacatcgtgtggctcctttcaaatctcggcggacaattcggattttggatgggcggctctgttttatgcctgatagaatttggcgagatcataatcgactttgtgtggattacgattatcaagctggttgcattggcaaagagcttaaggcagaggagggcccaggcttcctatgctggaccaccccccacagtagccgagctagtggaagcccatacaaacttcggctttcaacctgacacggctcccaggtcaccaaatactgggccttatccctctgagcaagcactgccgatccctggaacccctcctcccaactacgattctctgcgcttgcaaccactggatgtgattgagtctgactctgagggcgacgcaatctag

SEQ ID NO: 205463 - DNA, 2115 bp, synthetic construct
  misc_feature 1..2115: note = Description of Artificial Sequence: Synthetic coding sequence
  source 1..2115: mol_type = other DNA
atggccttcctgagccggaccagccccgtggccgccgccagcttccagagccgccaggaagccagaggcagtatcctgctacagtcctgtcagctcccaccccagtggttgagcacggaggcctggacgggagagtggaagcaaccccacgggggagctctcacctcaaggagccccggaccggtcgcaccccagcgcccctgtcatttaaaggggtggcagcatagacccacacagcacaatgccgcctgcaaacaaggacaagctgctgcccagactcctccgaggccagggccgcccagcgccccacctccgccaccaaaagaaggacatcaggaaggtttagtcgaactgcccgcctctttccgagagcttctgacttttttctgtacaaatgctaccatacacggtgctatccggctcgtttgtagccgtggcaatcgacttaagactacatcctggggactactctccctgggagccctggtggctctatgttggcagcttggccttttgttcgagagacactggcacaggcctgtactgatggcggtgtctgtccacagcgaaagaaagttgctccccctggtgactttgtgtgacggaaatcccagacgccctagtcccgtgttgaggcaccttgaactgcttgatgaatttgcccgcgaaaacatagactccctctacaatgtgaatttgtccaaggggagagctgcattgagcgccactgttcccagacatgagcctccctttcacctggaccgagagatcaggctacaaaggctgagccattctggcagccgcgtccgggtgggtttccgcctctgcaatagcaccggcggcgattgcttttaccggggttatactagcggcgtggccgccgttcaagactggtatcatttccattacgtcgacattcttgccctcctgcccgcagcatgggaagattctcatggcagccaagacggccactttgttctgtcgtgcagctatgatggcctggattgtcaagctcgacagttcaggacatttcatcatcctacctacggttcttgctacaccgtagatggagtgtggactgcccagagaccagggataacacacggcgtagggcttgtcttacgtgtggaacagcagcctcacctgcccctgttgtctaccttggctggcattcgtgtgatggttcatggtcggaatcatacaccgttcctggggcaccactctttttccgttcggcccggcacagaagccacgattagtatcagagaggatgaggtgcacagactgggttcgccctatgggcactgtaccgccgggggcgagggagtggaggtcgaactgctgcacaacacatcatacacccggcaggcgtgcttggtgtcctgcttccagcagctcatggtcgagacctgcagctgcgggtactacctccatccactgcccgccggtgccgaatactgctctagcgctagacaccctgcatggggacattgtttctataggttgtaccaggatttggagacccatcgactgccttgtacctcacgctgtcccagaccatgccgtgagtccgcatttaagctgagtaccgggacctccaggtggcccagcgccaaatcagcgggctggactctcgccaccctgggcgaacagggtttgcctcaccagtcacatcgacagcggagctccctggcaaaaatcaacattgtgtaccaggagcttaactaccggtcagtggaggaggctccggtgtatagcgtcccccaacttctatcggcaatgggctccctctgctcactgtggtttggtgcctctgttctctccctgctggagctgctcgagctcctgttggatgcatccgccctgacactggttctaggtggcagaagattgaggcgggcttggttctcatggccacgagccagccccgcgtccggtgcaagctctatcaaacccgaggcaagccagatgccacctcctgccgggggaactagcgacgaccccgaaccaagcggcccacacctccccagggtgatgctgccaggggttctggcaggtgtcagtgcggaagagagttgggctgggcctcagccattggagacactggatacttag

SEQ ID NO: 205464 - DNA, 1917 bp, synthetic construct
  misc_feature 1..1917: note = Description of Artificial Sequence: Synthetic coding sequence
  source 1..1917: mol_type = other DNA
atggccgagcaccggagcatggacggccggatggaggccgccaccagaggcggctcccacttgcaggccgctgcccagactcctccacgtccgggcccaccatcagccccacctccaccccccaaagaagggcaccaggagggcctagttgagttgcccgcctcatttcgggaattactgacctttttttgcacaaacgctacaatacatggggccattcggctggtgtgcagcaggggcaacaggctgaaaacaaccagctggggcctgcttagccttggagccctggtcgctctgtgttggcaactgggcctcttgttcgagagacactggcaccgcccagtactcatggcggtgagcgttcactccgaaaggaagttgttgcccctggtcacgttgtgcgatgggaatccaagacggccctctccagtgttaaggcacctagagctcctagatgaattcgccagggagaatatagactctctttacaatgttaatctcagcaaggggcgggcggctctatcagccaccgttccgcgccatgagcctcctttccatctcgacagagagatccggttgcagcgacttagccactccgggtccagggttcgggtggggttcaggctatgcaatagtaccggaggagattgtttttatcgggggtatacctcaggcgtggctgctgtgcaggattggtatcattttcattatgtcgatattctcgctttgcttccggccgcgtgggaggactcccatgggtctcaggacggacacttcgtcctgtcatgttcctatgacgggctggattgtcaggcacgccaattcaggacattccaccaccctacatatggcagctgctataccgttgacggcgtatggaccgctcagaggcccggaatcacacatggcgtaggcctggtattgcgcgtcgaacagcaaccgcacctgcccctgctttccaccttagcaggcatccgggtcatggtgcacggtcgtaaccacacacccttcctgggacatcattccttctccgtgcggccaggcactgaagccaccatcagtattcgggaggacgaggtacatcggttggggtcaccttacgggcactgcacagcaggcggggagggggtggaagtggaactgctgcacaacacttcatacacacgccaggcctgtctcgttagctgtttccagcagttgatggtggaaacatgctcctgcggatactatctgcaccctctgccagcaggcgcagaatactgcagctccgcccggcaccccgcgtggggccattgcttctaccggctctaccaggacttggagacccacagactcccatgcacgtcaagatgcccaagaccttgcagggagtcagcattcaaactgtccacggggacatccagatggccatcagcgaagagcgccggttggactctggccacgttaggtgagcaggggctcccccatcagtcccatcgtcaaaggagctcccttgccaaaatcaatatcgtgtaccaggagctaaactaccgaagcgttgaagaagcaccggtgtacagtgtgccccagctgctgtccgcgatgggaagcctgtgcagcctgtggttcggcgcttccgtgcttagcctcctggaactgctcgaactcttactggatgccagcgcgttaaccctggtgctgggcggaagacggctgcgccgggcctggttttcttggccacgcgccagtcctgcctctggggcctcgagcattaagcccgaggctagccaaatgcctccgccagctggggggacatctgatgatcccgagccatcaggaccgcatctgccgagggtgatgctgcctggcgtccttgccggtgtaagcgccgaggagtcctgggccggcccccagccattggaaaccctggacacatag

SEQ ID NO: 205465 - DNA, 927 bp, synthetic construct
  misc_feature 1..927: note = Description of Artificial Sequence: Synthetic coding sequence
  source 1..927: mol_type = other DNA
tgagccaccgcccgggccgccaccgccttcaccgaggccacccggcaggcatggaggctctcacgtaccggtacaacgagtacgatgtggatctcctggccatgctgtcctcgacacgggcgaaccgccaccggcgcgcgcaccgctacctccagcagccctgctgtcactatggcatggaccgctcggcctgattcgtcaggtcccagtactacgcctcctaccgcggccgccacgaggtctatggcatctggtcagctctccgcacccgcgtcgccaactgtgggggcgtctccttggccggtgaggggacagggttgcaggagtgggggactgacccccgctctgggacttccaggagtgggtctcgtcctgcgtgtggaacagcaaccgcacctccctcttctttctacactggcaggcatacgagtgatggtacacggaagaaaccacaccccgttcctcggccaccattcattctctgtccggcccgggacagaagctaccatctccatacgtgaggacgaagtgcacaggttgggcagtccatacggccactgcacagccgggggcgagggagtggaggtagagctcttgcataacacttcctacactagacaggcctgtcttgtcagttgtttccagcagctgatggtggaaacttgttcctgcggatattacctccaccccctgccagccggcgccgagtattgctcaagtgcccgccatcccgcgtggggccattgcttttacagactgtaccaggacctggagacacatcggcttccctgcacgtcaagatgccctcgcccttgcagggagtctgccttcaagctcagcactggaacctcaagatggccctccgccaaatctgccggttggacgctcgccactctgggagagcagggcttgccgcaccagtcatag

SEQ ID NO: 205466 - DNA, 2010 bp, synthetic construct
  misc_feature 1..2010: note = Description of Artificial Sequence: Synthetic coding sequence
  source 1..2010: mol_type = other DNA
atggccgagcaccggagcatggacggccggatggaggccgccaccagaggaggaagtcacttgcagatcgcatgggcttgcgggtcccctgaagccctccctccagaaggcatggccgcccagacgcacagcgctcagcgctgtctgcagaccgggcccggctgcagtcccgatgcaccccagccaggcccaccgagcgcacccccccccccccccaaggagggtcaccaggagggcttggtagagctcccagcaagcttcagagagctcctgaccttcttctgcacaaacgccaccattcatggagctatcaggttggtatgctcaagaggcaacagactaaagacaacatcctggggcctgctctctctgggtgccctggtggctctgtgctggcaactcggtctgctgttcgagaggcactggcatcgcccggtgcttatggcagtttccgtacactcagaacgaaaattgcttccgttggtgacattgtgcgatggaaatccgagacggccttcccctgtactgagacaccttgagcttcttgacgagtttgctagggagaatattgactccctgtataatgtgaacttgagcaaggggagggcagcactgtctgcaaccgtaccaagacatgagccgcccttccacctcgatagagaaatccgcctccagcggctcagtcatagcggaagtagggtcagagtggggttccgtttatgcaatagcactggcggggattgcttctaccgtggttatacatcaggggtagccgctgtgcaagactggtatcatttccactacgtagatattttggctctgctgccggccgcctgggaggattcccacggaagtcaggacgggcacttcgtgcttagttgctcctacgacggccttgactgccaggctcggcagttccgaacattccaccaccccacatacgggtcatgctacaccgttgacggcgtgtggacagcccaacgtccaggcattacacatggggtgggcttggtgttacgcgtggaacaacagccacatcttcctttactgagcactctggcaggtatccgtgtaatggtgcacgggaggaatcacacgccctttctaggccatcactcctttagtgtgcgcccgggaactgaagcaaccatttcaatccgcgaggacgaggttcatcgcctcggctctccttatggccattgcacagcgggaggcgagggggtggaagtggagctgctgcacaacaccagttacacgcggcaagcatgcctcgtgtcatgcttccagcagctgatggtggaaacatgcagctgcggttactatctacacccacttcccgctggcgcagagtactgcagcagcgccagacaccccgcctggggccactgtttctacagactgtaccaggatctcgaaacacacaggttgccgtgtacgagccgctgcccccgaccttgtagagaatccgctttcaagttatcaaccggcacatcccggtggccctccgctaagagtgcgggctggacgctggcaaccctgggggagcaaggactgccccaccagagccacagacagcgcagctctctggccaagatcaatatagtttaccaggaactcaattatagatcagtcgaagaggctcccgtgtattctgtgcctcagctcctgtcagctatgggctctttgtgttcactgtggtttggtgcatccgtgttgagtctgctcgaactgttagaactgttactggacgcttctgcacttacattagtcctgggtggaagaaggcttcgcagggcctggttcagctggcccagagctagtccagccagtggtgcatcttcaattaaacccgaggccagccaaatgcctcctcccgcaggcggtacaagtgacgatccggaacccagcggcccccacttacctcgtgtgatgttgcctggtgtgttagctggagtctccgccgaagaatcctgggctggcccacagccgttggagactcttgacacctag

SEQ ID NO: 205467 - DNA, 2409 bp, synthetic construct
  misc_feature 1..2409: note = Description of Artificial Sequence: Synthetic coding sequence
  source 1..2409: mol_type = other DNA
atgcgggccgtgctgagccagaagaccacccccctgccccggtacctgtggcccgggcacttaagtgggcctaggcggttgacctggtcttggtgctcagaccacagaacgcccacatgtagggagttaggtagtccccaccccacgccttgcacggggcctgctcggggctggccaagacggggtggcggcccttgtggatttacatcagctggccatgtgctgtgtggctacccattgtgcctcctgagcgggcctatccagggttgcggcaccggtcttggtgactcttcgatggcctttctctcccgcacttcaccggtcgctgccgctagctttcaaagtcggcaagaggctcgtggttctattttactgcagtcttgccagctgccaccgcagtggttatccactgaggcatggacaggcgagtggaagcagccccacgggggtgccctgaccagtcgctcacccggccctgtggcgcctcagaggccctgccaccttaagggctggcaacacagaccaacccagcacaacgcagcctgcaaacagggccaggctgccgcccaaactcctccacgcccggggcctccatctgccccgcctccgcctccaaaagaggggcatcaagaggggctagtcgagctccctgcaagctttagagagctactcacgtttttctgtactaacgccaccattcatggagcgatccgtctcgtctgtagcagaggtaaccggctgaaaactacctcatggggcttgctcagcctcggcgccctggtcgcactgtgttggcaactgggactgctgttcgagcggcactggcacagacctgtgctgatggccgtatctgttcactcagagaggaagcttctgcccctggtaacattgtgtgacggtaatccaaggaggccgtctcctgttctgcgccatttggagctgctggatgagtttgcccgtgaaaatatcgacagcctgtataacgtgaatcttagcaaaggtcgggcagcattgagcgctacagttccacgccacgagcctccattccacctggatcgcgaaatacgactccagagattgagccatagtggctccagagtacgtgtagggttccggctgtgtaacagtactggcggagattgtttctatcgtggttacacaagcggtgtggccgccgttcaggattggtaccactttcactacgtcgacatccttgcactgcttccagctgcctgggaagactcacacggcagtcaggatggacatttcgtcttgagttgctcttacgatggccttgattgccaggcccgccaattccgaacatttcatcaccctacctacggctcctgttacacggtggatggcgtgtggacagcgcaacgacccgggattacccacggggtgggcctcgtgctgagggtcgagcaacagccacatctgccattgttatccacacttgcaggtataagagtcatggtccacggaagaaatcatacccccttcctgggtcaccactcctttagcgtgcgcccaggaactgaggcgaccatcagtattcgcgaagatgaagtgcatcgactcggttcaccatatggacactgtacagctgggggcgagggcgtggaggtagaactgctgcacaatacaagttacactcgacaagcatgcttggtgtcgtgttttcagcaattaatggtcgagacttgttcgtgcggatactatctgcaccctctgccagctggggcagaatattgcagtagcgcccggcaccccgcctggggacactgtttttacagactgtaccaggacctcgaaacacatcgactgccctgcacatccagatgccccagaccctgccgagaaagcgcctttaaactgagtaccgggactagccgatggccttcagctaagagtgccggttggacactcgctactttgggggaacagggccttccacatcagtcccaccgccagcggagctcgctggccaaaattaatattgtttatcaggagttaaactatcggagcgtagaagaggcccccgtgtactccgtacctcagttgctgagtgccatgggcagtctgtgttcactgtggtttggggcttctgttctgtccctgctagagcttctggaactccttctagacgcctccgcgttaacactcgtcctgggtggccgccggttgagaagagcttggttttcatggcctcgggcttcgcccgcctccggcgccagctcaattaagcccgaggcgtcccagatgccacctccagccggagggacgtccgacgacccggaaccatccggcccccatctgccaagagtcatgctccctggggtccttgcgggagtaagtgccgaggagtcttgggctgggccccagcccttggagacactcgatacgtag

SEQ ID NO: 205468 - DNA, 1917 bp, synthetic construct
  misc_feature 1..1917: note = Description of Artificial Sequence: Synthetic coding sequence
  source 1..1917: mol_type = other DNA
atggccgagcaccggagcatggacggccggatggaggccgccacccgaggcggctcccatctgcaggcggctgcacagactccacctaggcctggtccaccttccgcccccccccctcctccaaaagagggccaccaggaaggtcttgtggaattgcccgccagctttcgggagctcttgacctttttttgcactaatgcgaccatacacggggccattaggctggtgtgtagtaggggcaatagattgaaaactacttcttggggcctgctgtcattgggtgctttggtcgccctgtgctggcagctgggccttcttttcgagcgccactggcatcggccggtgctgatggcagtgagcgtgcactcagaacggaaactgctcccactggtcaccctgtgtgatggcaatccccgacgaccatcccctgtgctgaggcatctcgaactcctggacgaattcgccagggaaaacattgactcgttatataacgttaacctatccaagggtcgtgccgccctatccgctacagtgcccagacacgagccgccgttccatttggatagggagatcagactccagaggcttagccatagcggttctagagtgagagtgggatttaggctatgcaacagcactgggggcgactgcttttataggggatataccagtggtgttgccgccgtgcaggactggtaccactttcattacgtggacatcttagccctgctgcccgctgcatgggaggattcccacggatctcaggatgggcacttcgtgctctcttgctcctacgatgggctggattgccaggcccggcaatttcggaccttccaccaccccacttacggctcttgttacacagtagacggagtttggactgcccaaaggccggggatcactcacggtgtggggttggtgctccgggtggagcagcaaccccacctgccactgttgagcactctagccggtattagggtcatggtacatggccggaaccatacccctttcctggggcaccatagcttcagcgttcggccggggacggaggccacgatttcgatccgtgaggatgaggtgcacagactgggaagtccctacggccactgcaccgctggcggcgagggtgtggaggtggagctgcttcataacacaagttacacaaggcaggcatgtttggtttcctgctttcaacagttgatggtggaaacctgtagttgtgggtactaccttcaccccctacccgccggagctgagtattgttccagcgcccggcaccccgcctggggtcactgcttctaccggctctaccaagacttggagacacataggcttccctgcacctcccggtgtccacgcccatgtcgagagtcagccttcaaactctctaccggaacatcccggtggccgagcgcaaagtctgccgggtggactctagcaaccttgggcgagcaggggttaccacaccaaagtcacaggcagagaagctccctagctaaaattaacattgtgtatcaggagttgaactatagaagtgtcgaggaggctcctgtatattcagtgcctcagctactctccgcgatgggcagcttatgtagcctctggttcggcgcgagcgtcctgagcctcttagagctcttggagcttttgctggacgcatccgcactgacattggttcttggaggccggaggctaaggcgagcttggttcagctggccacgcgcatcccctgcctcaggtgccagctcgataaagcccgaagctagtcagatgccccctcccgccgggggaacctctgacgaccctgagccttccgggccccacctccctcgggtgatgctgccaggtgtgctggcaggagtgtctgccgaggaaagctgggcaggccctcagcctctcgagaccctcgacacctag

SEQ ID NO: 205469 - DNA, 1950 bp, synthetic construct
  misc_feature 1..1950: note = Description of Artificial Sequence: Synthetic coding sequence
  source 1..1950: mol_type = other DNA
atggcccccggcgagaagatcaaggccaagatcaagaagaacctgcccgtcacagggccccaggcccctacgatcaaggagcttatgagatggtattgccttaacacaaatacccacggatgtagacgcatcgtggtgagtcgcgggagacttcggcgacttttgtggattggattcaccttgactgccgtggcccttatattgtggcagtgcgctttgcttgtgttttctttttacaccgtcagcgtgagcatcaaggtgcattttagaaaattggacttccccgcggtgaccatttgtaatatcaatccatacaagtatagtactgttaggcacttactggcagacctggagcaggagactagggaggctttaaagtccttgtacggcttcccagagagtcggaagcgcagagaggcggagagctggaatagtgtctcagagggcaagcagccaaggtttagtcatcgcatccccctcctcatcttcgatcaggacgagaagggaaaagcccgggatttttttacgggacgcaaaagaaaggtgggtgggagcatcatccacaaagctagcaacgtgatgcacattgagtctaagcaggtggtgggctttcagttatgtagcaacgacacatccgactgcgctacttatactttcagctccggcataaatgctattcaggaatggtacaagctgcactacatgaatattatggcgcaggttcccctcgagaagaaaattaacatgtcctacagcgcagaggaacttctggtgacctgcttttttgacggcgtttcttgtgacgcccggaacttcaccctgttccatcaccccatgcatggaaattgctacaccttcaataaccgagaaaacgagacaatcctgtccacctctatggggggttcagaatacggcttacaagtgatcctttatattaacgaagaggaatacaacccatttctggtatcaagtactggtgcaaaagtgatcatccatcgacaggacgagtaccccttcgttgaagatgtgggcaccgaaatagagaccgcaatggtcacatccatcggtatgcacctaaccgaaagcttcaaactctctgagccatactcccagtgtaccgaagacggcagcgacgtgcccattcgtaacatttataatgctgcctacagccttcaaatctgtctgcactcctgctttcagactaaaatggttgagaaatgtggctgtgcacagtactcccagccactgcccccagctgccaattactgcaattaccagcagcaccctaactggatgtattgttactatcagctccaccgcgctttcgtgcaggaagaactgggatgccagtctgtgtgtaaggaagcctgcagtttcaaggagtggactttgacgacttctctcgctcagtggccatcagtggtatctgagaagtggctcctgcctgtgctgacttgggatcagggccgccaggtaaacaaaaagctcaacaagacggatctcgcgaaacttctcattttttataaagatctgaaccagaggtccatcatggaaagtccagccaattccattgagatgctgctgtcgaactttgggggacagctggggctttggatgtcctgctccgtcgtgtgtgttatcgagattatcgaggtgtttttcatcgattttttttctatcattgctcgccgccaatggcagaaagcaaaagagtggtgggcatggaaacaggcgcctccatgccccgaagccccacggtctccccagggacaagacaaccccgccttggatatcgatgatgaccttcccactttcaacagcgcattacatctgcccccggccctcggcactcaagtacccgggacccccccacccaagtacaacacactgcggttggagcgcgccttttctaaccagttgactgatacccagatgctggatgagttatag

SEQ ID NO: 205470 - DNA, 5943 bp, synthetic construct
  misc_feature 1..5943: note = Description of Artificial Sequence: Synthetic coding sequence
  source 1..5943: mol_type = other DNA
atggccgcccggctgctggccccccccggccccgacagcttcaagccctttacccccgagtccttggccaatatcgagaggagaattgctgagtcaaagttgaagaaaccaccaaaggctgacggcagccatcgcgaagacgatgaagatagcaagccaaaaccaaactctgacctagaggccggtaaatcactcccctttatctatggcgacattcctcaggggctcgtggctgtacctttggaagactttgatccatattatctgacacaaaagacattcgttgtgctgaatcgaggcaagaccttatttagattctcggctacccccgctctgtatattctctctccctttaacctgattagaaggatcgcaattaagatactgatccactccgtcttctccatgattattatgtgcaccatactgactaattgcgttttcatgacttttagcaaccctccagattggtcaaagaacgtagagtacacattcaccggaatttacacctttgagtcgctggtcaagattatagcccggggattttgcattgacggcttcaccttcctccgggacccttggaactggctcgactttagtgtgatcatgatggcatatataacagaatttgtgaacctcggtaacgtgtctgccttaagaacctttcgggtgctgcgcgctctcaaaacaattagcgtgatcccaggcctgaagaccatcgtgggagcgctgatacaatcagttaaaaaattgagtgacgtcatgatactaaccgtgttttgcctctcggtcttcgcactcatcggactccagttgttcatgggaaatctgcggaataaatgtgttgtctggcccatcaatttcaacgaatcttacctggagaatggaactaaaggattcgactgggaggagtacatcaacaacaagaccaatttttacaccgtcccagggatgctggagcccctgctgtgcggcaattcaagcgatgccggccagtgccctgaagggtatcaatgcatgaaggccggaagaaacccgaattatggttatacatcattcgatacattcagttgggcgtttcttgcactcttcagattaatgacacaagactattgggagaatctctatcagctgactctccgcgcagcgggaaagacctacatgatcttctttgtcctcgtcattttcgtgggctctttctatctggtgaatcttatccttgcagtcgtggctatggcctacgaagagcaaaatcaggccaccctggaagaggccgaacagaaggaggccgaattcaaagcaatgttggaacagcttaagaaacagcaggaagaagcccaggctgctgcaatggccacaagtgccggcactgtgagcgaagatgcaatcgaagaggaaggcgaagaagggggcgggagcccccgctcttcatctgagatttcaaagctgagttcaaagtctgctaaggaacggcgcaatcgccgcaaaaaaagaaaacagaaagagctcagcgagggggaagaaaaaggggaccccgagaaggtgttcaaaagtgaatctgaggacggcatgaggagaaaggccttccgactgcccgataaccgaatcgggcggaaatttagcattatgaaccagtctttactcagtattccaggcagccccttcctctctagacacaatagcaagagctccatattcagtttcagaggacctggaaggtttagggacccgggttcagagaatgagttcgctgacgacgagcattcaacagtcgaagaatcagaaggaaggcgggattctctgtttattcccataagggctagagaacggaggtcttcttactctggttactccggctatagtcagggctcaagatccagccggattttcccgtctctccggcgatccgtgaagaggaactctactgtcgactgtaatggggtggtttccttgatcgggggtccaggaagtcacattggagggcggctacttccagaggcaactacggaggtcgagatcaaaaaaaagggacctggctctctgctcgtgagtatggaccagctggccagttacggacgtaaagacagaatcaacagcatcatgtcagtggtgaccaataccctcgttgaggaattagaggagagtcagagaaagtgccccccctgttggtataaattcgctaacactttcctgatctgggagtgccatccgtattggatcaagctgaaggagatcgtgaatctgatcgtgatggacccatttgttgatctcgccattaccatctgtatcgtgctgaacacactgtttatggcgatggagcaccatccaatgaccccgcagtttgaacatgttcttgccgttggcaatctcgtgtttaccggtattttcacggcggaaatgtttttgaagctgatagcgatggatccgtactattactttcaagagggctggaacatctttgacgggttcatagtgagcctgtccctgatggagctgagtctggctgacgtagaggggctcagtgtcttgagaagcttccggttgctgcgcgttttcaaattggctaagtcctggcccaccctcaacatgctgatcaagattatcgggaattccgttggtgccctggggaaccttactctggtgctggctattatcgtttttatcttcgcggtagtggggatgcagttgttcggaaagtcttacaaagagtgcgtttgtaaaattaatcaggattgtgagctcccgcgatggcatatgcatgattttttccactcattcctaatcgtttttagggtcctgtgcggcgagtggattgagaccatgtgggattgcatggaggtggcagggcaagccatgtgtctgatcgtctttatgatggttatggtgatcggcaacctcgtcgtacttaatctcttccttgcgctgctgctgtcctccttttcagccgacaatctcgcggctaccgacgatgacggggagatgaacaacctccaaataagcgtgatcagaattaaaaagggcgtagcttggactaagctcaaggtccatgcatttatgcaagctcacttcaagcagcgggaggcagacgaggtcaagcccctggacgagttgtacgaaaagaaagcaaactgcatcgctaaccacaccggggctgacattcacaggaatggggacttccaaaaaaatggcaacggaacgacctctggaatcggctctagtgtagaaaagtatattatagatgaggatcacatgtcttttatcaataacccgaatctgacagtcagggtcccaatcgccgtgggtgaatccgatttcgaaaatctgaacactgaggatgtgtcgtctgaatccgacccagaaggcagcaaagacaaactcgacgacacatcgtcctccgaaggaagcaccattgacattaagcctgaagttgaggaggttccagtcgaacagcctgaggagtatctcgatccagacgcctgtttcactgagggttgcgtgcaacgattcaagtgctgccaggtgaacatcgaggagggattgggtaagtcctggtggattctcaggaaaacatgtttcctcatcgtcgagcataactggttcgaaacctttatcatttttatgatcctgctgtcaagtggggccttggcatttgaagatatctatatcgagcagaggaagaccatcaggaccattttagagtacgcagataaagttttcacatacatctttatactggagatgctcctgaagtggacagcctacggcttcgtaaaattttttaccaatgcatggtgttggttagacttcctcattgtggcagtgtccctggtgagtctcattgctaatgccctgggctactccgaactcggagccataaagtccctgaggactctaagagccctcagacccctccgtgctctgagtcggtttgagggaatgcgggtggttgtgaatgcactggtgggcgcgattcccagtattatgaacgtgctgttagtatgtctgattttctggctgatcttctccatcatgggtgtgaatttattcgcaggcaagtatcactattgttttaatgagacttccgagattcggtttgaaatagaggatgttaacaacaagaccgagtgtgaaaaactgatggaaggcaacaatacagagatcaggtggaagaacgtgaaaatcaacttcgacaacgtgggcgctggatacctggcactgctgcaggtggcaacattcaaaggctggatggatatcatgtatgccgctgtcgattcccgtaagccagatgagcagccaaaatacgaggacaatatttatatgtatatctacttcgtcatttttatcatctttgggtctttcttcaccttgaatctgtttatcggtgtcataatcgataacttcaaccaacaaaaaaagaagttcggagggcaggacatctttatgacagaggagcaaaagaaatattacaatgctatgaagaagctgggatccaagaagcctcagaaacccatcccaaggcctctgaacaagattcagggcatcgttttcgactttgtcacacagcaggcctttgatattgtaatcatgatgctcatctgcctgaatatggtcaccatgatggtggaaaccgacacccaaagtaaacaaatggagaatatcctgtattggatcaatctggttttcgtgatcttctttacttgtgaatgtgtactcaagatgtttgccctgagacactactatttcactatcggttggaatatctttgactttgtggtagtcatacttagcattgtgggtatgttccttgctgacattattgagaaatatttcgtgagtcccaccttattcagagtcataagattggccaggatcggcagaattctaagacttataaagggggctaagggaatccgcactctccttttcgcgcttatgatgagtctgccagccctgttcaatatcggactgttactctttctagttatgttcatcttttccattttcggcatgtcaaacttcgcttatgtcaagcatgaagccgggatcgacgatatgttcaacttcgaaaccttcggtaattcaatgatctgtctgttccagattaccacctcagctggttgggacgggctcctactccctatcttgaaccggcctccagactgtagcctagataaggaacaccctggcagcgggtttaagggagactgcggcaacccctcagtaggcatattctttttcgtttcgtacattatcatctcattcctgattgtcgtcaacatgtacattgccattatacttgagaatttttccgtagccacggaggaatcagcagatccactttccgaagatgatttcgaaacattctacgaaatttgggaaaaatttgacccggacgcaacacaatttatcgagtactgcaagttagccgacttcgcagacgcgctagaacatccactgcgcgtacctaaacccaatacaatagaattgatagcaatggatctgcctatggtgtcgggggatcgcatacactgtttggacattctgttcgcatttactaagcgagttttgggcgacagtggggaactcgacatcctgaggcagcagatggaggaacgatttgtggcatcaaatcccagcaaggtgtcttacgagcccataactactacactgcgaagaaaacaggaagaagtgtccgccgtcgtacttcagagagcttatcgggggcatctagcccgacgggggtttatctgcaagaagaccacatctaacaaactggaaaatggcgggactcatagggaaaagaaagaatccacacctagtaccgcctctctaccctcttacgatagcgttaccaaaccggagaaagagaaacagcagcgggccgaagaagggaggagggagagagccaaacgccagaaggaggtgagggaatctaagtgttag

SEQ ID NO: 205471 - DNA, 4674 bp, synthetic construct
  misc_feature 1..4674: note = Description of Artificial Sequence: Synthetic coding sequence
  source 1..4674: mol_type = other DNA
atggccgcccggctgctggccccccccggccccgacagcttcaagcccttcactccagagtcgctggccaacattgagcgacgtatagccgaatctaaactcaagaagccccccaaggccgatgggagtcacagggaggatgacgaggattccaagcctaagccaaattcagatcttgaggcaggcaagtcgctgcccttcatctacggcgatatcccgcagggcctggtcgccgttccgctggaagacttcgacccctattacctgacccagaaaactttcgtcgtgttgaatcgaggcaaaacgctgttccgctttagcgcaacgccagcgctgtatatcctgtctccattcaacctcatccggcgcatagctataaagattctgatccacagcgtgttcagtatgatcatcatgtgcactatacttacaaactgtgtgtttatgactttttcaaacccgcccgactggtccaagaacgtggaatacacctttaccgggatatacacctttgaaagtctggtaaaaattatcgcgaggggtttttgtattgacggctttaccttcctgagggatccatggaactggctggacttctcagtgattatgatggcctatatcactgagttcgtgaatctggggaatgtgagcgccctgcggacttttcgggtcctgagagccctgaagaccattagtgtgattccgggactaaaaactatagtaggtgccttgattcagagcgtgaaaaagctgtctgatgtgatgattttgaccgtgttctgtttgtctgtattcgccctgatcgggttacagcttttcatgggcaacttaagaaataaatgcgtcgtgtggcctatcaacttcaatgagtcttatctcgaaaatggtacaaagggcttcgactgggaggagtacatcaataataaaaccaatttctacaccgttcccgggatgctggagccgctgttgtgtggcaactcctccgatgcagggcagtgcccggagggttaccagtgcatgaaagcagggcggaatcccaactacggatataccagctttgatacatttagctgggctttcctggccctttttcgacttatgacacaagactactgggaaaacctgtatcagttgaccctcagggctgccggaaaaacatatatgattttttttgtccttgtgatattcgttggctcattctatttagtgaatctgatcctggctgtcgtcgctatggcatacgaagagcagaatcaggcgaccctggaggaagccgagcagaaggaggcggagttcaaggccatgctggagcagctgaagaagcagcaggaagaggcccaggcagccgcaatggccacaagtgcggggactgtgtcagaagatgcgatagaggaggaaggtgaagagggcgggggtagtcctagatcttcttccgaaatcagcaaactgtctagcaaatcggccaaggagagacggaaccgtagaaaaaagcggaagcagaaagagctgtcagagggagaagagaaaggcgatcccgagaaggtatttaaatccgagagtgaagatggtatgaggcgcaaggctttccgccttccagacaaccggattgggagaaagtttagtattatgaaccagtctctcctgtctataccaggaagtccttttttaagccggcacaactctaagtcttcaatctttagctttagagggccgggacgttttagggaccctggatcagagaacgagtttgcagacgatgaacacagtaccgtggaggagtccgaaggccgacgcgattctctgtttatccccatacgggctcgcgagagaagaagctcttacagcggttactctgggtactcccaagggtcccgatcttcgaggatctttccctcactcagaagaagcgtgaagcggaatagcacagtggattgcaacggggtggttagcctgatcgggggtccggggtcccatattggagggagactgctccccgaagccactactgaggtggaaatcaagaagaaggggcctggttcgctgctagtttcaatggaccagctcgcctcctatggtagaaaggatcgaattaattcaattatgtctgtggtgacaaacacccttgtcgaggagctagaagagtctcagcgcaagtgccccccctgctggtacaagttcgctaacacatttttgatttgggaatgccacccatactggatcaagctgaaggagattgttaacctgattgttatggacccattcgtcgacctggcaatcacaatctgtatcgtgctgaacactcttttcatggccatggagcaccatcccatgacaccccaatttgagcatgtgctggctgtcggcaatctggtcttcacaggcattttcactgcggagatgtttctgaaattgatcgccatggacccctactattacttccaggagggctggaatatcttcgacggcttcatcgtcagcctttcattgatggaactgtctttggcagacgttgaagggctttccgtcctcagatcttttcgcctgttgcgcgtgttcaagttagcgaagtcatggcctactctgaatatgcttattaaaatcataggtaattcggtcggggctttagggaacttgactttagtcctcgccataattgtgtttatcttcgcagtggtgggcatgcagctgttcggtaaaagctataaagagtgtgtgtgtaaaattaaccaggactgtgagctgccacgttggcacatgcatgacttcttccactcatttctaatcgtattcagagtgctttgtggagagtggattgaaaccatgtgggattgtatggaggtcgctggccaggctatgtgcctgattgtcttcatgatggttatggttataggcaatttggtggttctgaatttgtttttggcactgctgttaagctcatttagcgccgacaatctggcagctaccgacgatgatggagaaatgaataaccttcagattagcgttatacggattaagaagggagtggcctggaccaagttgaaggtgcatgcatttatgcaggcccattttaaacaaagggaggcggacgaagtcaagccattggatgagctctacgaaaagaaggctaattgcatcgctaatcataccggcgctgacatccaccgcaatggggacttccaaaaaaacggtaacggaacgacttcaggaatcggctcgtcagtggagaaatatattattgatgaggaccatatgtcatttatcaacaaccccaacttaacagtgcgcgtacctatagccgttggagagagtgacttcgagaacctgaataccgaagatgtgagttcagagtctgacccagagggctcaaaggacaagctcgacgatacgtcctcatctgaagggtctacgatcgatattaagcccgaagttgaagaggtcccagtcgagcagcctgaggaatacctcgacccagatgcatgttttacggaggggtgcgtacaacgcttcaagtgctgtcaggttaacatcgaggaaggcctgggtaaaagctggtggattctcaggaaaacttgctttctgatcgtcgaacacaattggttcgaaactttcataatcttcatgatcctgctgagcagcggagctttagcattcgaggatatttacatagaacagaggaagacaatacggacaatcctcgaatatgcagacaaggtgtttacctatatattcatcctggagatgctgttgaagtggacagcatacgggttcgtgaaattcttcacaaatgcgtggtgctggctcgactttcttatcgtggccgtcgtggtcaatgcccttgtcggtgccataccaagtattatgaacgtgctgctggtgtgccttattttctggttgatcttttcaattatgggggttaacctgttcgccggtaagtatcactattgttttaatgagacctctgagattcggttcgagatagaggatgtgaacaacaagacggaatgcgaaaagctcatggagggcaacaacacagagataaggtggaagaacgtcaagatcaacttcgacaacgtcggggcagggtatctcgctctgctccaggttgcaacatttaaagggtggatggatataatgtatgccgccgtggatagccggaaacccgatgaacagccgaaatacgaagacaatatctatatgtacatttacttcgtgatttttattatttttggctcctttttcacactgaatcttttcattggcgtgatcattgacaacttcaatcagcagaagaagaagttcggggggcaggacatcttcatgaccgaggagcaaaagaagtattataacgctatgaagaagctgggtagtaaaaaacctcagaagccaatcccccggcctctgaacaagatccaggggatcgtttttgattttgtgacacagcaggcctttgatattgtgatcatgatgctgatctgtctgaatatggtgacaatgatggttgagactgacactcaatccaaacagatggagaatatcctctattggataaacctggtgtttgtgatatttttcacctgcgaatgcgtattaaagatgtttgcgctgaggcactattattttacaattggatggaacatttttgactttgttgtggtaatcctctcgatcgtgtag

SEQ ID NO: 205472 - DNA, 3588 bp, synthetic construct
  misc_feature 1..3588: note = Description of Artificial Sequence: Synthetic coding sequence
  source 1..3588: mol_type = other DNA
ttcctgagcccccagaccttcgtggtgctgaaccggggcaagaccctattccggttctccgccacacctgccctgtacatcctatcacccttcaacctgatccgccggattgctataaagatccttatccattctcttttcagtatgattatcatgtgcacgatcctgacaaattgcgtgttcatgacattctccaaccccccggattggagtaaaaacgtcgaatacaccttcaccggaatctacacgttcgaaagcctcgtgaaaatcatcgcgagaggcttttgtattgatggattcactttcctgcgtgatccgtggaactggttggatttcagtgtaattatgatggcctacatcaccgagttcgtgaacctgggaaatgtctccgctctccgcacattccgagtacttagggcgctcaagactatttcagtgattccagggctaaaaaccatcgttggggccttgattcagtcagtgaagaaactgagtgatgttatgatacttaccgtgttttgtctgagcgtatttgccctgatcggcctccagctgttcatggggaacctgcggaataaatgtgtagtatggcctatcaactttaatgagtcctatctggaaaatggtaccaagggcttcgactgggaggagtacattaataacaaaactaacttctatactgtgcccggaatgttagagccattgctgtgcggcaactcaagcgatgccgggcaatgtcccgaggggtatcagtgcatgaaagccggacggaatccaaactacggatacacgtcctttgataccttctcttgggcctttctggctctgttcagattgatgactcaggactactgggagaacctttaccaactgacgttgcgtgcagccgggaaaacatatatgattttttttgtactcgtcatttttgtcggctcattttacctagtgaatcttatcttggccgtggtggcaatggcctatgaagagcaaaatcaggccacgttggaggaagcagaacagaaggaagccgagtttaaagctatgctggagcagctgaagaagcaacaagaagaggcacaagcggccgctatggctacaagtgccggaacagtctccgaggatgccattgaggaggaaggagaagaaggcgggggctccccccgttcctcctcagaaattagtaagctttctagcaagagcgccaaagagcggaggaatcgtagaaagaaaagaaaacagaaggaactatccgagggggaggaaaagggcgatccggaaaaggtgtttaagtcagagagtgaagacggcatgaggcggaaggcgttccgtctgccggacaacaggataggcagaaaatttagtattatgaatcaatccctgttgtcaatcccagggagtccgttcctgtctaggcataattcgaagagctccatattcagttttagaggcccaggcagattccgcgacccaggctcagaaaatgagtttgccgatgatgagcactctaccgtggaagaaagcgagggccggcgggactcactgtttatcccaattagagcacgggagaggagatccagttatagtggatacagtggttatagccagggatccagatccagtaggatcttcccttctctccgtcggtcggttaaacggaattcaacagtagattgtaatggcgttgtatcacttatcggcggcccaggctcccacattggtggccggttactgcctgaggcgacaaccgaggtggaaataaaaaaaaaggggcccggctcccttcttgtgagtatggatcagctcgccagttatgggaggaaagaccgcatcaattccatcatgagtgtggtcactaacactctcgtagaagagctggaagagtcccagaggaagtgcccaccgtgttggtataagtttgcgaatactttccttatttgggagtgtcacccttattggatcaagcttaaggaaattgtgaacctgattgtgatggatccttttgttgacttggccattacgatctgcatcgttctcaatacattgttcatggcaatggagcatcacccaatgacaccccagttcgagcacgtgctcgctgtgggcaacctggtgttcacaggtatttttaccgcagagatgtttttaaaactgattgccatggatccatactactacttccaggaagggtggaatattttcgacggttttatagtctcgctgagtctgatggagttgagtctggctgatgtggagggcctgtcagtcctgcgctccttccgtctgctgagagtgtttaaactggctaagtcatggcccaccctgaatatgcttattaaaatcatcggcaacagcgttggcgcactgggcaaccttacgctggttcttgcaattatcgttttcattttcgccgtcgtggggatgcaactcttcgggaagagctacaaagagtgtgtgtgtaaaatcaatcaagattgcgaactgcctcgctggcacatgcacgacttctttcatagcttcctgattgttttccgggtcctgtgtggcgaatggattgagaccatgtgggactgtatggaggtcgccggtcaagcgatgtgtttaatcgtgtttatgatggtgatggtgattggcaacctcgtcgttctgaacctgttcctggccctgttgctttcatctttttccgcggacaatttggctgccacggacgacgatggcgagatgaataacctccaaatcagcgtcattaggattaagaaaggagtcgcttggacaaagctgaaagtgcatgcttttatgcaagcccacttcaaacagcgcgaggccgatgaggtgaaacctctagacgagttatacgagaagaaggccaactgtattgctaatcatacgggagccgatattcacagaaacggagattttcagaagaacggaaacgggactaccagcgggatcggtagcagcgtggaaaagtacattatcgacgaagaccacatgtcatttattaacaaccccaatctgaccgtgcgagtgcccatcgccgtaggcgaatccgattttgagaatctaaatactgaagacgtgtcctccgaaagcgatcccgagggttctaaggacaagctcgacgatacttccagttcagaaggctcgacaatagatattaagccggaagtggaggaagttcctgtggagcagcccgaggaatacctcgatcctgacgcatgtttcactgagggatgcgtgcaaaggtttaagtgttgtcaggtgaacatcgaggaaggccttgggaagtcttggtggatcctccgcaaaacatgcttcctgatcgtggagcacaactggttcgaaacctttattattttcatgatcctcctgtcgtcgggggcccttgccttcgaggatatctatatcgaacagagaaagaccattaggaccattttggagtatgcggataaagtgtttacctatatttttatcctggaaatgctgttgaagtggaccgcctacggatttgtcaagttctttacaaatgcctggtgttggttggactttctgatagtggccgtcccacttaatctctcaggcctgatctag

SEQ ID NO: 205473 - DNA, 5820 bp, synthetic construct
  misc_feature 1..5820: note = Description of Artificial Sequence: Synthetic coding sequence
  source 1..5820: mol_type = other DNA
atggccgcccggctgctggccccccccggccccgacagcttcaagccctttactccagaaagccttgcaaatatcgaacgaaggatcgcagagtctaagctcaaaaaaccacctaaggccgatggatcccacagagaggatgacgaagatagtaaacccaaaccaaactctgatcttgaagccgggaaatcccttcccttcatttacggggatattcctcagggcctggtggctgttcctctagaagatttcgacccgtattatctcactcaaaagacctttgtggtgctgaatagagggaagacgctctttcgcttttcagcgactcctgcgctgtacatcctgtctcctttcaatttgatccgcaggattgccatcaagatactcatccactccgtcttttccatgattataatgtgcaccatactgaccaactgcgtattcatgaccttttccaatcctcctgattggagtaaaaacgttgaatacacatttacgggaatctacacgttcgagagcctggtgaagattattgcacgtggcttttgtatcgacgggttcacttttcttagagacccctggaattggctggacttctctgtgattatgatggcttacatcaccgagttcgttaacttgggtaatgtcagcgcgctaagaacattccgcgtactgagggcactgaagactatcagtgtcattccaggactcaaaacaattgtaggggcccttatccaatctgtgaagaagctgtcagacgtcatgattctcaccgtcttctgcttatccgtattcgcgctcatcggcctccagctcttcatgggcaatcttcgtaacaaatgtgtggtgtggcctatcaacttcaatgaatcttaccttgagaacggtacaaaaggcttcgactgggaggaatacattaacaacaagacgaatttttacacagttcctgggatgcttgagccactgctgtgtggcaatagctctgacgcaggccagtgccctgaaggataccagtgtatgaaggctggccgcaaccctaactatggctatacaagcttcgacacattttcttgggcattccttgccttgttcagactaatgactcaagactattgggagaatctctaccagcttacactgcgcgccgcagggaagacgtatatgattttctttgtgctcgtcatctttgtgggctccttctacttggtgaacttaatcttagcagtggtagccatggcctatgaagagcaaaaccaggcgactctggaggaagcagaacagaaagaggctgaattcaaagccatgttagaacaactgaagaaacagcaggaagaagctcaggccgcggccatggcaactagcgccggcacagtgagtgaggatgcgatcgaggaagaaggcgaagaaggcggtggctccccccgcagctcctccgagataagcaaactgtctagtaagtcagcaaaggagagacggaatcgccgaaagaaaagaaagcagaaggagctcagcgagggggaagaaaaaggggaccctgagaaggtgttcaagtcagaaagcgaggatggtatgcgaaggaaggctttcaggctgccagacaatcgaataggcagaaaattttccatcatgaaccagtccctgctctcaatcccaggtagcccttttctatcgagacacaactctaaatcttcaatcttttccttccgcggtcccggacgctttcgagaccctggttctgagaatgagttcgccgacgatgagcattcgacagtcgaggaaagtgaggggaggagagattccctgtttataccgatccgggcgcgagagcggaggtctagctactccggttactctggctatagccaggggtcacgttcttctcgtatctttccatctctccgacgttccgtgaagcgaaattcaacagtcgattgcaacggcgttgtgagtttgattggcggtcctgggtcccatatcggggggcggctcttgcccgaagccactaccgaagtcgaaattaaaaaaaagggtcctggcagcttactcgtgtcgatggatcagctcgcctcttatggacgcaaagataggattaactcgataatgtctgttgtaactaataccctggtggaggaattggaggagagccaacgtaaatgtccaccttgttggtacaagtttgcaaacacctttcttatttgggagtgtcacccttactggattaaactgaaggagatcgtcaatctcattgtgatggaccctttcgtcgaccttgcgatcaccatatgcattgtactcaatacgctgtttatggccatggagcatcatccgatgacacctcagttcgaacatgtgttggcagttggcaacttggtctttaccggaattttcactgctgaaatgttcctaaaattgattgccatggatccctactactattttcaagagggctggaacattttcgatggctttattgtttctctttccctaatggaactgtccttggctgacgttgagggtctgtcagttcttaggtctttccgtttgctacgggtctttaaacttgcaaagtcatggccaacactgaatatgctcatcaaaataattggaaatagcgtcggagctctgggtaatctgacactcgttttagccatcatagttttcatattcgcagtagttgggatgcagttgttcggtaaaagctacaaggaatgtgtttgtaagattaatcaggactgcgagcttccaaggtggcacatgcacgacttctttcatagcttcttaattgtctttagagtgctgtgtggagagtggatcgagacaatgtgggactgcatggaagtggcgggacaagccatgtgcttaattgtcttcatgatggttatggtgattggaaacctggtggtgcttaacctctttctcgcgctgctgctgtctagcttctccgccgataatctggctgcaactgacgatgacggagagatgaacaacttgcaaatcagcgtcatccgaataaagaagggggtagcctggacgaagctgaaggtacatgccttcatgcaggcgcattttaagcagcgtgaagctgatgaggtgaaacccctggacgagctgtatgaaaagaaggccaactgtatcgcaaaccacacaggcgctgacatacaccgcaacggcgattttcagaagaacgggaatgggacaaccagcggcatcggatccagcgtggagaagtatatcatagacgaggatcacatgtccttcattaataaccccaatctcactgtgcgcgttccaattgcagtaggtgagtcggactttgaaaacctcaacactgaggatgtcagtagcgaatcagatccagaaggctccaaagacaagctggatgacaccagctcttccgagggatcaactatcgacatcaagcccgaggtagaagaagtccccgtggaacagccagaggaatatttagatcccgatgcctgcttcaccgagggatgtgtgcagcgttttaagtgttgtcaagtcaatattgaagagggactaggtaaatcttggtggattttaagaaaaacttgctttctgattgtagaacacaactggtttgaaaccttcattatcttcatgatactgctgagtagtggcgctttagcctttgaagatatctacattgaacagcgaaaaactattagaaccattctggagtatgcagacaaggtcttcacctacatcttcatcttggagatgctcctcaagtggacagcatatgggttcgtgaaattcttcacaaacgcctggtgctggttggactttttgatagtggcagtggtggttaacgccctggtcggagcaataccctctatcatgaacgtcctcctggtatgcttaatcttttggcttatattctccatcatgggcgtcaacctcttcgctgggaagtatcactactgcttcaacgagaccagtgagatcaggtttgaaattgaagacgttaataataagaccgaatgcgaaaagctaatggagggcaataatacggaaatccgctggaagaacgtgaagattaattttgacaatgttggggccggatacttggctctcctacaggtggccacctttaaggggtggatggatataatgtatgccgccgtggactctaggaagccggatgagcagccaaaatacgaagacaatatctacatgtatatttactttgtaatcttcatcattttcggcagcttttttaccctaaacctcttcatcggtgtcatcatcgataactttaaccagcaaaagaagaagttcgggggccaagatatattcatgaccgaagagcagaagaagtattacaatgcaatgaaaaaactcggctctaagaagcctcaaaagcctattccccgccccctgaacaaaattcaggggatcgtgttcgattttgtgacacaacaagcctttgatatcgtcatcatgatgctcatctgtctcaacatggtgactatgatggtggaaactgacacacagtctaaacagatggagaatatcttatactggatcaacctagtgtttgtgattttctttacatgtgaatgcgtactgaagatgtttgctctcagacactactattttaccataggctggaatatcttcgatttcgtggttgtcatactgtccatagtggggatgtttctcgctgacataatcgagaagtacttcgtctctcccacattgttcagggtcatcagactggcacgtattggccggatcttgcggctgataaaaggggctaagggtatccgcacactgttgtttgccctgatgatgagcctgcctgccctctttaatatcgggttgttactcttcttggtgatgtttatcttctccattttcggcatgagtaattttgcttacgtgaagcacgaagccgggattgatgacatgtttaatttcgagacatttggcaattccatgatctgtctgttccagatcactactagtgctggctgggatgggttacttctgcccatcctgaataggccccccgactgcagccttgacaaagaacacccaggatctggatttaaaggagactgcggaaatcccagcgtgggcatattctttttcgtctcctacatcattatctctttcctgattgtggtcaacatgtacatcgcaataattctagagaatttttccgtggctaccgaggagagtgccgatcctttatctgaggatgattttgagactttctatgagatctgggaaaagtttgaccccgacgcgacacagttcattgaatactgtaagctagccgattttgccgacgccctggaacatcccttgcgagtgcccaaaccaaacacaattgagctaattgccatggacctgccaatggtttcaggggaccgaatacactgtcttgatatactgttcgccttcacgaagagagtgttaggggattctggggagttggatatacttagacagcagatggaagaaagattcgtggcttctaatccaagtaaagtgtcatatgagcccattacaacaaccctgcgacggaagcaggaggaagtgagcgccgtggtactgcaacgggcctatcgcggacacttggctcgacgcggctttatttgcaaaaagactacctccaataaattggagaacggtgggacacaccgcgagaagaaagaatcgacaccttcaacagcttccttaccttcctacgactctgttaccaagccggaaaaagaaaagcagcagagagctgaggaaggtcgcagagaacgcgcgaagagacaaaaggaggtacgggaatccaaatgctag

SEQ ID NO: 205474 - DNA, 2919 bp, synthetic construct
  misc_feature 1..2919: note = Description of Artificial Sequence: Synthetic coding sequence
  source 1..2919: mol_type = other DNA
atggccgcccggctgctggccccccccggccccgacagcttcaagccctttacacccgaaagtctggccaacatcgaaaggaggatagctgagagtaagctgaaaaagcctcccaaggcagacggctctcatagggaggacgatgaagacagtaagccgaagcctaactccgatctggaagcgggaaagagtttgccgttcatttacggcgacataccgcaggggcttgtcgcggtgcccctcgaggactttgacccgtattacctgacacaaaagacatttgtggttctaaaccgtgggaaaaccttgttccggttctctgctacacctgccctctacatactctcccctttcaacctcattcgccgcatagctatcaagatccttatccattccgtgtttagcatgatcatcatgtgtaccatcctgacaaattgcgtctttatgaccttctccaatcctcccgactggtctaagaatgtagagtatacattcacgggcatttatacattcgaaagcctagtgaagattatcgccagaggcttctgcatcgatggctttacattcctgagagacccatggaattggctcgacttcagcgtgatcatgatggcttacgtgaccgagttcgttgatctggggaacgttagcgccctccgaacctttcgcgtactgcgtgccctgaaaacgatttccgtgattcccgggctgaagaccatcgtgggcgcattaattcagagtgtaaaaaagcttagcgacgtgatgatcttgaccgttttctgtctctccgtgttcgccttaatcgggctgcagctgtttatgggcaatctcaggaataagtgtgttgtctggcccataaatttcaatgagtcctacctggagaatgggacgaagggattcgactgggaggaatacatcaataacaagactaatttctatactgtgcccggcatgctcgaacctctgctgtgcgggaatagtagtgatgcaggccagtgccccgagggataccagtgcatgaaggctgggagaaacccgaattacgggtatacatccttcgatactttttcatgggccttcctcgccctgttcagattgatgacacaggattactgggagaatctgtaccaactgacactgagagccgccggtaagacctatatgatcttcttcgtcctggtgatcttcgtgggttccttctatctggtgaacctgattctggcagtagtggcaatggcctatgaggaacagaaccaggctacgcttgaggaggcagaacagaaagaagcggaattcaaggctatgctcgaacagctcaagaaacaacaggaggaagcccaggctgctgcaatggccacatccgctggaaccgtatctgaggatgccattgaagaagaaggcgaggaggggggaggctcaccacgaagtagcagtgaaatcagcaagctcagcagcaagtccgctaaagagaggaggaacaggcgcaagaagcggaagcaaaaggagttgagcgagggtgaggaaaagggagatcccgaaaaagtgttcaaatcggagagcgaggatggcatgcgccggaaggcatttagactcccagacaaccggatcgggagaaaattctcaattatgaaccagtccttgctgtctattcccggttcacctttcctgtcccggcacaactcaaagtcatctattttctcctttcgcggccctggtagattccgcgatccagggtctgaaaatgaattcgccgatgatgaacattccaccgtggaggagtcagaggggcggcgagattctctgtttattccaattcgagcgagagagcgccggtccagttactctggatattctggctatagccagggcagtcgtagctcaaggatcttcccatcgctcaggagaagcgtgaagcgaaattccacggtggactgtaatggagtggtgagcctgataggggggccaggttcacacatcggcgggagactcctacctgaagctacaaccgaagttgaaatcaaaaagaaaggacctggctctcttttggtcagcatggaccagttggccagctatgggagaaaagaccgcatcaactctataatgtccgtagtcacaaatactcttgtcgaggagttagaggagtcgcagcgaaaatgcccaccttgttggtacaagttcgccaatactttcctgatttgggagtgccatccctactggatcaaacttaaggaaatcgtgaatttgatagtgatggaccccttcgtggacctggccatcacaatttgcatcgtactgaacactctgtttatggccatggaacaccacccaatgaccccacagtttgagcacgtcctggccgtcggtaatctggtcttcacgggcatcttcacagcggaaatgtttcttaagttgatcgctatggacccctactattactttcaagaaggatggaatatctttgacggatttattgtgtctctgagtctgatggaattgtcactggccgatgtggagggcctgtccgtgctgagatctttccgcctgttgcgagttttcaagctcgcaaagagttggccaacattgaacatgctaattaagattattggaaatagtgtgggagcccttggcaacttaactttggtgctggccataatcgtgttcatctttgccgtggtcggcatgcaattgttcgggaagtcttacaaggagtgtgtatgtaaaatcaatcaggactgtgagctccctaggtggcacatgcacgactttttccacagctttctgatcgtgtttcgggtcctgtgcggcgagtggatcgaaacgatgtgggattgcatggaagttgccggacaggctatgtgcctgatagtgtttatgatggtgatggtcattggaaacctggtagtatcgacaaatctgtag

SEQ ID NO: 205475 - DNA, 6030 bp, synthetic construct
  misc_feature 1..6030: note = Description of Artificial Sequence: Synthetic coding sequence
  source 1..6030: mol_type = other DNA
atggagcagaccgtgctggtgccccccggccccgacagcttcaacttttttacccgcgagagtttggctgcgatcgaacgccgcattgcagaggaaaaggcgaagaaccccaaacccgataaaaaggatgacgatgaaaatgggccgaaacctaacagcgacctcgaggcgggaaaaaatctaccattcatctacggcgatatccccccagagatggtctccgagcctctcgaggatctggatccctactacatcaataaaaagaccttcattgtgttaaataaaggaaaggccatattccggttctccgccacaagtgctctatacattttaaccccctttaacccgctcaggaaaatcgcgatcaagatccttgtccactcacttttttccatgctcattatgtgcactattctcaccaactgtgtgtttatgacaatgtccaatccacccgactggacgaagaacgttgagtatacttttacaggtatctatacgttcgaaagcctgattaagataatcgccaggggattttgtctggaggatttcacatttctgagagacccatggaattggctcgacttcacggtgattacttttgcctatgtgactgaattcgtcgacctgggcaacgtgtccgccctgcggacctttagggtcttgcgagccctaaagacaatctcggtcatccccggactgaagacaatcgtgggggccttgattcagagtgtcaaaaaacttagcgacgtaatgattctgactgtgttctgccttagcgtcttcgcgctcattggtttgcagctgttcatgggcaatcttagaaacaagtgcattcagtggcccccgactaatgcttcgctcgaggaacacagtattgagaagaacatcaccgtgaactacaacggcaccctcatcaatgaaactgttttcgagttcgattggaagagctatatccaggactctcgataccactattttctggaaggattcctggacgccctgctatgcggcaattctagcgacgccgggcaatgtcctgagggctacatgtgcgttaaggcaggtcggaaccccaactatggctacacctcattcgacacattttcctgggcctttttgagcctgttcaggctgatgacacaagacttctgggagaacctctaccaactgactctgagagccgccggcaagacttatatgatttttttcgtgctggttatcttccttggttcattttacctgataaatttgatacttgcagtggttgcgatggcctacgaggaacagaatcaagccacattggaggaggccgaacagaaagaagctgagtttcagcagatgattgagcagctaaagaaacagcaggaggctgcacaacaggccgccacagccactgcaagtgagcactcccgggagccgagcgcggccggtaggctatccgatagcagctctgaagcgtctaaactctcgtccaaaagcgccaaggaacgtagaaatagaagaaagaagcgcaagcaaaaagaacaatccggtggggaagaaaaagacgaagacgagtttcagaaatctgagtccgaggatagcatccggaggaaaggattcaggttcagtatcgagggtaataggcttacatacgagaagcgctatagctcaccccatcagagcctgctctctataagggggtccttgttctccccccgtagaaactctcggacgtccttatttagctttaggggccgcgcaaaagacgtgggcagcgaaaacgacttcgccgatgatgagcactctacctttgaggacaacgaaagccgccgggattctcttttcgttcccagacggcacggtgaacgacggaactccaatctttcacaaaccagtaggtcctctcggatgctggcagtttttcccgctaacggaaaaatgcacagtaccgttgattgcaatggggtggtgtcgctcgtcggtggaccaagcgtcccaacatcccctgttggccagctgttgccagaagtaattattgacaaacctgccactgacgataacggcacaacaactgagactgaaatgcggaaacgaaggagttctagctttcacgtgagtatggactttctggaggaccctagtcaacgacaaagagctatgtcaatcgcttccattctgactaataccgtggaggaattggaagaatctcggcaaaagtgccctccctgttggtataagttctcgaacatattcctcatttgggattgctcaccctactggttgaaggtgaagcacgtggtcaatctcgttgtaatggacccttttgttgatttggccatcaccatttgcatagttttgaacactctgttcatggctatggagcattatccaatgaccgatcactttaataatgtgctgacggtcggtaatctggtgtttaccggcatttttacagccgagatgtttcttaagatcattgcaatggatccttattactactttcaggagggctggaacattttcgatggctttatcgttacactgagcctggttgagctcggtctggcaaatgtggagggtctttcagtgctgcggagtttccggctgctgcgcgtgttcaaactggccaagtcgtggcctactcttaatatgctgattaaaattatcggaaattctgtcggcgccctgggcaacctgaccctggtgctggctatcatcgtgtttatttttgcagttgtcggcatgcagttgtttggtaagagttacaaggattgcgtgtgcaagattgcttctgactgccaattgcccagatggcacatgaatgatttttttcactccttcctgatagtgtttagagttctgtgtggggagtggatcgaaacaatgtgggattgcatggaggtggctggacaggcaatgtgcctgactgtgtttatgatggtgatggtaatcggtaatctggtcgtcctgaacttatttctggcactgcttctgtcctccttctctgcggataatctcgccgccacagacgacgacaatgaaatgaataacctgcaaatcgccgtggatcgaatgcataaaggagtggcatacgtgaagcgcaagatatacgaatttatacagcagtcctttatccgaaaacagaaaatccttgacgagatcaaacccctcgacgatctgaacaacaaaaaagattcctgcatgtccaatcataccgctgagatcggtaaggatttggattatctcaaggacgtaaatggtaccacaagtggcatcggaacagggtccagcgttgaaaagtatatcattgatgagtctgattatatgtccttcattaacaatcccagcctgactgtgacagtcccaatagccgtgggcgagtccgattttgaaaatctcaacaccgaggattttagctctgagtctgatcttgaggagagcaaggaaaagttaaacgaatccagttcaagtagcgaggggagcactgtcgatatcggggcccctgtcgaggaacaaccggtggttgagcctgaagagacactcgaacctgaagcatgcttcaccgaaggctgtgttcagcgcttcaaatgctgccagatcaatgtcgaagaaggccgcgggaaacagtggtggaacctgcgccgcacatgttttagaatcgtggagcacaattggttcgagaccttcattgtgtttatgattctgcttagctccggagcactggcctttgaggacatctatattgaccagcggaaaaccataaaaactatgttggagtatgctgacaaagtgttcacttatatttttatcctggaaatgctcctgaagtgggtcgcatacgggtatcagacatattttaccaatgcgtggtgctggttggatttcttaatcgtagacgtgagtctcgtgagcctgaccgccaatgccttgggctacagtgaacttggagcaatcaagagccttagaaccctcagggccttgcgcccactgcgggctctgtcacgcttcgaagggatgagggtggtggttaacgcactcctgggcgccataccaagcatcatgaacgttctgctggtgtgtctcatcttttggctcatcttttccatcatgggggtcaatctttttgcaggtaagttttatcattgtattaatacaaccaccggtgacagatttgacatcgaagacgtgaacaatcacactgactgtttgaagttgatcgaacggaatgagaccgctcgctggaagaacgtcaaagttaactttgataacgtcgggtttggatatttatccctactccaggtggccacatttaaggggtggatggacatcatgtatgcagcagtggactccagaaacgtggaactgcaaccaaaatacgaggagtccctgtatatgtacctgtactttgtaatctttattatctttggatctttctttaccctgaacctgtttataggcgtcatcatagacaattttaaccaacagaagaagaagtttgggggccaggacattttcatgaccgaagagcagaaaaaatactataacgccatgaaaaagctcggctctaagaagccccaaaaaccaatacctcggcccggtaataagttccagggcatggtttttgatttcgtcaccagacaggtattcgacatttctatcatgatcctcatttgccttaatatggtgaccatgatggtggaaactgatgatcagtctgagtatgtgacaactatcttaagccgcattaatctcgttttcattgtactctttaccggagagtgtgtgctgaaactaatttccctacggcattactacttcactattggttggaacattttcgatttcgtagtcgtgatcctcagtatagtggggatgttcttggctgagttgatagaaaaatactttgtcagccctaccctatttcgggttatccgactggcaaggattggacgcatcttgaggctgataaaaggcgctaagggaatccggacgcttctttttgctctaatgatgtcactccctgccttgttcaacatcggattgctgctgttcttggtgatgttcatttacgcaatcttcggcatgtctaacttcgcatacgttaagcgagaagtgggaatagacgacatgtttaacttcgagacgtttggaaactccatgatctgcctgtttcagattaccacaagcgccggctgggacggcctgctggcccccatcctaaacagtaagccaccagattgtgaccccaacaaggttaatcctgggagttcagtcaagggagattgtgggaacccctccgttggaatatttttcttcgtctcatacattatcatctctttccttgtggtcgtgaacatgtacattgcagtgattctggaaaacttctcagttgcaaccgaggaaagcgcggagccactatcggaggacgacttcgagatgttttacgaggtgtgggagaagtttgacccggacgcaactcagttcatggagttcgagaagctctcccagtttgcagcagcactagaaccccctctgaatctccctcagcctaacaaactacagctgattgctatggacctgccgatggtatcaggcgataggatacactgtctcgatatcctcttcgcctttacaaaacgagtgcttggcgaatctggtgaaatggacgcccttcgcatccaaatggaggagcggtttatggcctccaatccatctaaggttagctatcagccgattactaccactctcaagagaaagcaggaagaggtcagtgcagtcattatccaaagggcctacagaaggcacctactgaagcggaccgtcaagcaggccagctttacttacaataaaaacaaaatcaaaggtggggccaacctcttgataaaagaggacatgataatagatagaattaacgagaactccatcactgaaaagaccgacctaacaatgagcacggccgcctgtccccctagctacgacagggtgaccaagcccattgttgaaaagcatgagcaagaaggcaaggatgagaaagcgaaagggaaatag

SEQ ID NO: 205476 - DNA, 5997 bp, synthetic construct
  misc_feature 1..5997: note = Description of Artificial Sequence: Synthetic coding sequence
  source 1..5997: mol_type = other DNA
atggagcagaccgtgctggtgccccccggccccgacagcttcaacttttttacccgagagtccctcgcagctattgagagacgaatcgcagaagagaaggcaaagaatccaaaaccggataagaaggacgatgacgaaaacggccccaagcccaactcagacctcgaagccggaaaaaacttgccgtttatttatggcgacatccctcctgagatggtgtccgaacctttagaagatctggatccttactatattaataaaaagacttttattgtgttgaacaaagggaaggctattttcaggttttccgccacatcagccttgtatatcctgacccccttcaatcccctccgcaaaatcgctattaagatccttgtgcatagtctgttcagcatgctgattatgtgcacgattttgaccaattgtgtctttatgacaatgagtaatcctcccgattggacaaaaaatgtcgaatatacctttactgggatttacacctttgagtctttaatcaagatcattgcccgcggcttttgccttgaggatttcacatttctaagggacccttggaattggctggactttaccgtgattactttcgcgtatgtcaccgagttcgtggatctgggtaatgtgagcgccctcagaactttccgcgtgctaagggcgctcaaaactatcagtgttattcccggtctcaagaccattgtcggtgccctgattcaatcagtaaaaaagctctccgacgtgatgatcctgacagtgttctgtctttcagtctttgcgctgattggcctgcagctgtttatgggaaaccttcggaacaagtgcatacaatggccccccaccaatgccagtcttgaggaacactcaattgagaaaaatattactgtaaattataacggtacactgattaatgaaaccgtgtttgagttcgactggaagtcatacatccaagactcccgataccattactttttggaggggttcctggacgcactgctgtgtggaaactctagcgatgccggacagtgccccgagggatatatgtgtgtcaaggctggacgcaatccaaattacggatacacatcctttgacacgttttcttgggcatttctgtcattattcagactcatgactcaggacttttgggagaatctctaccagctcacactgcgggctgctggcaagacgtatatgattttcttcgtgcttgtgatttttctcgggtccttctatttgattaacctcatactggctgtcgtggcgatggcttacgaggaacagaaccaggccacgctcgaagaggccgaacagaaggaagctgaattccagcagatgatcgaacagttgaagaaacaacaggaggctgcccagcaggcagctactgctacagcctcggaacatagccgggagccctccgcagccggacgcttgtctgattccagctctgaggcttccaagctgtcgagtaaatctgcaaaggagaggcggaacaggagaaagaagagaaagcagaaagagcagtccggcggcgaggagaaagacgaggatgaatttcaaaaatccgagagtgaagactccattcggaggaaaggtttccgcttcagcattgaaggcaatcggttgacctacgagaaaagatactcttcaccccaccagagcttgctctccattcggggatcattgtttagcccacggagaaattctaggacttcgttgttttcattcagaggacgggctaaagatgttggctccgaaaacgactttgcagatgacgagcactcaacttttgaggacaacgagtcacgtcgagattctcttttcgtcccccgtcggcatggcgagcgccggaattccaacttgagccaaacctctcgttctagccggatgctggccgtctttcctgcaaatgggaaaatgcacagcacggtcgactgtaatggtgtggtcagcttggtaggcggaccatccgtaccgacttcaccggtcggccagctgttgcctgagggcactactaccgaaactgagatgcgcaagcgacggtcatcctctttccatgtgagtatggatttcctagaggacccaagccagcgtcagcgagctatgtccattgcatcaattttgaccaataccgtggaagagctagaggagtcaaggcagaaatgtcccccatgctggtataaatttagcaatatatttctcatttgggactgttccccgtattggctcaaggtgaaacatgtggtgaacttggtggtcatggatccttttgttgatttagctatcaccatctgtatagtacttaacacactgtttatggctatggagcactatcccatgaccgatcatttcaataacgtcctcactgttggtaatttggtgttcacaggcatctttactgcggaaatgtttctcaagattattgccatggacccgtattattattttcaggagggctggaatatctttgatgggttcattgtgaccctttcactggtagagctgggtctcgccaatgtcgaaggactttccgtcctccggtcctttcgattgttgagggtgttcaagctcgcaaaatcctggccaacgctgaacatgctaataaaaattattggtaacagcgttggtgccctgggaaatttgacgcttgtgcttgccattatcgttttcatatttgcagtggtcggaatgcagttattcggcaagtcgtacaaagattgtgtgtgtaagatagcctccgattgtcagttgccacgttggcatatgaatgactttttccacagtttccttatagtctttagagtactctgtggagagtggattgagaccatgtgggattgtatggaggtcgccggccaggctatgtgcctcaccgtttttatgatggtcatggtcattggcaacttggtagtcctcaatttgttcttagctctgctgctgtcctctttcagcgccgacaaccttgccgccaccgatgatgacaatgagatgaataacctccaaatagcggtagatcgaatgcataaaggtgtggcctacgtgaaacgcaaaatttatgagtttattcagcagtcctttatcaggaaacagaagatattggatgagataaaacccctggacgaccttaataataagaaagatagctgtatgtccaatcacacagcggagataggaaaagaccttgattatctgaaggacgtcaatggcactaccagcgggataggcaccgggagtagtgtggagaaatatattattgacgagtcagattatatgtcattcattaacaaccctagcttaactgtaacagtacccattgcagtgggggagagcgacttcgagaatctgaacactgaggacttttcctcggagagtgaccttgaggagagcaaggaaaaattgaacgagtccagttcttcctcagaggggtccactgtggatatcggcgctcccgtagaagaacaacctgtcgtggagcccgaggagaccctggagccagaagcctgctttacggaggggtgtgtgcaaagattcaagtgctgtcagatcaatgttgaggaggggcggggtaagcagtggtggaatctgcgcaggacttgcttcaggattgtggagcacaattggttcgaaaccttcatagtgtttatgatcttgcttagttctggagcccttgcttttgaggacatctatatcgatcaacggaagactattaagacaatgctagaatacgccgataaagtgttcacctacatcttcattctggagatgctgctaaagtgggtggcttacggttatcagacctactttaccaacgcatggtgctggctggattttctaatagttgatgtgtcactggtcagcctgaccgccaatgcccttgggtacagtgagctaggggcgatcaaatccctgcgaacactgcgggccctccggccactacgggccctctcacggtttgagggaatgcgtgtggtggtgaacgctctgctcggtgccataccctctatcatgaatgtgcttctggtctgtctaatcttttggttaattttctcaatcatgggggtcaatttattcgctggcaaattctaccactgtatcaatacaaccacaggcgaccgtttcgatatcgaggacgtcaataatcataccgactgtctgaagctgatagaacgcaatgaaactgctagatggaaaaacgtgaaagtgaatttcgacaacgttgggttcgggtacctgtcgctcctacaggtagctacttttaagggatggatggatataatgtacgctgcagttgattcaagaaatgtggagttacagcctaaatacgaagagagcttgtacatgtacctctactttgtgattttcataattttcgggagcttctttacgctgaatctgttcatcggcgttatcatagacaactttaaccaacagaagaaaaagttcggcgggcaggacatctttatgactgaagagcagaaaaaatattacaacgccatgaaaaagctaggatcgaaaaaaccgcagaagcccatcccccggccaggaaataaatttcagggcatggtgttcgactttgtgactagacaggttttcgacatcagcataatgattctcatctgtctgaatatggtgacaatgatggttgaaactgacgatcaatctgagtacgtcacaaccattctttccagaatcaacctagtattcattgtgctgtttaccggtgagtgtgtgctgaagctaatctccttgcggcattattactttaccatcggctggaatatctttgacttcgttgtcgtcatcctaagcatcgtggggatgttcctcgcagaattaattgagaagtatttcgtgtcgcctactctgtttcgcgtgattcgattagcaaggattgggagaatcctccggctaatcaaaggtgcaaagggaatacgaaccctgctgtttgcactgatgatgagcctgccagcactgtttaatatcggccttcttttattcttggtgatgttcatctacgccatattcgggatgtctaattttgcgtatgtcaagcgggaggttggcattgacgatatgtttaacttcgaaacattcggcaattcaatgatttgcctgtttcaaattaccacatctgcaggttgggatgggctgctcgcccccattctgaattcaaaaccacccgattgcgatcctaacaaggtgaatcccgggagcagcgtgaagggtgactgcggaaatccctcagtgggcatctttttcttcgtctcatacatcattatatcattcctagttgtggtgaacatgtacatcgcagttattctggagaacttctccgtagccactgaggagtctgccgagcccctatctgaagatgacttcgagatgttctatgaggtttgggagaagttcgatcccgatgcgacccagtttatggaatttgaaaagctcagtcagttcgccgccgctcttgaacccccacttaacctgccacagccgaataagctgcagctgattgctatggatctcccgatggtgagtggggataggattcattgcttggacatattatttgcctttacaaagcgagttttaggggagagtggggagatggacgcgctccgcatccagatggaggaaagatttatggctagcaatccctctaaagtgagttatcagccaataacaactacattaaaacggaaacaagaggaagtgtcagccgtgattatccagagagcatatcggcgacatctcctaaagaggaccgtcaagcaggcatcgttcacctataataaaaacaagatcaaaggcggtgccaacctgttgatcaaggaagatatgatcatcgatcgcattaatgaaaactccattacagagaaaacggacctcaccatgtcaactgctgcctgcccgccatcatacgatagggtcacaaagccgatcgtggaaaaacacgagcaagaaggtaaagatgagaaggccaagggcaaatag

SEQ ID NO: 205477 - DNA, 5946 bp, synthetic construct
  misc_feature 1..5946: note = Description of Artificial Sequence: Synthetic coding sequence
  source 1..5946: mol_type = other DNA
atggagcagaccgtgctggtgccccccggccccgacagcttcaacttttttacacgcgagagccttgcagcgattgaaagacgcattgctgaggaaaaagctaagaacccaaaacccgataagaaggatgatgatgagaacggtccaaaaccgaattcagatctcgaggcggggaagaatctaccattcatctacggggacatccctcccgaaatggtaagcgaaccactggaagatttggacccctattacataaataagaagacgttcatcgtcctcaataagggaaaggcgatcttcagattctcggcaaccagtgcattatacatattgacccctttcaacccacttcgcaaaatcgccatcaagatcttagtccacagcctgttctctatgcttatcatgtgcaccatcttgactaattgtgtgttcatgacaatgagcaatccacctgattggacaaagaacgttgaatacaccttcactggaatatacaccttcgagtccctcatcaagatcatcgccagaggattctgtttagaggacttcaccttcctgagggatccatggaactggctggattttactgtaatcacatttgcatacgtcacggagttcgtggacttgggaaatgtgtcagcgctcagaacattccgcgtcctgcgcgctctgaaaactatcagcgtgattcctgggctgaagacaattgtgggggcccttattcagtcagttaagaagctttctgatgtgatgatactgactgtcttctgtttgtccgtgttcgccttaatagggttgcagctcttcatggggaacctgcgcaacaaatgcattcagtggccccccacaaatgcgagcctggaggagcacagcattgaaaaaaatatcaccgtgaactacaatggcactttaatcaatgagaccgtgtttgaattcgactggaagtcttacatccaggattctcgataccactatttccttgagggcttcctggacgctctgctgtgcggaaactctagcgacgctggacaatgccccgagggctatatgtgtgtaaaggcaggtcgaaaccctaactatggctatacatcatttgacacattctcatgggccttcctgagtctgttccgcctgatgacccaggacttctgggaaaacttataccaattgacactgagagccgctggcaaaacttatatgatattcttcgtgttggtgattttcctcggatctttctatctgatcaacctgattctggctgttgtggctatggcgtacgaagagcagaaccaagccactctggaagaggcagaacagaaggaagccgagtttcagcaaatgatagagcaactaaagaaacagcaggaggcagcacagcaggctgcaacagccaccgcctcagagcattcacgagagccgtctgctgccggccggctatcagactctagctccgaggcgtctaagctgagttctaaatctgcgaaggagaggagaaataggcgaaaaaagcggaagcagaaggaacagtcggggggagaggagaaggacgaagacgaatttcaaaaatccgaaagcgaagattcgataagacggaagggattcaggttttcaattgaggggaacagactgacatacgagaagcgatacagcagcccccaccagagtcttttatcaatcagagggtctttgttcagcccacggcgcaatagtagaacctccctcttcagttttcggggccgtgcgaaggatgtcggcagcgaaaatgatttcgctgatgacgaacactcaaccttcgaagacaatgaatcgagacgggattccctctttgtgcctaggcgacacggggaacgccgcaattcgaacctgagccagactagcagatccagcagaatgctcgcagtgtttccggccaacggaaaaatgcactctacagtcgactgcaacggagtggtctccttagggacaactactgagactgaaatgagaaagcgaagatcatcctcttttcatgtgagtatggattttttggaagatccaagtcagcgtcagagagccatgagcattgcatccattctcactaacacagtcgaggagctcgaggagtctagacagaaatgtcccccttgttggtataagttttctaacatctttctcatctgggactgctccccttactggctaaaggtgaagcatgtagtcaatctcgtggttatggatcccttcgtcgacttggccattacgatctgtattgtgctcaacaccctcttcatggccatggaacactatcccatgacagaccattttaataacgtgcttaccgtagggaatctcgtcttcacaggaatcttcactgctgagatgtttctgaaaataatcgccatggacccttattattattttcaggaaggatggaacatatttgatggctttatagttacccttagcttagttgaattgggactggccaatgttgaagggctgtctgtactccgctctttcagactcttgagagtatttaaactggcgaaatcatggccaacactgaatatgctcatcaaaatcattggcaactctgtaggtgccctcggtaatctcacactggttctagctatcattgtgtttatctttgccgtggtcggtatgcagttattcgggaagtcatacaaggactgcgtgtgcaagatagccagcgattgtcaactcccgagatggcacatgaacgactttttccattccttcctcatcgtgttccgggtcctgtgtggcgagtggattgagacaatgtgggactgtatggaggtagccgggcaagccatgtgtttaacagtattcatgatggtgatggtgatcggaaacctcgtggtgctgaatctgttcttggccctcttgctgtcctcattctcagctgataacttggctgccacagacgatgacaacgagatgaacaatctccagatcgccgtggaccgtatgcataaaggcgtcgcatacgtgaaaaggaagatatatgaatttatccaacaatcctttattcgaaagcagaaaattctggacgagataaaacccctggacgatcttaacaacaaaaaagattcctgcatgagcaatcacaccgccgaaattgggaaggaccttgactacttgaaggacgtcaacggtacaacgtccggcattggcaccggcagttccgtggagaagtatatcatcgatgagagcgattacatgtctttcattaacaatccctcccttacagtaactgtccccatagctgtgggagagagcgactttgagaacttgaacacggaggacttctcctctgaaagcgatttggaagagtccaaagagaaattgaatgaaagttcctcttcgtcggaggggtctacagtcgatatcggagcaccagtggaggaacaaccagtggtggaacctgaagaaaccctggagccagaggcttgctttacagagggatgtgtgcagagatttaagtgctgtcagattaatgtagaggagggcagaggtaaacagtggtggaatttaaggcgaacttgtttccggatcgtggagcacaactggtttgagacttttatcgtgtttatgattctcctatctagtggcgctctcgcctttgaggacatttatattgaccaacgaaaaactattaagaccatgctggaatatgccgacaaagtattcacctacatattcatcttggagatgctccttaaatgggtggcctatgggtatcagacttattttacgaacgcatggtgttggcttgatttcctcatcgtcgatgtgtcactggtttctctgacggccaacgcactgggctactcggaactgggagcaattaagtcccttcgcacgctccgggccctgcggcccctgcgggctttatccagattcgagggtatgagagtggtggtgaatgccctgttgggcgccataccatccataatgaacgtgctgctcgtctgtctcattttctggttgattttctcgatcatgggggtcaacctgttcgctgggaagttttatcactgtataaataccacaacaggggacaggttcgatatcgaggacgtgaacaaccatactgattgtttaaaactcattgagagaaatgaaaccgctaggtggaagaacgtgaaagtgaactttgacaatgtcggattcgggtacctgtcgctcttacaggtggccaccttcaagggatggatggatattatgtacgccgccgtggattctcgcaacgtggagctgcagccaaagtacgaggaatccctgtacatgtatctgtattttgtcatatttataatcttcggctctttcttcaccctgaatctctttataggagttatcattgacaatttcaatcagcagaagaaaaagtttggcggacaggatatctttatgaccgaggagcaaaaaaaatattataatgccatgaagaaactgggcagcaagaagcctcagaagccgatccctagaccaggaaataagttccagggcatggtgttcgactttgtgacgagacaagtgtttgatatatcaatcatgattctcatttgtctgaatatggtcactatgatggtcgaaacggatgatcagtctgagtacgtaacgaccattctttcacgcataaatcttgtgttcattgtgttgttcactggcgagtgtgttctgaaactcatcagcctacgccattactacttcaccatcggttggaatatcttcgacttcgttgtggttatattgtctatcgtggggatgtttctcgctgaactaatcgagaagtatttcgtgagccctaccctgttccgtgtgatcagactggctcgcattggacgaatcctgcggcttattaaaggtgctaaaggtattcgcactctcctgtttgcactgatgatgtctctacccgccttgtttaatattggcctcctgctcttcctggtcatgttcatctacgccatcttcgggatgtcaaactttgcctacgtgaaaagagaagtgggcatagatgatatgtttaatttcgaaacttttgggaatagcatgatttgcctgtttcagataacaacctccgctggttgggacgggcttctggcccctatcttaaacagtaagccgccggattgtgaccctaataaagtcaatccagggtcgtccgtcaagggagactgcgggaacccttccgtaggcatttttttcttcgtttcctatataatcattagctttttggtggttgtgaatatgtacatcgcagtcatcctagaaaacttttcagttgcaactgaggaaagcgccgagcccctttctgaggatgactttgagatgttttatgaggtgtgggaaaagttcgaccctgatgcgacacagttcatggagttcgagaaactgtctcagtttgctgcagcactggaacccccgctcaatctgccccagccgaataagctgcagttgattgcaatggacctccccatggtctctggtgatcgcatccactgtctggacatcctgttcgcttttaccaagcgggtgcttggggaaagcggggagatggacgcactgcggattcaaatggaagaacgcttcatggcctctaacccaagtaaggtctcctatcagcctataaccactactctaaaaaggaagcaggaagaggtgtcagccgtgatcattcagcgggcttaccgccggcatctgctcaaaaggaccgtcaaacaagcgagtttcacttacaacaagaacaagataaaaggcggcgccaatcttctcatcaaggaagatatgattatcgataggattaacgaaaacagtattacggaaaaaacagatctgactatgtctacagcggcttgcccaccttcttacgaccgagtgaccaaaccaatcgtggagaaacacgagcaggagggaaaagacgagaaagccaaaggcaaatag

SEQ ID NO: 205478 - DNA, 6030 bp, synthetic construct
  misc_feature 1..6030: note = Description of Artificial Sequence: Synthetic coding sequence
  source 1..6030: mol_type = other DNA
atggagcagaccgtgctggtgccccccggccccgacagcttcaacttcttcacgcgggaatcccttgcagcaattgaacggagaatcgctgaagaaaaagccaaaaaccctaagcctgataaaaaggatgacgacgaaaatggacctaagccaaattcggatctggaagcaggaaagaatttaccttttatttacggtgacatcccacccgagatggtttccgaaccccttgaagatctggatccatattacatcaacaaaaagaccttcatcgttctcaacaaaggcaaagctatcttccgattttcagccacttcagccctgtacattctgacccccttcaacccattgaggaaaattgctatcaagattctggttcatagtctattcagcatgctgattatgtgtactatcctcacaaattgtgtgttcatgaccatgtctaatccccccgattggacgaaaaacgtcgaatacaccttcacgggcatctacacctttgaatcacttatcaaaatcattgcccgagggttctgtctcgaagactttacattcttgcgcgacccttggaactggttggatttcacagtcattacctttgcctatgtgaccgagtttgtagacctggggaatgtcagtgccctgcggaccttcagagtcctgagagcgctgaaaacaatatctgtcattccagggctgaaaacaatcgttggagctctaatccaaagcgttaagaagctttccgacgtcatgatactgaccgtgttctgcctgagtgtgttcgctcttatcgggcttcagctgttcatgggcaatctgcgaaataaatgtatccaatggcctccaaccaacgccagtctcgaggaacacagtatcgaaaagaatattaccgtcaattacaacggcacccttatcaatgagaccgtttttgagtttgactggaaaagctatatccaggattccaggtaccactattttctcgagggcttccttgacgctctactgtgcgggaactcgagcgacgccggccagtgccccgagggttacatgtgtgtaaaggcaggcagaaatcctaactatggatataccagcttcgatacatttagctgggcgtttctgagtctgttcaggctcatgacacaagatttctgggagaatctatatcagctcacactccgggctgccgggaaaacgtacatgattttcttcgttcttgtgattttcctgggctcattttacctgattaatttaatcctcgcggtggtggcaatggcatacgaagagcagaaccaagcaacgttagaggaagcggagcaaaaagaggccgagtttcagcagatgatcgaacagttgaagaaacagcaggaggcagcccagcaggctgcaacagcaactgcctccgaacactcccgggagccctcagccgcaggccgtctttctgacagtagtagtgaggcaagcaagctgagtagtaaaagtgccaaagagcggcgtaatcggcggaagaaacgtaaacagaaagagcagtcgggtggggaagagaaggatgaggacgagtttcaaaaaagcgagtctgaagatagcatccgcagaaaaggatttcgattttcaattgaggggaatagactcacttacgaaaagcggtatagcagtccacatcagagccttctttctattaggggctccctcttcagccccaggagaaactctaggacgtccctattttcctttagaggtagggccaaggacgttggttcggaaaacgattttgctgatgatgaacactccacatttgaagacaacgagtcaaggcgggatagtctctttgtgcctaggcggcacggagaaaggcgcaacagtaacctgagccagacatccagaagcagcaggatgctcgccgtgtttcccgccaacggtaagatgcactcaactgtcgattgcaacggagttgtgtcactggtgggtggtccaagtgtgcctactagccctgtgggccaactactgcccgaagttattattgataaacccgccaccgacgataacggaacaaccacagagaccgagatgcgaaagaggcgttcttctagctttcatgtttccatggatttccttgaggacccatctcaacgccaaagagctatgagcatagcttcaatcctaactaacacagtggaggaactggaggagtctaggcagaaatgtcccccgtgctggtacaagttcagcaacattttcctcatatgggattgttctccgtactggctgaaagttaagcatgtcgtgaacctcgtggtgatggacccattcgttgatctcgccattaccatatgcatcgttctgaacacccttttcatggccatggaacactaccctatgactgaccactttaataacgtgttgactgtcggcaatctggtcttcaccggcatcttcactgccgaaatgtttctcaaaattattgcgatggacccttactactattttcaggagggctggaacatttttgatggctttatcgtgaccctgagcctcgtggaactgggactggcgaacgtggaaggtctctccgtgctgaggagtttcagattactgagagtgtttaagctggcgaagagctggccaaccctgaatatgctcataaaaatcatcggtaactctgtaggcgccctgggcaatttaacacttgtgctcgcaatcattgtgttcatttttgcggtcgtgggcatgcagctattcggaaagtcatacaaggattgcgtgtgcaagatagcctccgactgtcagctgccaaggtggcacatgaacgactttttccattcctttctaatcgtgtttcgcgtgctctgtggagagtggatcgagacaatgtgggactgcatggaggtcgccggtcaggccatgtgcctgaccgtctttatgatggtcatggtgattggcaatctcgtcgtcttgaacctttttctcgctctcctgctttctagcttcagcgccgacaatctggccgccacagatgatgacaatgagatgaataacctgcagatcgccgtggaccgcatgcataagggcgtcgcttacgtcaagagaaagatctatgaatttattcagcaatcgttcattcgtaaacagaagatactggacgagatcaaaccactggacgacctgaacaacaagaaggattcgtgcatgtctaaccataccgctgagattggtaaggacctggactacctgaaagatgtgaacggaaccacctctgggatagggacaggttcgtcggtggagaaatacatcatcgatgaatcggactacatgtctttcattaacaacccttcgcttaccgtcactgtgccaattgccgtgggtgagagcgattttgaaaacctgaacaccgaggatttctctagtgaatcagacctcgaagaatccaaggaaaagctaaacgagtcctcatccagcagcgagggaagtacagtggacattggcgctcccgttgaagagcagcctgtcgtggagcctgaggaaactctagagccagaggcatgcttcactgaaggctgcgtacagagattcaagtgctgccagatcaatgttgaagaggggagaggtaaacagtggtggaacctgaggcgcacctgctttagaattgtggagcataattggttcgagacattcatcgtattcatgatattgctctcctccggagcactggccttcgaggatatatacatcgatcagaggaagacaattaaaactatgctggaatacgcggacaaggtgtttacatacatctttattctggaaatgcttctgaaatgggtagcctacggatatcagacctattttacgaacgcatggtgttggctcgatttcctgatagttgatgtcagccttgtgagcctgaccgccaatgctctcggttatagcgaacttggcgccattaaatcactgcgaaccctcagagctctccgacccctgcgtgcattgtcccggttcgagggtatgagagttgtggtcaacgctttactcggcgcaattccaagcattatgaacgtgctgttggtttgtcttattttctggttaatcttcagtattatgggagtgaaccttttcgccggcaagttttatcactgcatcaacacaacaaccggcgatcgttttgacatcgaggacgtgaataaccacacggattgcctcaagcttatcgagagaaacgagactgcacgttggaagaacgtgaaggtgaacttcgataacgtcggcttcggctacctatctctactgcaggttgccacgttcaaggggtggatggacataatgtacgccgccgtggactcaagaaacgttgagctgcagcccaagtacgaggagagcctgtatatgtatttgtatttcgtcattttcatcattttcggatctttttttaccttaaatttgtttataggagtgatcatagataactttaaccagcagaaaaagaagttcggcggacaggacatctttatgactgaagagcagaaaaagtattataacgccatgaagaaattgggctctaaaaagccacagaagcctataccacgacctgggaacaagtttcagggaatggtgtttgatttcgttacccggcaagtgtttgacatatcaatcatgattctcatctgcctgaatatggtgacaatgatggtggaaaccgatgatcaatcagaatacgttaccaccattcttagtcgaattaacctggtctttattgtgctgtttaccggcgagtgtgtgttgaaactcatttccttaaggcattactatttcacaattggttggaatatctttgattttgtcgtggtgatcctaagcatagtaggtatgttcctcgcagagctgattgaaaaatacttcgtcagtcctacattgttccgtgtaattcggctggccaggattggtcgaatcctgagactgatcaagggcgcaaagggtatccgaacccttctcttcgctttaatgatgtcgcttcccgcactgttcaatatcggcctgctgttgtttctcgttatgttcatttacgcaatcttcgggatgtctaatttcgcttacgtaaagcgcgaagtgggcatcgacgacatgttcaacttcgagactttcggcaactcgatgatttgcctgtttcagatcactacaagtgccggatgggacggactgctggcccccatactcaactctaagccaccagattgtgaccccaataaggtgaatcccgggagttccgtgaagggggattgcgggaatccttcagtcggaatcttttttttcgtgagctacataatcattagctttctggtggtggttaacatgtatatcgcagtcatcctggagaatttttctgtagccacagaggagtctgcagagcctctgagtgaagatgatttcgagatgttttacgaagtttgggaaaaattcgacccggatgccactcagttcatggaattcgagaagctctcacagttcgcagcagctttagagccaccattaaacctaccacaaccaaataagctgcagttgattgcaatggacctcccgatggtgtcaggcgatcgaattcactgcctcgatattttgtttgcttttaccaaaagggtgctgggagagagtggtgagatggacgcgctccgtatacagatggaagaacgctttatggccagcaaccccagtaaggtctcttatcaaccaatcacaacaactctgaaaagaaagcaagaagaggtgtctgccgtgattattcagcgcgcatatcggcgacatctccttaagcgaaccgtgaaacaggcctctttcacttataataagaacaaaattaaaggaggcgcaaacctgctgatcaaagaggacatgataatcgatcgtattaacgagaacagcatcaccgagaaaactgacctgaccatgtctacagccgcctgtcctcccagctacgatcgggttacaaagcccatcgtagagaaacatgagcaggagggcaaagatgagaaggcgaagggcaaatag

SEQ ID NO: 205479 - DNA, 657 bp, synthetic construct
  misc_feature 1..657: note = Description of Artificial Sequence: Synthetic coding sequence
  source 1..657: mol_type = other DNA
atgggccggctgctggccctggtggtgggcgccgccctggtgagctcagcctgtggcggttgtgttgaagtggactctgagacagaggccgtctatgggatgaccttcaagattctctgtatttcatgtaaaaggcggtcagagaccaacgctgagacctttaccgaatggacatttcggcagaaaggtacagaagagttcgtgaaaatcctccggtacgaaaacgaagtcctgcagttggaagaagacgaaaggttcgagggccgcgtcgtgtggaacgggtcaagaggcactaaagacttgcaggatctatcaatctttatcaccaacgtgacttacaatcacagcggcgattatgagtgtcacgtgtacaggctgctattcttcgagaattacgaacacaacacgagtgttgtcaagaagatccacatagaagtggtggataaggctaatcgggatatggcaagcatcgtctcagagattatgatgtacgttcttattgtggtgctcacgatctggcttgtggccgagatgatctactgctataagaagattgcggcagccaccgaaaccgccgctcaggagaatgcttcggaatacttagcgatcacttctgaatcgaaggaaaattgtaccggggtgcaagtcgctgagtag

SEQ ID NO: 205480 - DNA, 807 bp, synthetic construct
  misc_feature 1..807: note = Description of Artificial Sequence: Synthetic coding sequence
  source 1..807: mol_type = other DNA
atgggccggctgctggccctggtggtgggcgccgccctggtgagctccgcgtgcggcggatgcgttgaggtcgacagcgaaacggaggctgtgtatgggatgacatttaagatcctgtgcataagttgtaaaaggagatccgagacaaatgccgaaactttcaccgagtggacctttaggcaaaagggaaccgaagaatttgtgaagattctcaggtacgaaaatgaagtgttgcagcttgaggaggacgagaggttcgaagggagggtggtctggaacgggtctcgaggaactaaggatctgcaggatctctccatttttatcaccaatgttacgtacaaccattcgggggactacgagtgccatgtatacaggctcctgttctttgagaactatgagcacaacactagcgttgtgaaaaagatccatattgaagtagtcgataagggagaatctggggctgcatgcccctttacagtgacccaccgccgtgcccgctggagggacagatggcaagcggtggacaggactggctggttgtgtgcctggcccgcgaatcgaccccagcagagagccgagggggaaggaagctcccccagctgcccactccagctttggccgttgtttctgtccagcccaagacggggtcagagcatgccagtgcctcacaggcgctcaggatataggacccagctgtgccacctctgctgcatgactagtgggcggtgcctcttgagtttgtcccagagagtagttttgggtttacctggcatcatcatccggtgtgtatctcgcggtgtggtgtag

SEQ ID NO: 205481 - DNA, 6018 bp, synthetic construct
  misc_feature 1..6018: note = Description of Artificial Sequence: Synthetic coding sequence
  source 1..6018: mol_type = other DNA
atggcccagagcgtgctggtgccccccggccccgacagcttccggttcttcactcgcgaaagtctagcagccattgagcagaggatcgcagaagagaaagccaagcgcccgaagcaggagcggaaggatgaggacgatgaaaacgggccaaagcctaattcagacctggaggccggcaagtccctgccattcatctacggagacattccccctgagatggtttcagtgccgctcgaggatctcgatccgtactacatcaacaaaaaaaccttcatagttctaaacaagggaaaagccatttctagattcagcgccacacccgccctgtacatactcacgccatttaatcctatcagaaaactcgcaataaagattctggtccacagcctttttaacatgctcattatgtgcactatactcaccaactgtgtattcatgacaatgagcaaccccccggactggaccaaaaatgtggaatacactttcacaggcatttatacttttgaatctctcattaaaatcttagcccggggcttttgcttagaggactttacttttctgcgcgatccctggaattggctggatttcaccgtgataacattcgcctacgtgaccgaatttgtggatctggggaatgtatcggcactgcggacctttcgcgtccttcgagcactgaagaccatcagtgtgattcccggcttaaagacaatcgtcggagccctgatccaatctgtcaagaagttgagtgacgtgatgatactgacagtgttttgcctgtccgtctttgccctcatcggcttgcaactgttcatgggaaatttgcggaataagtgtctgcagtggcccccagataactcctccttcgagattaacatcaccagcttttttaataattccctggatggcaacggcacaacctttaatcggacggtttctatttttaactgggacgagtacattgaagacaaaagccatttctatttcttggaggggcagaacgacgctctgttatgcggtaacagtagcgacgcgggtcagtgccccgaagggtatatttgcgtgaaggccgggcgaaatcctaactatggttataccagttttgatacattctcctgggcatttttatcactgttcaggctgatgacacaggacttttgggaaaacttgtaccagctgacactgcgcgcggcaggcaagacctatatgatttttttcgtccttgtcattttcctgggctccttctatctaataaatttgatccttgcagtggtagctatggcatacgaggagcagaatcaggcaacgttagaagaagcagagcagaaggaggccgagtttcagcaaatgttagagcaactgaaaaagcagcaggaagaagcacaagcggccgctgccgctgcctctgctgagagccgggacttcagcggtgctggggggatcggagtcttctcagagagcagttcagttgcctccaaactgtcaagcaagtccgaaaaggagttaaaaaaccgaaggaagaagaagaagcaaaaggagcaaagtggagaggaggagaagaacgatcgagttcgcaaatcggaatccgaagacagcattagacgcaagggcttccggttctcacttgaggggagccgtctaacatacgagaaaaggttcagttctccccatcagtccttgctgagcattagaggatcattattcagccccagaaggaacagtcgcgctagccttttttcattcagggggcgcgccaaagacatcgggtctgagaatgactttgccgacgacgagcacagcacctttgaggataacgactctaggagggacagcctctttgtgccccaccggcatggcgagcgccgccactccaatgtgtcccaggcgtcacgggcgtcccgcgttctgcccatacttccgatgaacggcaagatgcactctgcagtggattgcaatggtgtggtgtccctggtgggcggcccttctacactgacaagcgctgggcaactcctcccagagggtaccactacagagactgaaattcggaagaggcgctccagcagttatcacgtgtctatggacctgctggaagatcccacctcgcggcagagggcaatgtcaatcgcttctattctgacgaatacaatggaagagctggaggagagtcggcagaagtgccccccgtgttggtacaaattcgctaacatgtgtcttatttgggattgctgcaagccctggttaaaagttaaacatctcgtcaacctcgtcgtcatggacccttttgtggatcttgcgattacaatctgcatcgtcctgaacactttgtttatggctatggagcactatccaatgacagaacaattttcatccgtcctatctgttgggaacctagtgttcactggcatcttcacagctgagatgttcctgaagatcattgctatggatccctattattatttccaggagggctggaacattttcgatggtttcattgtgagcctctccctcatggaactcggcttggccaatgtcgagggcctgagtgtgttgagatccttccgcctgctgcgcgtcttcaaactcgccaagtcctggcctacactgaacatgctgattaaaatcatcgggaatagcgttggcgctctcggcaatctgaccttggtgttggctatcattgtcttcatttttgctgtggtggggatgcagctgttcgggaagtcctacaaagaatgcgtgtgcaagatatcaaatgattgcgaactgcctcgatggcatatgcacgactttttccacagctttctgatagtgtttcgggtgctctgcggagaatggattgaaacaatgtgggactgtatggaggtggcgggacagacgatgtgccttacggtttttatgatggttatggtgattggtaacttggtggtgttaaatctctttctagccttgctccttagtagcttcagctctgacaacctagccgcaacagacgatgacaacgaaatgaataatctgcaaatagctgtgggtaggatgcagaaggggatcgattttgttaagcgtaaaatccgggagtttatacagaaggctttcgtccgcaaacaaaaggccctggacgagatcaagccgctggaggacctgaacaataaaaaggatagttgtattagtaaccacacgacaatagaaataggaaaagacctgaactatttgaaggatgggaacgggaccacatcaggaattgggagtagtgttgaaaagtatgtggtggatgagagcgactacatgtcattcatcaataacccctcactgaccgtgacagtgcccattgccgtaggcgagtccgactttgagaaccttaacacagaggagttctcttccgagtcagacatggaggaatccaaggagaagctgaatgctacgagttcttcagagggatcaaccgtggacattggtgcaccagcagaaggcgaacagcccgaagtggaacctgaggaaagcttggagccagaagcatgtttcactgaagactgcgtgaggaaattcaagtgctgtcagataagcattgaagaaggtaagggcaagctttggtggaacctgaggaaaacatgttacaagatcgtggaacacaactggtttgaaactttcatcgtctttatgatccttctcagctccggcgcactggccttcgaggacatttacatcgagcaacgcaagaccatcaagacgatgctcgagtatgcagataaggtcttcacctatatcttcatcctcgaaatgctcttaaagtgggtggcgtacggattccaggtgtattttacaaacgcttggtgctggctcgactttctgattgtagacgtgtcattagtgtcgttgaccgctaatgcccttgggtactctgaactgggtgcaataaagtctctgaggaccttacgtgctctcaggccattgcgcgctctcagtcggttcgaaggcatgcgagtggttgttaacgccctgctgggtgccatccctagcatcatgaatgtgctgttagtttgtctcatattttggcttatcttctccatcatgggtgtgaatctcttcgctgggaagttctatcattgtatcaactacacaaccggagaaatgttcgatgtgagtgtagttaacaattacagtgaatgtaaagctctgattgaatctaatcagacagctcgctggaagaatgtgaaggtaaattttgataatgtgggcctcgggtatttgtcgctgctccaagttgccaccttcaagggctggatggacatcatgtatgccgccgtggatagcaggaatgttgaactccagcctaagtacgaagacaacctgtatatgtatctctacttcgtgatcttcatcattttcggatcttttttcacactgaacctgttcatcggcgtaattatagacaatttcaaccagcaaaagaagaagtttggaggccaggacattttcatgacagaggaacaaaaaaagtattacaacgccatgaagaagctgggcagtaaaaagccccagaagcccatccctcgaccggcaaataagtttcagggtatggtatttgacttcgtgaccaagcaggtatttgatatatcaatcatgattctgatatgtctaaacatggtgacgatgatggtggagactgatgaccagtctcaggagatgaccaatattctctactggattaatctagtatttatcgttttgtttaccggagagtgcgttctgaagctgatcagtctgcgatattactactttacaatcggttggaacatctttgacttcgtagtggtgatcttatctattgtgggaatgtttctggcagagctcatcgagaaatactttgttagccctacgcttttcagggtcattcgcctcgctcgaattggccgtatactgcgactaattaagggtgctaaggggattagaaccctccttttcgcccttatgatgtctctgcctgctcttttcaatataggccttctactgtttctggtcatgttcatttacgccatcttcggaatgagcaatttcgcatacgtgaaaagggaggtgggaatagatgacatgttcaattttgagactttcggcaatagcatgatctgtttatttcagataaccacatcggcaggctgggatgggctgctggcccctatcttgaacagcggccccccagattgtgatccagacaaggaccatcctggctccagtgtgaagggcgactgtggaaaccctagtgtgggcattttcttctttgtgagttacattatcatctctttccttgtcgttgtgaatatgtatattgccgtcattctagagaacttctctgtggcgacagaggagtccgcggagcctctctccgaggatgattttgagatgttttacgaagtttgggagaaattcgatcccgacgctacacaattcatagagttcgccaaactctcagatttcgcagatgcactggacccaccactgctgatagcaaagccaaacaaggtgcaactcatcgcaatggacttgccgatggtgtccggagataggattcattgtttggatatcctattcgccttcaccaagcgcgtcctgggggaatcaggcgaaatggacgcactgcgtattcagatggaagagcgctttatggccagtaacccttctaaagtcagttacgaaccaattactacgacattgaagcgcaagcaggaggaagtgagtgccatcatcatccaacgggcctatcgcagatacctgttgaagcaaaaagtcaaaaaagtctcttcaatatataagaaggataaaggaaaggagtgcgatggcacgccaattaaagaagacactctgattgacaagctgaatgaaaacagcacgcccgaaaaaaccgacatgacaccaagtaccacgtcaccaccatcctatgattctgttactaaaccggaaaaagaaaagttcgaaaaggacaagagcgagaaagaggataagggtaaggatatcagagagtctaaaaaatag

SEQ ID NO: 205482 - DNA, 6018 bp, synthetic construct
  misc_feature 1..6018: note = Description of Artificial Sequence: Synthetic coding sequence
  source 1..6018: mol_type = other DNA
atggcccagagcgtgctggtgccccccggccccgacagcttccggttcttcacacgggagagtctcgccgctatcgagcaacggatcgctgaggaaaaagcaaagagacccaagcaggagagaaaggatgaagatgatgaaaacggcccaaagcctaatagcgacctggaggcaggtaagtcattaccctttatctatggagatatcccccctgagatggtttctgtccccttggaagacctcgacccatattacattaacaaaaaaacatttattgtgctgaataaagggaaggcgatttctaggttctctgctacccccgcgctctacatacttaccccattcaatccaatcaggaaactcgctatcaagatcttagtgcatagcctgttcaacatgttgataatgtgcacgatcctgactaactgcgtgttcatgaccatgtccaatccccccgactggaccaagaacgtggaatatacttttaccgggatctacacttttgaaagtctgatcaagatcctggcacggggattttgtcttgaagattttacattcctccgggacccttggaattggctggattttaccgtaatcacgtttgcctacgtcacagagttcgtaaatctgggcaatgtgtccgctctgagaacattcagggtgctgcgggcactgaagacaatttccgtcatccctgggttgaagaccatcgtgggcgctctgatccagtcagtaaagaagctgagcgacgtgatgattctcacagtgttttgtctatctgtctttgccttgatcgggctccagctgttcatggggaaccttcgtaataagtgtctccaatggccccctgacaattcttcctttgagattaacattaccagttttttcaataattccctcgacggaaatggaactacatttaatagaacagtttccatctttaattgggatgaatacatcgaagataagagtcatttttactttttagaaggacagaatgatgccctgctgtgcggaaacagctccgacgcagggcagtgtccagagggctatatctgcgtcaaggcagggcgtaacccaaactacggatataccagcttcgacacgttctcctgggccttcctcagcctttttcgtctgatgacccaggacttctgggagaacctgtaccagcttaccctccgagctgctgggaagacgtacatgatattcttcgtcctggtgatcttcctggggtccttctacttgatcaacctcatcctcgccgtcgtcgctatggcttatgaggagcagaaccaggccacactggaagaggctgaacagaaggaagcagagtttcagcaaatgctggagcaacttaagaaacagcaggaagaagcccaggctgcagccgctgctgcctccgccgaaagccgcgacttctccggcgcaggcggtatcggcgtcttttccgagtcatccagtgtggcctcaaagctatcaagtaaaagtgagaaagagttgaaaaatcgacgtaagaaaaaaaaacaaaaggaacagtctggcgaagaggagaagaatgatagggtccggaagagcgaatctgaagatagtatccgcagaaagggcttccgattttccctggaaggatcacggctcacgtatgaaaagcggttctcgtcccctcatcagtcactgcttagcatcagaggtagcctgttttctccacggaggaactcaagagccagcctcttctcatttcgcggccgtgccaaagatattgggagcgaaaacgacttcgctgatgatgagcactctaccttcgaagacaatgactctcgccgagactcattgttcgtaccacataggcacggcgaaagacgccattctaacgtcagccaagcaagtagggccagccgcgttctgccaattctacccatgaatggcaaaatgcattcagctgtggactgcaatggtgtcgtcagcctggtgggagggccatcaacgttaacaagtgccggacagctgctccccgagggaacaacaaccgagactgagatcaggaagcggcgatccagcagctaccatgttagcatggacctcctcgaggatccgacctctcggcaacgggctatgagcatagcttccatcctcaccaacactatggaggaactggaggagtctaggcagaaatgtccgccatgctggtacaagtttgctaacatgtgtctgatatgggattgttgtaagccttggctgaaggttaaacacctcgtgaatttggttgttatggatccattcgtggacctggccattactatttgcatcgtgctaaatacactgtttatggcaatggagcactatcccatgaccgagcaattcagcagcgtcctgtctgtgggcaaccttgtttttacaggtatatttaccgcagagatgtttctgaagatcattgccatggacccctactattacttccaggaggggtggaacatctttgacggcttcattgtgtctctctccctgatggagctagggcttgcaaacgtcgaaggtctgagtgttctgaggagtttcaggctgctgcgagttttcaagctcgcaaaaagctggccgacactgaacatgctgatcaaaatcattgggaatagcgtaggtgccctcgggaatcttacactggtgctggctattatcgtgttcattttcgcagtggtgggaatgcagctgttcgggaagagctataaggagtgcgtctgtaagatctcaaatgactgcgagctgcctcgctggcacatgcatgatttctttcattcctttctcatcgtgttcagggtgctgtgtggagagtggatcgagacaatgtgggactgcatggaagtggccggacagacaatgtgtctgaccgtgttcatgatggtaatggttattggaaacctggtcgtgctcaatctcttcctggccctgcttctctcaagtttctccagcgataatcttgcagctactgatgacgacaatgaaatgaacaatttgcagatcgccgtgggcagaatgcagaaaggcattgattttgtgaaacgaaagatccgggaatttatccagaaggccttcgtcaggaaacaaaaagccctggatgagattaagccgctggaagatctgaacaataaaaaggatagctgtatctcaaaccacaccacaatagagatcggcaaagacctgaattatctaaaggatggtaatggaaccaccagtgggatcggctcaagcgtggaaaaatacgtggtcgacgaatcggattacatgtccttcattaataacccatcactcacagttaccgttcctatcgccgtgggagagtccgacttcgaaaatctgaatactgaggaatttagcagtgagtctgacatggaagaatccaaggagaagttgaacgcaacttctagcagtgagggaagcacagtggatattggggccccagccgaaggtgaacagccggaagtggagcccgaggaaagcttagagccagaagcctgtttcaccgaagactgtgtacggaaatttaagtgctgccaaattagcattgaggaaggtaaaggtaagttgtggtggaacctcaggaaaacctgctacaaaattgtagagcataactggttcgaaaccttcattgtcttcatgattcttctctcttcgggggctctggcctttgaagatatctatattgaacaacgaaaaaccatcaaaaccatgttagagtacgccgataaagtgtttacctatatcttcattctggagatgctgttaaaatgggttgcatacggcttccaggtctacttcactaatgcttggtgttggctagattttttgattgtggacgtctctctggtctctctgacggccaatgcgctgggctattctgagctaggagctatcaagagcctgagaaccctgcgggcactcaggccgcttcgagccctgtccaggttcgaaggcatgagagttgtagtaaatgctctgttgggggctatccccagtatcatgaacgtgcttctcgtctgtctaattttttggctcattttttccatcatgggcgtgaatctgttcgccggaaagttctatcactgcatcaactacactactggggaaatgtttgatgttagcgtggtgaataattatagcgagtgtaaggccctgatcgaatcaaatcagacagcgcgctggaagaacgtgaaggtgaactttgataatgtcggactgggatacttaagcctattgcaggtcgccacgttcaagggatggatggacattatgtacgccgctgtggacagtcgcaatgtcgaactgcaacccaaatacgaggataacctgtacatgtatctgtattttgttatatttatcatatttggcagcttctttaccctcaacctctttatcggcgtgatcatcgataattttaatcagcaaaaaaaaaagtttggcgggcaggatatcttcatgactgaggagcaaaaaaagtactacaacgcgatgaagaagctgggcagtaagaagccacagaaacctatcccaagacccgcaaataaatttcaagggatggtgtttgattttgtaactaaacaagttttcgatatatcgattatgattcttatctgcttaaacatggtgacaatgatggtggaaacggacgatcagtcccaggaaatgacgaatatcctgtattggattaatctggtgtttatcgttttgttcaccggagagtgtgtcctcaaacttatctctctgagatattattatttcacgatcggctggaacattttcgactttgtagttgtcattctgtcaattgtgggcatgttcctcgctgaactgatcgaaaagtacttcgtgtccccgaccctttttagagttatccggctggctcgaatcggtagaattctaaggctgatcaagggagccaaaggaatccgcaccttgctctttgcgctgatgatgagtctgcccgctctgttcaatattggtctgctgctgttcttagtgatgttcatttacgctatcttcggcatgagtaatttcgcgtatgtgaaaagggaggtgggcatcgacgacatgtttaattttgagacttttgggaacagcatgatatgcttgttccagataaccacaagcgctggctgggacgggttacttgccccgattcttaactccggcccacctgattgcgacccagataaggatcacccaggtagtagtgtgaaaggtgactgtggtaatccatctgttggcatttttttttttgtgtcttacataatcatcagctttcttgtggtggtgaacatgtatatcgccgtcattctcgagaacttttcagttgcaaccgaggaatctgctgaacctctttccgaggatgattttgagatgttctacgaggtctgggagaaatttgaccctgacgccacacagttcattgagttcgctaagctaagcgacttcgccgacgccctggacccgcctttactgattgccaagcctaataaagttcagctgatagccatggaccttcccatggtgagcggtgataggatccactgtctggacatccttttcgcattcacaaagcgagtgctcggcgaaagtggggagatggacgcactccgcatccagatggaggagaggttcatggcctccaacccatctaaagtgtcctatgaacccatcacaaccaccctgaagcgaaagcaggaggaagtttccgctataatcatccagcgggcatatagaagatatctgctgaagcagaaggttaaaaaagtcagtagcatctacaagaaagataaaggcaaagaatgtgacggcacaccgattaaggaggatactctgattgacaagttgaatgagaacagcactccagagaagactgacatgacgccctccactaccagtccgccctcctatgacagcgtgactaagcccgaaaaggagaaatttgagaaggataaatctgagaaagaagataaaggtaaagacatcagagaatctaaaaaatag

SEQ ID NO: 205483 - DNA, 6018 bp, synthetic construct
  misc_feature 1..6018: note = Description of Artificial Sequence: Synthetic coding sequence
  source 1..6018: mol_type = other DNA
atggcccagagcgtgctggtgccccccggccccgacagcttccggtttttcacacgggagtcacttgcagccattgagcagcgcatcgccgaagaaaaagcaaagagaccaaaacaggagcgaaaggacgaggacgacgaaaatggccccaaacctaattcagacctcgaggccggtaaatcactcccgtttatctacggcgacattcctccagagatggtctctgtgcctctcgaggacttagatccttactacatcaataagaagacattcatcgtgctgaacaagggtaaggcgatatctcgcttctcagccacacccgccctgtatatcctgacaccttttaatcctatcaggaaattggctatcaaaatcttagtgcatagcctgtttaacatgttaatcatgtgcaccattttgacaaattgtgtttttatgaccatgtcgaacccccccgattggaccaagaatgtggagtatacttttaccggcatttacacctttgaaagcctcattaaaattctcgctagagggttctgtcttgaggactttaccttcctccgggacccatggaactggctggactttaccgtcattactttcgcctatgtcaccgagttcgtgaacctcggcaacgtttctgcacttcgtaccttccgagtgctccgtgcgttgaaaaccatcagtgtcattcctggactaaagactatcgtcggtgccctgatccagtccgttaaaaagctatccgacgtaatgatcttaacagtcttctgcctttcagtgttcgccctcattggcctgcagctcttcatggggaacttgagaaataagtgcctacaatggcctccagataattcctcctttgaaatcaacatcacaagcttcttcaacaatagcttggatggtaatggcaccactttcaatcgaacggtgtccattttcaattgggatgagtacattgaagacaaaagccacttctactttttagagggacaaaacgatgcactcttgtgtgggaatagctctgatgctggtcaatgtcctgaagggtacatatgcgttaaagctggtaggaaccccaattacggttacacctccttcgacaccttctcatgggccttcctgagccttttccgcctcatgacacaggacttctgggaaaatctctatcagttaactctaagggccgccgggaagacctatatgattttttttgtcctggtcatcttcctcggcagtttctatctgatcaatctgatccttgccgtagttgccatggcgtacgaggaacagaaccaggccacactggaagaggctgagcaaaaagaggccgaattccagcaaatgctggagcagctaaaaaagcagcaggaggaggctcaggccgccgccgcagctgcctctgctgagagccgagacttcagcggagcaggggggataggcgttttttccgagtcatcaagcgtggcctcaaaactgtcaagtaagtccgaaaaagagcttaagaatcgacgcaaaaaaaaaaagcagaaagaacagtcaggtgaagaggagaagaacgaccgtgtccgaaaatcggagagtgaagatagtatcagacggaagggcttccgattcagcctagaaggctctcggctcacatatgagaagcgcttctctagtccccaccagagcttgctgtcgataaggggaagtctcttttcaccgcgcagaaactctcgggcttccctctttagttttagaggcagagcaaaagacatcggcagcgagaatgacttcgctgacgatgagcactctacgttcgaggataacgattccaggagggacagccttttcgttccgcatcgacatggagagcgacgacattctaatgtgagtcaggcctcccgggcgagtcgggtcttgccgattctgcctatgaatggcaaaatgcactcagctgtggactgtaacggcgtagtgagtctagtgggaggccctagtactctgacttccgccggacagttattaccagagggcactacgactgagacagaaataaggaagcgccggagttcctcatatcatgtcagcatggacctgttggaagatcccacttcaaggcaaagggcgatgtcaatagcttccatactgacaaatactatggaggaattggaggagagtagacagaagtgcccaccctgttggtacaaatttgccaacatgtgccttatatgggactgttgcaaaccatggctgaaggtgaaacaccttgtcaacttggttgtgatggaccccttcgtggatttggctattacaatttgcattgtgctcaataccctctttatggccatggaacattatccgatgacagagcagttctcctcggtcctgagcgtggggaatctcgtttttactgggatttttactgctgagatgttcctgaaaattatcgccatggatccctactattactttcaggaaggatggaatattttcgatgggtttattgtgagcctgagcctcatggaattggggctcgccaacgtcgagggtcttagcgtgctgagatccttccgtctcttacgtgtcttcaagctggcgaagtcctggccaacgctgaatatgctgattaagattattggcaattccgtgggcgctctcggaaacctaaccctcgtgctagccatcatagtttttatattcgctgtcgtggggatgcagcttttcgggaagtcatataaggaatgtgtttgcaagatctctaatgactgcgagttacctcgatggcatatgcacgatttcttccacagcttcctgatcgtgttcagggtgttgtgtggagagtggatcgagaccatgtgggactgtatggaagtcgctgggcagacaatgtgcctgacagtcttcatgatggtgatggtcatcggcaatctcgttgtgcttaacttgtttctggctctgctactctccagcttcagctcggataatctcgcggccactgatgacgacaatgagatgaacaatcttcaaatcgccgtggggagaatgcagaaaggtattgattttgtcaaaaggaaaatccgggaatttatacagaaagcttttgttaggaagcagaaggcactggatgaaattaagcccctggaggacctcaacaacaaaaaagactcttgtatctcgaatcacactacgattgagatcggcaaggacctaaattacctcaaagacggcaatggaaccacctctggcatcggttccagtgttgagaaatacgttgtggacgaaagtgattatatgagtttcattaataatccatcacttaccgtaacggtgcccatagccgtgggtgagagtgatttcgaaaacctcaacactgaggagttctcctccgaatccgatatggaagagtcaaaggaaaagctaaatgccaccagctctagtgaggggtccactgtcgatataggcgcacccgcggaaggcgaacagcccgaagttgagccagaagagtcattggaacccgaggcatgcttcactgaggattgcgtccgtaaatttaagtgctgccagatttcaatcgaagaaggcaaggggaaattgtggtggaatctccgaaaaacgtgctataaaatagttgaacacaattggtttgagacattcatcgttttcatgatccttctgtcttccggcgcgctggcctttgaagatatttacatcgagcaacggaagacgattaaaaccatgctcgagtacgcagataaagttttcacatacatcttcattctggagatgctgctgaagtgggtggcctacgggtttcaggtctacttcaccaacgcttggtgttggctcgatttcctgattgttgacgtttcgctggtgtctctgacagcaaacgcactcggatatagcgaactgggtgctataaagagcctgaggaccctgcgcgctcttcgtccactgcgcgctttaagtcggtttgagggaatgcgcgttgtcgtaaacgcgcttctgggagcaattccctcaattatgaacgtgttgctcgtctgccttatattctggctcatcttctctattatgggcgtcaatctgttcgccgggaaattttaccactgtatcaactacactaccggggaaatgtttgatgtatctgtggttaacaactacagtgagtgcaaggcccttattgagtccaatcagacagctcggtggaagaacgtgaaggtaaacttcgataacgtgggcctggggtacctgtccctgctgcaggttgccacattcaagggatggatggatatcatgtatgcagcagtggactctcggaacgtggagctgcagcccaaatacgaagataatctatacatgtatctttacttcgttattttcattatctttggctcatttttcacgctgaacctgtttatcggggttatcattgacaatttcaatcaacagaagaagaaatttgggggacaggacatctttatgacagaggagcagaagaagtattataatgctatgaagaaacttggctctaagaaaccccagaaacctatcccaagaccagcaaataagttccagggcatggtgtttgactttgtgacaaaacaggtctttgatatctctataatgattctgatttgccttaacatggttaccatgatggtcgaaaccgatgaccagtcccaggagatgaccaatatactatattggataaacctagtctttatcgtgctctttacaggggaatgtgtgctgaaactcattagtctgcgatattattacttcactatcggatggaacattttcgatttcgtggttgtcatcctcagcatagtaggcatgtttctggccgaactgattgagaaatattttgtgagtcccacattgttccgggtgatacggctggcccgaattggtcggatccttcggcttataaagggcgctaagggaataagaaccttactgttcgcacttatgatgagcctgcctgcattgttcaacatcggactgctcttgttcctcgtgatgttcatttatgcgatcttcggcatgtctaactttgcctatgtaaaacgtgaggtcggcatagatgatatgttcaatttcgaaacctttggaaatagcatgatctgcctcttccaaatcacaactagcgctggctgggacggcttgttggcccccattctaaactccgggccacctgactgcgaccccgacaaggatcatcctggatcgtccgttaaaggggattgcggtaaccccagcgtgggtatattcttctttgttagctacattattatcagcttcctggttgttgtgaacatgtacatcgcagtcatactggagaactttagcgtcgctacggaggagagcgcagagcccctctcagaagacgacttcgagatgttctacgaagtctgggaaaagttcgaccctgatgccacacagttcatcgagttcgctaagctatctgactttgctgatgctctggatccccccctactcattgccaagccaaacaaggtccagcttattgccatggatcttccaatggtttccggcgatcggatccactgcctggacattctgtttgcattcacaaagcgtgtccttggggagagcggcgaaatggacgcactgcgcatacaaatggaggagcgttttatggcaagtaatccctcaaaggtatcctatgaaccaataactacgacattgaagaggaagcaggaggaggtgtccgcgattataattcagcgcgcctaccgcagataccttttgaaacaaaaggtcaagaaggtgagcagcatttacaagaaagacaagggcaaggagtgtgacgggacacctatcaaagaggataccctcatagacaaactaaatgagaactccacccctgagaaaacagatatgaccccctctaccacctcaccacctagctatgactcagtgaccaagccagagaaggagaagtttgaaaaggacaagtctgagaaagaggataaaggtaaggacatccgcgagtccaagaaatag

SEQ ID NO: 205484 - DNA, 6018 bp, synthetic construct
  misc_feature 1..6018: note = Description of Artificial Sequence: Synthetic coding sequence
  source 1..6018: mol_type = other DNA
atggcccagagcgtgctggtgccccccggccccgacagcttccggttcttcacccgcgaaagcttggctgcaattgaacagcggatcgctgaggagaaggccaagaggccaaaacaggagaggaaagacgaggacgacgagaatggcccaaagccaaacagcgacctcgaagccgggaaatctctcccttttatttatggtgacatccccccggaaatggtctctgtgcccctggaggacctggacccttactacataaacaaaaagacctttatagtgctaaacaagggaaaagctatttcccgatttagtgccacgcccgccctctatattcttactccattcaaccctattagaaagctggcaatcaaaatcctggtccactctctcttcaatatgctaatcatgtgcacgatcctgacaaactgcgtctttatgaccatgagtaaccctcccgactggactaaaaacgtagagtatacatttactgggatctataccttcgagtccttaataaagattctggcccggggcttctgtctagaagatttcaccttcttgcgagacccatggaactggcttgatttcacggtgattacctttgcttatgtgaccgaattcgtcgatctcgggaatgtgagtgcgctgagaacctttagggtcctgcgagccctgaaaactatctccgtcattcctggcttaaagacgatcgtcggggcacttatccagtccgtgaaaaagctgtctgacgtgatgatcctgacagtgttctgcctgtcagtgttcgcactgatcggcttgcagctattcatgggcaacctgaggaataagtgtctgcaatggccacctgacaactcatccttcgagatcaatattacctcattctttaataacagcttggacggaaatggaaccacatttaatcggaccgtcagtatattcaactgggatgagtacatcgaggacaagtcacacttctacttcttagagggccagaatgacgctttgctgtgcggcaactcgagtgacgctggtcagtgcccagaaggctacatctgtgtgaaggctggacggaatcccaactatggttacacctcatttgataccttttcatgggcgtttctttctttgttccgcctgatgacacaggacttttgggaaaatctgtaccagttgactctgagggctgctggtaagacctacatgatattttttgtgctggtaatttttttaggcagcttttacctgattaaccttatactagcagttgttgctatggcctacgaggaacaaaatcaggctaccctagaggaagctgaacaaaaggaagccgagttccaacagatgttagaacagcttaaaaagcagcaagaggaggcccaggcagcggctgcggcagccagcgccgagagtagggattttagtggggccggagggataggggtgttctccgaatcatcttcagttgcttctaagcttagctccaagtcagagaaggagctcaaaaacagacggaagaagaaaaagcagaaggagcagtccggtgaggaagagaagaacgacagagtgagaaaatccgaatctgaagatagcattcgacgaaagggcttcagatttagcttggagggctcccgcctgacctatgagaagagattcagctctccccatcagtccctgctatccatacgcgggagtcttttcagcccccggcgcaactccagagcgagcctcttctcttttaggggacgcgccaaagacattggatccgagaacgatttcgccgatgacgagcacagtacatttgaagacaatgactcacggcgggacagtctgtttgtgccacaccgccatggtgaacggcggcattctaacgtcagccaggccagtcgggccagccgggttctgccgattctgcctatgaacggcaaaatgcattccgctgttgattgtaatggcgtggtgtcacttgtggggggcccgagcacactcacttccgccggacagctgctgccagagggaactacgactgagaccgagattcggaaacgacggtcatcatcataccacgtcagtatggacctgctggaggaccccacatcaagacaaagagctatgagtatcgctagcatactgacgaacaccatggaggagttggaggagtcacggcagaagtgccccccatgctggtataagtttgcgaacatgtgcctcatctgggactgctgtaagccctggctgaaggtcaaacacctcgtgaatttggtagttatggatcccttcgttgacctggccatcactatttgtattgtgttaaataccctgtttatggccatggaacattacccaatgactgaacagttcagtagcgttcttagcgtggggaacctggttttcactgggatctttactgcagagatgttcttgaagattatagcaatggacccatattattatttccaggagggctggaacatcttcgacggtttcatagtcagtcttagcctgatggagctgggactagcaaacgttgagggcttgtccgtactgaggagctttcgcctccttagagtgtttaagttagccaaatcttggcccaccctgaatatgcttattaagatcataggtaactcagttggcgcactgggtaacctgaccctagttctggctattatcgttttcattttcgctgtagttggtatgcaactgttcggaaaatcatacaaagaatgcgtatgtaaaatcagcaacgattgcgaactccccagatggcacatgcacgacttttttcacagctttctcatcgttttccgggttctttgtggagaatggattgagaccatgtgggattgcatggaggtggctggtcagaccatgtgtttgactgtgtttatgatggtgatggtgattggaaatctggttgtcctgaacttgttcctggcgcttttactgtcgtccttttccagcgataacttggcggcaacagatgacgacaacgaaatgaacaatttacagatagcagtgggaagaatgcagaaaggcatagacttcgtgaagcgcaagattagggaattcatccagaaagctttcgtgcggaagcagaaggccctggatgaaataaaaccgctcgaggacttgaataacaaaaaagattcatgcatctcaaaccacactaccatcgaaatagggaaggatctcaactatctaaaagatggcaatggtaccacaagtggcattggttccagtgtggaaaagtacgtcgtagacgaatctgactatatgagcttcatcaataacccatcactgacagttactgttcccattgccgtcggagaaagcgatttcgagaacctcaacacagaggagttctctagtgagagcgacatggaagaatccaaggagaagctaaatgcaacctcatcttcggagggtagcacggtcgacatcggcgctccagccgaaggcgaacagccagaggtagagccagaggagtccctggagccagaagcttgcttcacagaagattgcgtgcggaaattcaagtgttgtcaaatcagcatcgaagaggggaaaggcaagctgtggtggaatctccgcaagacatgctataagatcgttgagcataactggtttgagacattcatcgtcttcatgatcctgctgagttctggggctctcgcatttgaagatatctatatagagcagaggaagacgatcaagacgatgctggagtacgccgacaaggtttttacttatatctttatattggaaatgttacttaaatgggtcgcctacggctttcaggtgtactttaccaacgcttggtgttggctggattttctaatcgtcgacgtgtccctagtatcactcaccgcgaacgcgctgggatactctgaacttggagccatcaaatctctgcggacactgcgtgcactgcggcctcttcgggcgcttagtcggttcgaggggatgagggtggtggtcaacgcactcttaggcgcgattccttccattatgaatgtcctgcttgtttgcctgatcttctggctgattttcagcattatgggcgtcaatctgtttgcaggtaaattctatcactgcattaactacacgacgggggaaatgtttgacgtctccgtagtgaataactactccgagtgcaaggccctgatagaatccaaccagactgcccgctggaagaatgtgaaggtaaacttcgacaatgtggggcttggatacctatctttattgcaggtggctacctttaagggttggatggacattatgtatgccgcagtggatagccgcaacgtggagctgcagccaaagtacgaggacaacttatacatgtatctgtactttgtcattttcattatttttgggtcatttttcaccttaaacctcttcatcggggtgattatcgataactttaatcagcagaaaaaaaagttcggcggccaagatatctttatgaccgaggagcagaagaaatactacaacgcaatgaagaaacttggcagcaagaagccccagaagcctatccccagaccggctaacaagttccaggggatggtgtttgactttgtgacaaaacaagtgttcgatattagtatcatgattctaatctgcttgaacatggtcacaatgatggttgagacagacgaccagtcacaggagatgacgaacatcctttactggatcaatttggtatttattgtcctgttcaccggggagtgcgtgctgaaactcatttctttacgatattactacttcactatcgggtggaatatctttgacttcgttgtcgttatcctgtcaattgtggggatgttcctggcagagttgatagagaagtacttcgtatcccccactctatttagggttatacggttagcacgcattgggaggattctacggctaatcaagggcgccaaagggatcaggacattgctctttgccctaatgatgtcactgccggcgctgtttaatatcggattgctgctttttctcgtcatgtttatctacgcaatatttgggatgtctaattttgcatatgtcaagagagaagtgggcattgatgacatgttcaacttcgaaacctttggcaattctatgatttgtctctttcagatcaccactagtgcaggctgggatggcttgctggcccctatactaaactccggccctccagattgcgatcccgacaaggaccaccccggatcctctgtcaaaggcgactgcggcaaccccagcgtggggatctttttctttgttagctatattatcatttccttcttggtggtcgtcaacatgtacatcgccgtaattttagaaaatttcagcgttgcaaccgaagagtctgctgaaccattgagcgaagacgacttcgagatgttttacgaggtctgggagaaatttgatcctgatgcaacacagttcatcgagttcgctaaacttagtgattttgcggacgcactcgatcctcccttactaatcgccaagccaaacaaggtgcagcttatcgccatggatctgcctatggtgtctggagacagaatccattgcctggatatactgtttgcatttacgaagcgggttctaggggagagcggtgagatggacgcattaagaattcagatggaggaacgctttatggcctctaacccatcaaaggtctcatacgagcctattactactactctaaagcggaagcaagaggaggtgtccgctattatcatccagagggcctacagaagatacttgctgaaacagaaggtgaagaaggtctccagcatatataagaaggacaaaggtaaagaatgtgacggcacacccattaaggaggatacgttgattgacaagcttaacgagaactctaccccagagaaaaccgacatgacacctagtactacgtcacccccctcatacgatagtgtgaccaaacccgagaaagagaaatttgaaaaggacaagtctgaaaaagaagataagggtaaagatataagggagtctaagaaatag

SEQ ID NO: 205485 - DNA, 1512 bp, synthetic construct
  misc_feature 1..1512: note = Description of Artificial Sequence: Synthetic coding sequence
  source 1..1512: mol_type = other DNA
atggcccagagcgtgctggtgccccccggccccgacagcttccggttctttacgagggagtccctggctgccattgaacagagaattgctgaggaaaaggctaagcggcctaagcaggagcgcaaagacgaggacgatgagaacggtcctaagccgaacagcgatctggaagccggcaagagtctgcccttcatctatggggacatcccccccgagatggtctccgtgccattagaggacttggacccgtattatatcaacaagaagactttcatcgtactgaataaaggaaaagcaataagccgcttctcagccacgccagctctttacatcctgactccctttaaccccatccggaaactggcaattaaaatactcgtacacagtctgttcaacatgcttattatgtgcacaattcttaccaactgcgtcttcatgaccatgtctaatcccccagattggaccaagaatgtggaatacacgttcacaggaatttataccttcgaaagccttatcaagatcttggcccgtgggttctgcttggaggattttacctttcttcgggatccatggaattggctcgacttcacagtcatcaccttcgcatatgttaccgagtttgtggatctgggcaatgtatcagccctgaggactttccgagtgctccgagccctaaaaacaatttcagttattccagggttgaaaaccattgtgggggcactgatccagtctgtaaagaagttaagcgatgtgatgatcctgacagtgttttgtttgagtgtattcgccctcatcggactccaattattcatgggaaatctcagaaacaaatgtctgcaatggcctcccgacaactctagtttcgagatcaacattactagctttttcaataattcacttgacggcaacggaactacttttaaccgtacagtctcaatcttcaactgggatgaatacattgaagataagtcccacttttattttctagaaggacagaatgatgcattgctttgtggcaacagctctgacgccggacaatgccctgaaggctacatatgcgtcaaggcaggtcgaaacccaaattacggctatacttccttcgataccttttcatgggcttttctgagtctgttccgccttatgacccaggacttttgggaaaacctataccagctgactctgcgggccgctgggaaaacctatatgatcttttttgttcttgtaatctttttggggagcttctatctgattaatttaattctcgccgtcgtagcgatggcttacgaggagcagaatcaggccactctggaagaagctgagcagaaagaagctgagttccagcagatgctggagcagctgaaaaaacagcaggaagaagcacaagctgccgcagctgccgcttctgcagagtcaagagatttctcaggagccggaggaatcggtgtgttcagtgagtcctcatctgtggcctccaaactgtcatctaagagtgagaaggagttgaaaaactag

SEQ ID NO: 205486 - DNA, 648 bp, synthetic construct
  misc_feature 1..648: note = Description of Artificial Sequence: Synthetic coding sequence
  source 1..648: mol_type = other DNA
atgcaccgggacgcctggctgccccggcccgccttcagcctgaccggtctgtctctgttctttagcctggttcccccaggccggtctatggaagttaccgtacccgctacacttaatgtgttaaatggctctgacgcgcggcttccatgtaccttcaattcttgttacactgtgaaccacaagcagtttagcctaaactggacttaccaggaatgcaataattgctccgaggaaatgttccttcagtttagaatgaaaatcataaatctgaagcttgaacggtttcaggacagggtggagttcagtggaaacccatcaaagtatgacgtctcagtgatgctcagaaacgtgcagcctgaggatgaaggaatctataattgttacattatgaatcccccagaccggcatcgtggacacggaaagattcacctgcaggtccttatggaagagccgcctgaacgcgatagcacagttgccgttattgtcggagcttccgtgggaggcttccttgccgtagtgatccttgtgctgatggttgtcaaatgcgttcgaagaaagaaagaacaaaaactgagtaccgatgaccttaagactgaggaggaaggcaagactgacggtgagggtaatcctgatgatggggccaagtag

SEQ ID NO: 205487 - DNA, 6003 bp, synthetic construct
  misc_feature 1..6003: note = Description of Artificial Sequence: Synthetic coding sequence
  source 1..6003: mol_type = other DNA
atggcccaggccctgctggtgccccccggccccgagagcttccggttattcacccgggaatctctggcggccatcgagaagcgggccgccgaagagaaggccaagaaaccgaaaaaggagcaagataatgacgacgagaataaacccaagcctaacagtgacttggaagccgggaagaaccttcctttcatttacggggatattcctcctgaaatggttagtgagccactggaggatctcgatccctattacatcaacaagaaaacatttattgtcatgaataagggcaaggccatcttcagatttagcgcaaccagcgcactgtatatccttacaccccttaatcctgttagaaagattgctatcaaaatcctggttcactccttattcagcatgttaatcatgtgcacaatattgaccaactgtgtattcatgaccttatcaaatccacctgattggacaaaaaatgtggaatacactttcactggtatctacacctttgagtctctgatcaagatcctcgctcgaggattttgcctcgaggattttactttcttaagagacccatggaactggctcgacttttcagtaatcgtaatggcatacgtcacggaattcgttgatctgggcaacgtgagcgcactcaggacgttccgcgtcctccgtgcgttgaagacaatatctgtaataccaggcttgaagaccattgtgggggccctgatacagagtgtgaagaaactatccgatgtaatgatactgacggtgttctgtctgagtgtgtttgccctgatcggcctccaattgttcatggggaacctccgtaataagtgtctccaatggcctccaagtgacagcgctttcgagactaatacaacaagctattttaatggtactatggattccaatggcacattcgtcaatgttacaatgtctacctttaactggaaagactacatcggagacgattctcatttctacgtgctggatggtcagaaagaccctctgctgtgtgggaatggatcagacgctggccaatgtcccgaggggtatatttgtgttaaggcaggcagaaacccaaattacggctatacatcctttgatacattctcatgggcttttctttcactgttccgattaatgacccaggactactgggaaaacttgtatcagctgactctgcgggcggccgggaagacctatatgattttctttgtattggtgattttcttgggttcattttacttggtgaatctcatcttggcagtcgtggctatggcatacgaagagcagaatcaggccaccctcgaagaagcggagcaaaaggaggcagagtttcagcagatgctggagcagctgaagaaacagcaagaggaggcccaagcagtcgccgccgccagcgcagcctccagagacttctccggcataggcggtctcggtgagctccttgaatcatccagcgaggcctcaaagttatccagcaaaagcgcgaaagaatggcggaaccgacgtaagaagcggcgccagagagaacacctggagggtaacaacaaaggtgaacgggactccttcccaaagtccgaatctgaggactcagttaaaaggagcagcttcctgttctcaatggacggaaacagactgacctcagacaaaaagttttgttctcctcaccaaagcctgctgagtattagaggctcactcttctccccacgaagaaactctaagacttccatcttttctttccgcggaagagccaaagacgtaggctcagaaaatgacttcgcggatgacgagcattccacttttgaagattcagagtcacggagggatagtctgtttgtaccccatcgacacggcgagcgacgtaacagtaacgtctctcaagctagcatgagctctcgcatggtgcctggccttcccgctaacggtaagatgcacagcacagtggactgcaacggggtagtctctttagtgggcgggccctcagccctcaccagcccaacgggccagcttccccccgaaggtacgacaacagaaacagaagttcggaaaagaaggctctcaagctatcagatttcaatggaaatgctggaggactcttcaggtcgtcaacgcgctgtctcaatcgcgagcattcttactaatactatggaagagctggaagaaagcaggcagaaatgtcctccctgctggtacagatttgcgaacgtctttttgatctgggactgctgtgatgcatggcttaaagtgaagcatctagtgaatctaatcgtcatggacccatttgtcgatctagcaattacaatttgtattgtccttaacactttattcatggccatggagcattatcccatgaccgaacaatttagctccgttcttaccgtgggaaacctagtgtttaccggtatcttcaccgctgagatggtgctgaaaatcatcgccatggatccgtactattatttccaagaggggtggaacatctttgatggaattattgtttctttatctttgatggaactggggttgtccaacgtggagggactttcagtgttacgctcattccgcctgctccgtgtgtttaagcttgctaagtcttggcctactcttaacatgttaatcaaaattattggaaatagcgtgggcgccctgggcaatttaactctggtgttggccatcattgttttcatcttcgccgtggtggggatgcaacttttcggaaaatcttacaaagagtgcgtatgcaaaattaatgatgattgcactctcccgaggtggcacatgaatgacttcttccacagcttcctgatcgtgttccgagtcctgtgtggtgaatggatagagactatgtgggactgtatggaggtggcgggccagacaatgtgcttaatcgtgtttatgctcgtgatggtgatagggaacctagtagtgttgaaccttttcctcgctttattactctcctcatttagctctgataacctggccgcaacagatgacgataacgaaatgaacaaccttcagatagcggttggcaggatgcagaaaggcatagactacgtcaaaaacaagatgagggagtgctttcagaaagccttcttccggaagccgaaggtgatagagatccacgagggcaacaagatcgattcgtgcatgtcgaacaatacaggaattgaaataagcaaggagttaaattaccttagggatggcaatggaaccaccagcggcgtggggacgggaagctcagttgagaagtacgtgatcgacgagaacgattacatgtcctttatcaataatccaagcctaactgtgactgtgccaatcgctgtcggcgagtctgattttgagaacttaaacacggaggaattctcaagcgaatctgagctggaggagtcaaaagagaagctgaacgccacatccagttctgagggatccactgtggacgtggtactccctagagagggcgagcaggccgagaccgaacctgaggaggatttaaaacccgaggcctgctttacggagggctgcattaaaaagttcccattttgccaggtgagcactgaagaaggcaagggaaagatctggtggaatctgagaaagacctgttattccatcgtggagcataactggtttgaaacgtttatagtttttatgattctcctgtccagtggcgccttggcttttgaagacatctatatagaacagcgcaagactatcaaaaccatgcttgaatacgccgacaaggtgtttacgtacatctttatattggagatgctgttgaagtgggtagcttacggattccagacctattttaccaacgcctggtgctggctagacttcctgattgttgatgtgagcctggttagtctagtggcaaacgccttgggttactccgaacttggtgccattaagagtttgcgaactctgagggccctgaggccactccgagccctgagtcgctttgaagggatgcgggttgtcgtgaacgccctcgtgggagctatcccaagtatcatgaatgtactgcttgtgtgtcttatattttggctcatattctccataatgggagttaacctgttcgctggaaaattctatcattgtgtgaatatgacaactgggaatatgttcgatatcagtgatgttaataacttatctgattgccaggccctgggtaaacaggcacgatggaagaacgttaaagtgaacttcgataacgtgggagctggatacctggctttactgcaagtggcaacgttcaagggatggatggatataatgtacgccgccgtggactcaagggacgttaaactacaacctgtatacgaggaaaatctctacatgtatttatatttcgttatttttatcatttttggatcattctttacgctgaatttgtttatcggagtgatcatcgacaacttcaatcagcagaagaagaagtttggaggccaggatatatttatgaccgaggagcagaagaaatactataacgccatgaagaaacttgggtcgaagaagcctcaaaaacccatccctagacccgctaataaattccaaggcatggtattcgatttcgtgacgcggcaagtttttgacatttctattatgatactgatttgtctgaacatggtgaccatgatggttgagaccgatgaccagggtaagtatatgacactggtcttgtcacggattaacttagtgtttatcgtgttattcactggtgagtttgtactgaagttagtgtcactacggcactactattttactattggctggaatatcttcgattttgttgtggtgattctttccatcgtagggatgttcttggccgagatgatagaaaaatacttcgtcagtcccacactgtttcgcgtgattcgtctagcacggattggaagaattctccgacttatcaagggagctaaggggatccgaaccctgctctttgctctcatgatgtctttacctgccttgtttaacatcggcctgctcctgttcctggtgatgttcatctatgccatctttgggatgtccaattttgcttacgtcaaaaaagaagctggaatagacgacatgttcaactttgagaccttcgggaatagtatgatttgcctgtttcagatcacaacatctgcaggatgggacggtctgctggcccccatcctgaattctgcccctccagactgtgatcctgacacgatccatccaggctcctctgtgaagggcgactgcggtaaccccagtgtgggaatattcttttttgtctcatatatcattatatcattccttgtggtcgttaacatgtatatcgccgttatcttggagaacttctcagtcgccactgaagagagtgctgagcccctgtcagaggatgatttcgaaatgttttacgaagtctgggaaaaattcgaccctgatgccacccagttcattgagttctccaaactcagcgactttgccgcggcacttgaccctcctctgcttattgcaaagcccaacaaggtgcagctgatcgctatggacctgcctatggtgtccggcgatcgcatccactgtctcgatatcctgttcgcattcactaagagggttctgggggagagcggagagatggatgcactgagaatccagatggaggacaggtttatggcatccaaccctagcaaggtgtcttacgagcctatcacaacgacgctcaagaggaagcaggaggaagtctccgccgctattatccagagaaatttcaggtgctatctgctcaagcagaggctgaagaatataagttcaaactacaacaaagaggcaataaaaggtagaattgatctccctattaaacaggatatgataatcgacaagctgaacgggaattccacacctgagaagacagatgggagctcaagcacaaccagtccaccgagttatgattctgtgacaaagcccgataaggagaaatttgaaaaagataagccagaaaaagagtccaaagggaaggaagtgcgggaaaatcagaaatag

SEQ ID NO: 205488 - DNA, 6003 bp, synthetic construct
  misc_feature 1..6003: note = Description of Artificial Sequence: Synthetic coding sequence
  source 1..6003: mol_type = other DNA
atggcccaggccctgctggtgccccccggccccgagagcttccggctattcacgcgagaatccctggccgccatcgagaagagggcagcggaagaaaaggctaagaaacccaagaaggaacaggataacgacgatgagaataaacccaaacctaatagtgatctggaagccggcaagaatctaccctttatctacggtgacatcccccccgaaatggtgtccgaaccactcgaggacctggacccttattatatcaataagaaaaccttcatcgtgatgaataaaggaaaggccatctttcgcttttcagccactagcgccttgtacatcctgacaccactcaacccagtgcgcaaaattgctataaaaattttggtccactctctattttccatgcttatcatgtgcactatactcacaaactgtgtgttcatgaccctgagcaaccccccagactggactaagaatgtggagtacacattcactggcatatacacctttgaaagcctgataaaaatcttggctaggggcttttgcctggaggatttcacctttctccgtgatccttggaactggctggacttcagcgtcattgttatggcatacgtcacggaattcgtgagcctgggaaacgtgtccgctctcagaacctttcgtgtgctgcgggctctcaagactatcagtgtaattcccgggctgaaaacaattgtgggcgcactgatacagtctgtgaaaaaactctctgacgtcatgattcttacagtcttctgcctgagcgtatttgccctcatcggcttgcagctgtttatgggaaacctgcgtaacaagtgcctccagtggccccctagtgatagtgccttcgagaccaacacaacgtcatacttcaatgggaccatggacagcaatggaacttttgtaaatgtcactatgtctacatttaattggaaagattacatcggtgatgactctcatttttacgtgctagatggccagaaggatccactactatgcggcaacggctcagacgccggccagtgccctgagggttacatctgtgtgaaagctggccgcaaccccaactacggatacacttcattcgacactttctcatgggcctttcttagcctgtttagactgatgactcaagactactgggaaaatctttatcagctcacactgagagccgccgggaaaacctatatgattttctttgtgctggttattttcctggggagcttttatctcgtgaatttaattcttgccgtcgtcgccatggcctacgaggaacagaatcaagcgacgctcgaggaggccgaacaaaaggaggcagaattccaacagatgctggagcaactaaagaaacaacaggaagaggcgcaagccgttgcagctgcatcagccgcatcccgcgactttagcgggataggaggcctgggggagctacttgagtcctcatcagaggcttctaagctgtcctccaagtccgctaaagagtggaggaaccgccggaagaagcggcggcaacgtgaacaccttgaaggaaacaataaaggcgagagagattctttcccaaagtcagagtccgaggatagtgtgaaaagatcctcctttctgttctccatggacggtaatcggctcacttctgacaagaagttttgcagcccacaccagagtctactgtcaatacggggctcccttttttctccacgtagaaatagcaagactagcatcttcagttttcggggacgagctaaggacgttggatccgagaacgacttcgcagacgacgaacactccacattcgaagatagcgagagtagaagagattccctctttgtcccacaccgacacggcgagaggcggaatagtaatgtgtcgcaggcctctatgtcgtcccggatggtgccaggtcttcccgctaacggaaagatgcactccaccgttgattgtaatggcgtagtgagcctggtgggagggccctccgccttaacctcgcctacagggcagctgcctcctgaagggaccactactgagacagaggttcgtaagcggagactgtccagttaccagattagcatggaaatgctagaagatagcagcggtcggcagcgagctgtcagtattgcctccatccttactaacacaatggaagaactggaggagagccgccaaaaatgcccaccctgttggtatcggtttgcaaacgtctttctgatttgggattgttgtgatgcttggcttaaggtgaagcatctggtgaacctcatcgtgatggatcccttcgttgatctcgcaatcacgatatgcatcgtactgaatacactctttatggcgatggagcattaccctatgacagaacagtttagtagcgtactgaccgtcgggaaccttgtcttcaccgggatattcaccgcggaaatggttctcaaaatcattgctatggatccatactattactttcaggagggatggaacatctttgatggaatcatcgtaagtctcagcctgatggaacttgggctgtctaatgtcgagggtctcagcgtcttacggtccttcaggcttctgagggtctttaagcttgccaagtcctggcctactcttaatatgttaatcaaaatcatcggaaacagcgttggtgctctgggcaatctcacactcgtgctcgcaattattgtgttcatattcgccgtggtggggatgcagctgtttgggaaatcttataaggagtgcgtgtgtaaaattaacgacgattgtaccctgcctcggtggcacatgaatgacttcttccactcatttctgatagtatttcgggtgctgtgcggagaatggatcgaaactatgtgggattgcatggaggtcgctggacagacgatgtgtttgatcgtgtttatgctcgtgatggtaatcggcaatctggtggtcttaaatctgttccttgccttgctcctgtcttcattctctagcgataatcttgctgcgactgacgacgataacgaaatgaataaccttcagatcgctgtcggaagaatgcagaaagggatcgactatgtcaagaacaaaatgagggagtgcttccagaaggcgttttttagaaaaccaaaagtgattgaaatccatgaagggaacaagatcgactcgtgcatgtcaaacaatactggaattgagatctcaaaagagttgaactacctccgcgacgggaacggcacaacctctggcgtgggcactggctctagcgttgagaagtacgttattgacgaaaacgactacatgagctttataaacaacccctctctgactgtgaccgttccaatcgctgttggggagtctgacttcgagaatctaaacaccgaggaattttcgagcgaatcggaactggaagagtctaaggagaaactcaacgccacatctagtagcgaagggtctaccgtggacgtggttctgccaagggaaggcgagcaggccgaaactgagccagaagaggacttaaagccagaagcttgcttcactgagggttgcatcaaaaaattcccgttctgccaggtgagtacagaggaaggcaaaggcaagatctggtggaacttgcgaaagacatgttactcaatcgtcgagcataattggttcgagacctttatagtgttcatgatcttgttgtcctccggcgcgctcgccttcgaagacatttatatcgaacaacgcaagaccatcaaaacaatgctcgaatacgcagacaaggtcttcacctacattttcatattggagatgctgcttaagtgggttgcatacgggttccagacgtactttacgaacgcgtggtgctggttggatttcctgattgtggacgtttcgctggtctctctcgtagcgaatgcactgggttattctgagctcggggcgattaagtcacttcgtaccctgagagccttgcggccacttagggctctcagcagatttgagggcatgcgggtggtggtgaatgcgctggtgggcgctattccatctatcatgaatgtgctcctggtgtgtctcattttttggctcatcttcagtatcatgggggtcaacctgttcgcaggaaaattttaccattgtgtcaatatgactacaggcaatatgtttgacatatccgacgtgaataatctgagcgactgtcaggcactgggaaaacaagcgcgatggaagaatgtaaaagttaattttgataatgtgggtgctgggtaccttgccctcttgcaagttgcaaccttcaagggatggatggacattatgtatgcggccgtggacagtagagacgtcaaactgcaacctgtttatgaggagaatctatacatgtacctttacttcgtcatctttattatcttcggatcattcttcacgctgaatctgttcattggtgtgatcattgacaactttaatcagcagaaaaagaaattcggagggcaggatatcttcatgactgaggagcagaagaagtattacaatgctatgaaaaagctggggtctaaaaaacctcaaaagcctatcccacgcccagctaataaatttcaggggatggtattcgacttcgtgactcggcaggttttcgacattagtataatgatcctcatctgtctgaatatggtaactatgatggtagaaactgacgatcagggcaaatacatgactctggtgctttcacggataaatctggtcttcatcgtattgtttaccggagagttcgtgctgaagcttgtgtccctcaggcattactacttcactatcgggtggaacatttttgactttgtggtggtgatcttgtccatcgtcggcatgttcctcgcagagatgatcgaaaagtactttgtgtctccaaccttatttcgggtgatcaggttggcccgcattggacgcatattgcggcttatcaaaggcgcaaagggtatcaggactttactgttcgccctgatgatgagtctacctgccttgttcaacattggactgctgctgttcctcgtgatgtttatctacgccattttcgggatgtctaatttcgcctatgtgaaaaaagaggccggaattgatgacatgtttaactttgagacattcgggaattcgatgatttgtttgtttcagatcacgacctcagctggctgggatgggctgctcgctcccattttgaattctgccccaccagattgcgaccctgacaccatccaccccggatctagcgtcaaaggagactgcggtaatccatctgtgggcatttttttttttgtaagctacatcatcatctcctttctcgtggtcgtgaacatgtacatcgccgtgatcctggaaaactttagcgtggctactgaagagagcgccgagccactgtcagaagacgatttcgagatgttttacgaagtctgggagaaattcgatcccgacgctacccaattcatcgaattttcaaagttgtctgacttcgctgcggcccttgatccaccactgttaatcgccaagccaaataaggtgcagctgatcgccatggacttaccaatggtatctggggacagaatccactgtttagatattttgttcgcttttaccaagcgcgtgttgggcgaaagcggtgagatggatgctttacgtattcagatggaagaccgattcatggcatccaaccccagcaaggtgtcctatgagccaataaccaccaccctgaaaagaaagcaggaggaagtatctgctgcaattatccagagaaactttagatgttaccttctcaaacagcgtctgaagaacatcagctctaattataataaggaggcgataaagggccgcatcgacctgcctattaaacaggacatgataattgataagctcaatggaaactccaccccggagaagacagacgggtccagctccacaaccagccccccttcctacgactccgtaaccaaacctgataaagagaagttcgaaaaggacaaacctgagaaggagagtaagggcaaagaggtgcgggagaatcagaagtag

SEQ ID NO: 205489 - DNA, 5856 bp, synthetic construct
  misc_feature 1..5856: note = Description of Artificial Sequence: Synthetic coding sequence
  source 1..5856: mol_type = other DNA
atggcccaggccctgctggtgccccccggccccgagagcttccggctattcactcgggagagcttagctgcaatcgaaaagcgcgctgccgaggaaaaagcgaaaaagcccaaaaaagagcaagacaatgacgatgaaaacaaacctaagccaaattctgatctggaggcgggaaaaaatctgccattcatctatggagatatcccaccagaaatggtctccgaaccactggaggatctcgacccctactacatcaataagaaaacctttatcgtgatgaacaaaggtaaggctatttttcgtttttccgccacaagtgcgctctacatactcaccccgctgaacccagtcagaaaaatagccattaaaatccttgtgcattctctgttctcgatgctcatcatgtgtacaatattgaccaattgcgtatttatgaccctgtcaaatccaccagattggactaaaaacgtcgagtacacttttaccggcatttacaccttcgagtcccttattaagatcttggcccggggattttgtctggaggacttcacttttctaagggatccttggaactggctcgacttctccgttattgtcatggcatatgtgaccgaatttgtgagcttgggcaatgtgagcgctttgcgaacattcagggtgctccgggccctaaagactatttcagtgattccaggcctcaagacaatcgtgggtgctcttattcagtccgtgaaaaagttgagcgacgtgatgattctaaccgttttctgcctctccgtgtttgccctcattggattacagctgttcatgggaaacctgaggaataagtgcctgcagtggccgccaagtgattctgcctttgaaaccaacaccaccagctacttcaatggaacaatggacagtaatggaaccttcgtcaacgtgaccatgagtacatttaattggaaggactacatcggcgatgactcgcacttctacgtgttggatggtcagaaagaccctcttctttgtggtaatgggtctgatgcaggacagtgtcctgagggctatatctgtgtgaaagccgggcggaaccccaactacggctatacctctttcgatacattctcctgggcctttttgagtctgtttcgtcttatgacacaagactattgggaaaacctgtatcagctaacactgcgtgctgccggcaagacttatatgatcttcttcgtactcgtgatctttctcggctcattttatctggtcaacctgatactcgccgtggtcgcaatggcttatgaagagcagaaccaagccactcttgaggaagcagaacagaaagaagcggaattccagcagatgctcgagcaattgaagaagcagcaggaagaggctcaggccgttgcagcggcttctgcagcatcccgggatttttcgggaattggcggcctgggggaactcctagaatcctctagcgaggcgagtaagctttcctcaaaatccgccaaggaatggagaaacagaagaaaaaagcggagacagcgtgagcacctggagggtaataacaagggagagagggactcttttcccaaaagcgaatctgaagattccgtgaagcgcagcagttttctcttcagtatggacggcaatcggctcacaagtgacaaaaagttctgttccccccaccaatctcttctaagcatcagagggtcactcttttctccaaggcgcaattcaaaaacgtctatcttcagtttcagggggagagccaaggatgtggggagcgagaacgattttgcggacgacgagcactccactttcgaagacagcgagagtaggagagattcactgttcgtcccccatcggcacggtgaacgtagaaactctaatggaaccaccacagaaacggaggtgcgcaagcgacggttatctagctaccagatctccatggaaatgcttgaagacagcagcgggaggcagagggctgtctctattgccagcattttaaccaatacaatggaggaactagaggagagtcggcaaaaatgtcctccctgttggtataggtttgctaatgttttcttgatatgggactgttgcgatgcttggctgaaggtcaaacatctcgtcaacttgatcgtgatggatccctttgtcgatctcgcgattaccatttgcatcgtgcttaatactctgttcatggcaatggaacattacccgatgacagaacagttcagctccgtcctgactgttggcaacctcgtcttcactggcatatttaccgccgaaatggtgcttaagattattgcgatggatccatactattatttccaggaaggatggaatatatttgatgggatcattgtttcgttaagcctaatggagctcggacttagtaatgtggagggattgtccgtgctgaggagtttccggcttctccgcgttttcaagctggctaagtcatggccaacactgaacatgctcattaaaattattggcaatagcgtgggggccctcggtaacctcaccctggtcctcgctattattgtttttatcttcgcggtcgtcgggatgcagttgtttggcaaatcttacaaagagtgtgtctgcaaaatcaacgatgactgtaccctgccccgatggcatatgaacgactttttccattcattcttgattgtttttcgcgtcctttgtggggaatggatcgaaactatgtgggattgcatggaagttgcaggccagacaatgtgtctgattgtgtttatgttggtgatggtcataggtaatctggtcgttctgaatctgtttctggccctgctgctgagcagtttcagttccgacaacctagcagccactgatgatgataacgagatgaacaaccttcagatcgccgtgggtcgcatgcaaaaggggatcgactatgttaaaaataagatgcgtgagtgcttccagaaggctttctttagaaagccaaaagtgattgaaatccacgaaggaaataaaatcgattcgtgcatgtctaacaacaccggtatagagataagcaaagagctgaactacctgcgggacggcaatggaacaacttctggcgtcggaacagggtcgagtgttgaaaagtatgtcatagatgagaacgattatatgtcctttatcaacaacccaagcctgacggtgacagtacccatcgcagttggcgaatccgacttcgagaacctcaacacggaagaattttcttcagaatccgagctggaagagagcaaggaaaaactcaatgccaccagcagcagtgagggatctacagtcgacgtggtcctgcctagagaaggggagcaggcagaaacggaacctgaagaagacctaaagccggaggcatgctttacggaaggctgtatcaaaaagttcccgttctgtcaggtgagtaccgaagaaggaaaaggaaagatctggtggaatctcagaaaaacctgttactccatcgtggagcacaattggtttgaaacctttatcgtattcatgatcctactgtccagcggggctctcgcttttgaggatatttatattgaacagcgcaagactattaaaacaatgttggaatatgctgacaaagtctttacatacatctttatcctggagatgctcctgaaatgggtcgcctatggattccagacgtatttcactaacgcatggtgctggcttgacttcctcattgtcgacgtgtcgttggtaagtttggttgccaatgctctgggatactcagaactgggagcgattaagtcacttaggaccctgcgtgccctgcgacctctccgcgccctttcaaggttcgagggaatgcgcgtggtcgtcaacgcgttggtgggagcaattccttctattatgaatgtgctccttgtgtgcctcatcttctggttaatctttagtattatgggcgtgaatctttttgctggcaaattttatcactgtgtaaacatgactaccggcaatatgttcgatattagcgatgtgaataacctgtctgattgccaggccctcggcaaacaggcacgttggaaaaatgtgaaagtgaacttcgacaatgttggagcaggctatctggcacttctgcaagttgctacttttaaggggtggatggacatcatgtatgccgctgtggactcaagagacgttaagctgcaaccggtgtatgaggagaatctctatatgtacctgtacttcgtaatatttattatatttgggtccttctttaccctgaacctgttcattggcgtcattattgacaattttaaccagcagaagaaaaaattcggtgggcaggacatttttatgactgaagaacaaaagaagtactacaatgccatgaagaagcttggttctaagaagcctcaaaagcccatccctcgacctgctaacaagtttcaggggatggtttttgatttcgtgacaagacaggtgttcgacattagtatcatgatcttgatctgcctcaatatggttacaatgatggtcgagaccgacgatcaggggaaatatatgacactcgtgctgtctcggattaacctagtcttcatcgtactgtttactggggaattcgttctgaaacttgtgtctctccggcattattacttcactatcggctggaatatcttcgactttgttgtggtgattctttctattgttgggatgtttctggccgaaatgattgagaaatacttcgtcagcccaaccctttttcgagtaatccgcctggcccggatagggaggatcctccgactcattaaaggcgccaaagggatcaggacactgctgttcgcccttatgatgagcctgcctgcgctgtttaacataggcctcctgctgtttttggtcatgttcatctacgccattttcggcatgagtaatttcgcctacgtcaaaaaggaggcaggcatcgatgacatgttcaactttgagacattcggcaatagcatgatctgcctgttccaaatcaccacgagcgctggctgggacggattgttggctccaattctgaactccgccccccccgactgcgaccccgatacaatccatccagggagttctgttaagggtgattgcggtaacccgagcgtggggatattcttttttgtatcctatatcatcatctcatttctggtcgtcgttaacatgtacattgccgtgatcctcgagaactttagcgtggcgactgaggaatccgctgaaccactatcagaggatgacttcgaaatgttttacgaggtgtgggaaaagttcgaccccgatgccactcagttcattgagttttccaagctttccgatttcgccgctgccctggatccacccttgctgatcgctaagcccaacaaagtgcagctcatcgcaatggatctgcctatggtgagtggtgatcgtattcactgtctggatattctgttcgcctttaccaaacgtgtcctcggagaatcaggcgagatggatgctcttcgcattcaaatggaggaccgtttcatggcctcaaatccttccaaggtgagctatgagccgatcacaaccactctgaaacggaagcaggaggaggtgtccgctgccatcatccagcgtaattttagatgctatctcctaaagcagaggcttaagaatatctcctctaactataataaggaggcgattaaaggtcgaatcgatttgccaataaagcaagacatgataatcgacaaacttaacggtaactccacaccagagaagactgatgggtctagcagcaccacaagtccaccgagttatgatagcgtcaccaagccagataaggaaaagttcgagaaggacaagcctgagaaagaatccaagggtaaggaggtccgagagaaccagaaatag

SEQ ID NO: 205490 - DNA, 4095 bp, synthetic construct
  misc_feature 1..4095: note = Description of Artificial Sequence: Synthetic coding sequence
  source 1..4095: mol_type = other DNA
atggcccaggccctgctggtgccccccggccccgagagcttccggctcttcactcgcgaatcactagcagccattgagaaacgcgccgcggaagagaaagccaaaaaacctaagaaggagcaagacaatgacgatgagaataaaccaaagccgaattctgatcttgaagccggcaagaatctgccattcatttatggagacatcccaccggaaatggtttccgaacccctcgaagatttggacccatactacatcaacaagaagaccttcattgtgatgaataaaggcaaggcaattttccggttctccgccaccagcgcactgtacattctcactccactgaatcctgtcagaaaaatcgcaatcaagattttggtccactcactcttttccatgttaatcatgtgtaccatccttaccaactgtgtctttatgacactgtcaaacccccctgactggactaaaaatgtggaatacaccttcaccggtatctacaccttcgaatccttgattaaaatactggctcgcgggttctgcctggaggactttaccttcctgcgggacccatggaactggctggacttcagcgtaatcgttatggcttatgtcaccgaatttgtggacctgggaaacgtcagtgccttgagaacgttccgggttctgagggccttgaaaacgatttccgtgattccaggtctaaagactatagtgggtgctctcattcagtctgtgaagaagctgtccgacgtgatgatcctgacagtgttttgcctgagtgtgttcgctctgatcggcctgcagctctttatgggcaacctgcgtaataaatgccttcagtggccaccatccgatagtgcattcgagacgaacacgacgagttatttcaacggtactatggatagtaacggtacatttgtcaacgtcacaatgtcaacattcaactggaaggactacataggcgacgacagtcacttttatgtgctggacgggcagaaggacccactactttgcggaaatggctcagatgccgggcagtgcccggagggatacatatgtgtgaaagccggaaggaaccccaattatggttatacgtcattcgatactttctcatgggcttttctgagcctgttccggctcatgacacaggattattgggagaacctatatcagcttaccctccgggccgccggtaagacatatatgatcttttttgtactagtgattttcctcggctccttctatttagtgaatctgattctcgctgtagtcgccatggcctatgaagaacagaaccaagcgactctggaggaggccgaacagaaagaagctgagttccagcagatgctagaacaattgaagaaacaacaagaggaagcccaagccgtagcagccgctagcgcagcttctagggatttctctggaattggaggattgggcgagctcctggaatcctcaagcgaggcttcaaaacttagctcaaagagcgccaaagagtggcggaaccgcaggaaaaagcggcggcaaagagagcacctggaggggaacaataagggggagagggacagctttcctaagtcagaaagcgaggattctgtgaagcggtctagtttcctgttctccatggatggcaaccgcctcacgagtgataaaaaattttgctctcctcatcagtcattactaagcattagggggagcctgttttctccacgacgtaatagcaagaccagtattttctcctttagaggacgagccaaagacgtgggaagcgaaaacgacttcgccgacgacgaacactccacttttgaggacagcgaaagccggagggattcattgttcgtgccccaccgacatggtgagcgacgaaattcaaatggaaccaccactgaaacggaggtgagaaagagaaggctgtctagctaccagatttcaatggaaatgctggaggatagctcagggcggcaacgggcggtgtccatagcatccattcttacaaatactatggaagagctggaagagagcagacagaaatgccctccctgctggtaccgctttgcaaatgtgttcttgatctgggattgctgtgacgcctggttgaaggtaaaacacttggtcaatctgatcgtgatggatccgttcgttgacttagcaatcacaatctgcatcgtgctgaacacactgtttatggccatggagcactaccccatgactgagcagttcagctccgtcctcactgtcggaaatttggtctttacagggatcttcaccgcagagatggtgttaaagattatagcgatggacccgtactactattttcaggaggggtggaatatttttgatggtataatagtctcgctgtccttgatggagttgggcctctctaatgtggaggggcttagcgtgttgagatccttccgcctgttacgggtcttcaaactggccaaatcttggccgacactcaacatgctgatcaaaataattggaaattccgtgggtgccctcggaaatttgacgctcgtcctcgcaataattgtttttatcttcgccgtggttggaatgcagttattcggaaaatcgtataaggagtgcgtgtgcaagatcaacgatgattgtactctcccacgctggcatatgaacgattttttccactcttttctgatcgtctttcgcgtgctatgcggggagtggatagaaactatgtgggattgtatggaggtggccggccagaccatgtgcttgatagtgttcatgctcgtgatggtaattggaaacctggtagtgcttaatctatttctggctttgctgctgtcttctttcagtagtgacaacctggccgcaacggacgacgacaacgaaatgaacaacctgcagatcgcagttggacggatgcagaaaggcattgactatgtaaagaataaaatgcgcgagtgctttcagaaggccttttttaggaaacccaaagtcatcgagattcacgaggggaacaagattgactcttgtatgtcaaacaacacaggcatcgagatctcaaaagaattgaactacctccgggacgggaatggcacgacctccggcgtgggtacagggagctcagtggagaagtatgtcattgatgagaatgactatatgtcgttcataaacaacccgtcactgactgtgacagttccgatcgcagtcggcgagagcgatttcgagaacctcaatactgaagagttcagtagtgagtcagagctggaagagtctaaagaaaagcttaacgcaacatctagtagtgaaggatcaacggtggacgtggtcctgcctagagagggggagcaggccgagacagagccagaggaggatctgaaaccagaggcctgcttcacagaaggatgtatcaagaaatttccgttttgccaggtgtcaaccgaagaaggaaaaggcaagatttggtggaatctcagaaagacgtgttactctatagttgaacacaactggttcgaaacattcatcgtcttcatgatccttctgtcaagcggagcgctggcgttcgaggacatttacatagaacagagaaaaaccatcaaaactatgctggaatatgcagataaagtgtttacatacatattcatcctggaaatgctcctgaaatgggtggcatacggcttccagacatattttactaacgcctggtgttggcttgatttcctaatcgtcgatgtgtcgcttgtgagcctggtcgccaatgccctgggttattctgagcttggcgccatcaaatctctccgtacccttcgggccttgagacctctgagagcactgagtcggttcgaaggtatgcgtgtggtcgtgaatgcactcgtcggcgccatccccagcataatgaatgttcttctcgtatgtcttatattttggctgattttttctataatgggagtgaatctcttcgctggtaaattctaccactgcgtgaacatgaccacgggcaacatgtttgacatctctgatgtcaataacctatccgactgccaggccctcggaaagcaggcccggtggaaaaatgtcaaagttaatttcgacaatgtcggtgccggttacttagcactactgcaggtctag

SEQ ID NO: 205491 - DNA, 603 bp, synthetic construct
  misc_feature 1..603: note = Description of Artificial Sequence: Synthetic coding sequence
  source 1..603: mol_type = other DNA
atggcccaggccctgctggtgccccccggccccgagagcttccggctatttacaagagagtccctggcagccatagagaaaagagcagctgaagagaaagcaaaaaaaccaaaaaaggagcaagataacgatgatgaaaataagcctaagccaaactcagatctcgaggccggaaagaacctccccttcatttacggtgatatcccacctgaaatggtcagtgagccactggaggacctcgacccctactacatcaacaagaaaacttttatcgtcatgaacaaagggaaagctatctttaggttttccgctacatcagctctgtacattctgacgccactcaaccccgtcagaaagattgccattaaaatccttgtgcactccctctttagtatgctgattatgtgtacgatcctgaccaactgcgtcttcatgacgctaagcaacccacccgattggactaagaatgttgagtacactttcacaggcatatatacctttgaatctctgattaagattctggcgcgggggttctgcttagaggacttcaccttccttagagacccgtggaactggttggatttctctgtgattgtcatgtag

SEQ ID NO: 205492 - DNA, 1452 bp, synthetic construct
  misc_feature 1..1452: note = Description of Artificial Sequence: Synthetic coding sequence
  source 1..1452: mol_type = other DNA
atggtgttcgacttcgtgacccggcaggtgttcgacatcagcatcatgatcctgatttgcctcaacatggtcacaatgatggtagagaccgacgatcagggcaagtacatgacactcgtgctgtccaggattaacctggtgttcatcgtgctttttaccggggagttcgtcctcaaactcgtgtcacttaggcactattactttacaattgggtggaacatctttgacttcgtggtggtgatactgtccattgttggtatgtttttggccgaaatgattgaaaaatattttgtatctcccactctctttcgcgttattcggctcgcgcggatcggaaggatcttaaggcttataaagggcgccaaggggatccgaaccctgttgttcgcgcttatgatgagcctgcccgcattgttcaacatcggactattacttttcttggttatgttcatctacgctatctttggaatgtctaacttcgcgtacgtcaaaaaagaagccggcatcgacgacatgttcaacttcgagacatttgggaacagcatgatctgccttttccagattaccacttccgctggatgggatgggcttttggcgcccatcctgaactcggctccaccagactgtgatcccgacacaattcatcctggaagttcagtcaagggagactgtggcaatccttccgtgggcattttttttttcgtgtcctatatcattatcagcttcctggtggtggttaacatgtatatcgcagtgattctcgagaactttagcgtagctactgaggagagcgccgagcccctgtcagaagacgacttcgaaatgttttatgaggtttgggaaaaattcgaccctgatgctacccagtttatagaattctctaagctgtcggatttcgcagcagctctggatccaccactgctaattgccaaacctaacaaggtgcagttgatcgcaatggacctcccaatggtctcaggagaccggattcattgcctcgatattctcttcgccttcacgaaacgggtgctcggcgagagcggcgagatggatgctctgaggattcagatggaggacaggtttatggcaagtaacccttccaaagtgtcatacgaacccatcaccactaccctcaagcgaaaacaggaggaggtgagtgctgctattatccaacggaatttccggtgttacctgctgaaacagagactgaagaacatcagttcgaattacaataaagaggcaattaaagggaggattgatctacctataaaacaggacatgatcatagacaaactgaatggcaacagcacccctgagaagactgatggcagttcttccactacctctcccccttcttacgacagtgtgacaaagccggacaaggagaagtttgaaaaagacaaaccggaaaaagagagcaaaggtaaagaagttagggaaaatcagaagtag

SEQ ID NO: 205493 - DNA, 648 bp, synthetic construct
  misc_feature 1..648: note = Description of Artificial Sequence: Synthetic coding sequence
  source 1..648: mol_type = other DNA
atgcccgccttcaaccggctgttccccctggccagcctggtgctgatttactgggtatctgtctgtttcccagtttgtgtggaggtgccgtccgaaacggaggcggtccaggggaacccgatgaaactgcggtgtatatcgtgcatgaaaagggaggaggtcgaagccaccactgtggtcgagtggttctaccgaccagaagggggtaaagattttttgatatatgaataccgcaacggccaccaggaggttgaatccccattccaaggcaggctgcagtggaacggatcaaaggatttgcaagatgtgtcaattactgtgcttaatgtgactctcaacgacagcggcttatatacttgtaacgtcagcagagagtttgagttcgaggcgcaccgtccatttgttaaaacaactagactgattccactgagggtgacggaggaggctggcgaggactttacctcagtggtctcagagatcatgatgtatatcctactcgttttcttgactctttggctcctgatcgaaatgatctactgctacaggaaagttagcaaagccgaggaggctgcccaagaaaatgctagcgactatctggccattccaagcgaaaataaagaaaattcagcggtccccgtggaagaatag

SEQ ID NO: 205494 - DNA, 648 bp, synthetic construct
  misc_feature 1..648: note = Description of Artificial Sequence: Synthetic coding sequence
  source 1..648: mol_type = other DNA
atgcccgccttcaaccggctgttccccctggccagcctggtgctgatttattgggtgtccgtatgcttccctgtgtgcgtagaagtcccttccgagaccgaagccgtgcagggaaatccgatgaagctgcggtgtatatcatgtatgaaaagggaggaagtggaagccaccacggttgtagagtggttttatcgccctgagggaggaaaagattttctcatttatgagtatagaaacgggcaccaggaggtggagagtcctttccaggggcgtctgcagtggaatggttccaaggatctgcaggacgtctccatcaccgtcttgaacgtgactctgaatgactctggactgtatacttgcaatgtgtccagggagttcgaatttgaggcccatcgccctttcgtcaaaaccacaaggctgataccattgcgggtgacagaggaagcaggagaagacttcaccagcgtagtcagcgaaatcatgatgtatattttgctggtgtttctgacgctgtggctgctgatagaaatgatctattgctaccgtaaggttagcaaagctgaagaggccgcccaggagaatgcatctgattatttggccatcccaagcgagaacaaagagaacagcgcagtacctgtggaagagtag

SEQ ID NO: 205495 - DNA, 426 bp, synthetic construct
  misc_feature 1..426: note = Description of Artificial Sequence: Synthetic coding sequence
  source 1..426: mol_type = other DNA
atgcccgccttcaaccggctgttccccctggccagcctggtgctgatttattgggtgagcgtatgtttcccagtgtgcgttgaggttccctccgagactgaggctgtgcagggaaatccgatgaagttgcggtgtatcagttgcatgaaacgggaggaggtcgaggccacaactgtcgttgagtggttctatcgccccgaagggggaaaggattttctgatttacgagtaccgcaacggccatcaggaagtagaaagtcctttccaggggcgccttcagtggaatgggagcaaggacctccaggacgtttctataactgtgctgaatgttactttaaatgactccggtctgtatacctgcaacgtgtccagggaatttgagtttgaggcccataggccatttgttaaaacgacgcgcctcatctag

SEQ ID NO: 205496 - DNA, 648 bp, synthetic construct
  misc_feature 1..648: note = Description of Artificial Sequence: Synthetic coding sequence
  source 1..648: mol_type = other DNA
atgcccgccttcaaccggctgttccccctggccagcctggtgctgatatactgggtcagtgtgtgcttcccagtgtgtgtagaagttccttcagaaacagaggctgtacagggtaaccctatgaaactacggtgcatttcctgcatgaaacgtgaggaggtggaagccaccaccgtcgtggaatggttctatagaccagaaggtggcaaggactttctgatctacgaatatcgtaacggacaccaggaagtggagtcacctttccagggtagattgcagtggaacgggtccaaggacctgcaggatgtgtccattactgttctgaatgtgactctgaatgatagcggattatatacttgtaacgtgtcacgtgagttcgaatttgaggcccatcgtccgttcgttaagacgacgaggctgattcctcttagagtgaccgaggaagctggagaggatttcaccagtgtggtcagtgagatcatgatgtatattctcctggtctttctgaccctttggctgctgattgaaatgatttattgttataggaaggtgtcaaaggccgaggaggccgcccaggaaaatgcaagcgactatctagcaataccatctgaaaataaagaaaactccgccgtccccgtggaggagtag

SEQ ID NO: 205497 - DNA, 5511 bp, synthetic construct
  misc_feature 1..5511: note = Description of Artificial Sequence: Synthetic coding sequence
  source 1..5511: mol_type = other DNA
atggcccggcccagcctgtgcaccctggtgcccctgggccccgagtgcctgcggccattcacaagggagtctttggctgccatcgaacagcgagctgtggaggaagaagcacggctccagcggaataagcagatggaaatcgaagaaccagaaaggaagcccagaagtgatttggaagcaggcaagaatttaccaatgatctacggggatccccccccggaggtcatcggcattcccctggaggatctggatccctattattccaataagaaaacatttatcgtactcaacaaaggtaaagccatctttcgcttctcggcaacccctgccctctacctgctctccccctttagcgtggtcaggaggggagccatcaaggtgcttattcacgctctgttcagcatgtttattatgattactatcttaacaaattgtgttttcatgacgatgtcggatcccccaccttggtccaaaaacgtggagtacacgtttaccggtatctatacattcgagagcctcattaaaatcctggcaagagggttctgtgtggatgatttcactttcctgagggatccatggaattggctagatttttccgtgattatgatggcatacctcacagaatttgtggatctcggcaacatctcggcgctcagaacattcagggtcctgcgggcactgaaaaccattaccgtaattccaggattgaaaacaattgtgggagctttgatacaatccgtgaagaaactgtctgatgtgatgatcctgaccgtcttctgtttgtctgtttttgcactggtaggattacagctattcatggggaatctcagacagaaatgtgtcagatggccacctccatttaatgatacaaacactacctggtacagtaacgacacctggtacggaaacgacacatggtacggaaacgaaatgtggtatgggaacgattcatggtacgccaacgacacttggaattcccacgcgtcttgggccacaaacgacacatttgactgggacgcttacatctccgatgagggcaatttctactttctggagggatctaatgatgcccttctgtgcggaaattcttctgacgctgggcactgcccggaggggtatgaatgcattaagactggacggaaccctaactacggatataccagctacgacacgtttagctgggctttcctggcactgttcagactgatgacgcaggattactgggagaatctcttccagctgaccctcagggccgctggaaaaacgtacatgatcttttttgtcgtaatcatttttttaggatctttctaccttataaatctgatcctggctgtcgtcgctatggcttatgcagagcagaatgaggccacacttgctgaagataaagagaaagaagaggaatttcaacaaatgttggagaaatttaagaaacaccaggaagagctagagaaagccaaagccgcacaagcactcgagggtggcgaagctgatggcgatccggctcatggcaaagactgtaacgggtcactagacacctcccaaggagaaaaaggcgctccacgtcagtcgtcatcaggagactcaggcatttcagacgcgatggaggaattggaggaggcccatcaaaaatgtccaccatggtggtacaagtgcgcccacaaggtcctgatctggaactgctgcgctccttggttaaaattcaagaacattatacatctcattgtgatggacccattcgtggacctaggtataaccatatgcatcgtcctcaatacactgttcatggctatggagcactatcccatgaccgagcatttcgataatgtcttaactgtcgggaaccttgtgttcactgggatctttacagccgaaatggttctcaagctgatagcaatggacccctacgagtatttccagcaagggtggaatatcttcgatagcataatcgttaccctgtccctggtggagcttggtttggctaacgtgcaaggactgtctgttctgcgcagctttcggctcctcagagttttcaagctggccaagtcatggcctacactcaacatgctgattaagatcattggcaacagtgttggggcccttgggaatcttactctagtcctggcaataattgtatttattttcgccgtggtggggatgcagctttttggcaagtcctataaagaatgcgtgtgtaagatcgcgctggactgcaacttgcctaggtggcatatgcacgacttcttccattctttccttattgtgttcagaattctgtgtggcgagtggatcgaaaccatgtgggactgcatggaggtggcagggcaggccatgtgcttgacggtgttcctgatggtcatggttatagggaatctggtcgtactgaatctcttcctggccctcctcctgagctctttcagcgcagattcgctggcggccagcgatgaagacggggagatgaacaatttgcagatcgccatcgggagaataaaactgggaataggctttgcaaaagcattccttctgggcctgctgcatggcaaaatcctgtcccctaaggatatcatgttgtcactcggcgaggctgacggcgccggtgaggcgggggaggctggcgagacagcccctgaggacgagaagaaggaaccccctgaggaagacctgaagaaggacaaccatatcttaaaccatatggggctggcagacggcccaccttctagcctggagcttgatcacctgaatttcattaataatccttacttaaccatccaagttcctatcgcgtcagaggagtctgacttagaaatgccaactgaggaggagactgacactttctctgagccggaggactccaagaaacctccacagcctctttacgacggaaattccagcgtttgtagtactgctgactataaaccccccgaagaggatccagaggaacaagcggaagaaaacccagagggggaacagcctgaggaatgtttcacagaggcctgcgtgcagaggtggccctgcttgtacgtcgatatttcccaaggtcggggaaagaagtggtggactctgcgacgggcctgttttaaaatcgttgagcataactggtttgaaaccttcatagtgtttatgatattactgtcctccggagccctcgcctttgaggacatctatattgaacagcgtcgggtaattaggaccatcttggagtatgccgacaaggtgtttacctatattttcatcatggagatgttattgaagtgggtcgcgtacgggttcaaggtgtatttcacaaacgcatggtgctggctagactttttaatcgtggatgtgagtattatctctctcgtagctaactggctcggctacagcgaattgggccccataaaatccctgaggacactccgtgcactgcgacccctgagagctctgtcccggttcgaaggaatgagagtagtagtgaatgctctgctgggggccatccccagcatcatgaacgtgctgctcgtctgcctgatcttttggctcatcttctctatcatgggcgttaaccttttcgcagggaagttctattactgcataaatactaccacgtcagagagatttgacatctcggaggtcaacaataagtccgagtgcgagtctctgatgcacaccgggcaggtaagatggttgaacgtgaaggtgaattacgacaacgtcggactgggctatttaagtctcttgcaggttgcaactttcaaggggtggatggacatcatgtatgctgcagtcgattctagggaaaaggaagagcagcctcagtacgaagtgaacctttacatgtacctgtatttcgtgatattcataatttttgggtccttttttacgctaaacttatttatcggcgtcattatagacaattttaaccagcagaagaagaaattaggcggcaaggacatcttcatgaccgaagagcagaaaaagtattataatgcgatgaagaagctcggatccaagaagccccagaaacccattcctagaccgcaaaataagatccagggtatggtctacgatctggtgactaagcaagcatttgatatcacgatcatgatccttatctgtcttaacatggtgaccatgatggtagaaaccgataaccagtctcagttgaaggtggacattttgtataacattaacatgatcttcattattatatttacaggagaatgcgtgttgaaaatgctagcgctgcgccagtactatttcaccgtggggtggaacatttttgactttgtggtggtcattttgtctatcgtgggcctagctctatcagaccttatacaaaaatattttgtctcacccaccctctttagagtgattcgcttagctcggatcggtcgcgtgctgaggctgattagaggagctaaggggatacgaaccctgctgttcgccctcatgatgagtttgccagcactgttcaacatcggacttctgctgttcctggtgatgtttatttactctatcttcggcatgagcaactttgcctatgtgaaaaaggagtccggcatcgacgacatgttcaattttgagactttcggtaacagcattatctgtctgtttgagattaccacctccgctggatgggacgggctgttgaaccccatcctgaactccggacctccggattgcgatccgaatttggagaatcccggcacctcagtgaagggcgactgcggaaatccatctataggcatatgttttttttgtagctacatcatcatatcgtttctaatagtcgttaacatgtatatcgccattatcctcgagaactttaatgttgctacggaggagtcttccgaacctttaggtgaagacgatttcgagatgttttacgagacttgggagaaatttgaccctgatgcaacccagttcatagcatattcaagactttctgattttgtcgatacccttcaggagcccctccgtatagcaaaacctaacaagatcaaactgatcaccctcgatctgccaatggttcctggagacaagatccattgcctcgatatcctattcgcccttactaaggaggtgctgggcgattcaggcgagatggatgcactgaaacagaccatggaggaaaaatttatggcggccaaccctagcaaggtgtcctacgagcccattacgaccacgttaaagaggaagcatgaggaagtttgcgccatcaaaatccagcgggcctaccggcggcatttgcttcaaaggtctatgaaacaggctagctacatgtatcgacactctcatgacggcagcggggacgacgcccctgaaaaagaaggactattagcgaacacgatgtcaaaaatgtatggtcatgaaaacggaaactctagcagcccatctcctgaggagaagggggaggccggtgacgcgggtcctacaatgggcttaatgcccataagcccatcagatacagcatggccacctgcacccccccctggccaaaccgtaagacctggagtgaaggaatctttagtctag

SEQ ID NO: 205498 - DNA, 687 bp, synthetic construct
  misc_feature 1..687: note = Description of Artificial Sequence: Synthetic coding sequence
  source 1..687: mol_type = other DNA
atgcccggcgccggcgacggcggcaaggcccccgcccggtggctgggaacaggactgcttggcctgttcttactgccagttacgctgagcctcgaagtgtcggtaggcaaagctaccgatatatatgcagtgaacggcacagaaatattactgccctgcaccttctcctcatgttttggatttgaggacctccacttcagatggacatacaactcctcagacgctttcaagattttaattgagggaaccgtaaagaacgagaaatctgatccaaaggtaacattgaaggatgacgatcgtatcaccctggttggaagtaccaaagagaagatgaacaatattagcatcgtgctaagggatttggaattttcagatacagggaagtacacctgtcatgtaaaaaaccccaaggaaaataatctgcaacaccatgccacaatctttcttcaggtcgttgaccgccttgaagaagtagacaacacagtcactctgatcatcctggctgttgtcggaggcgtcattgggctgctgatcctgattctgttgatcaaaaaactgattatttttatattgaaaaagaccagagaaaagaaaaaagagtgtttggtgtcttccagcgggaatgacaataccgagaacggactgcccggcagtaaggccgaagagaagcccccatccaaagtgtag

SEQ ID NO: 205499 - DNA, 285 bp, synthetic construct
  misc_feature 1..285: note = Description of Artificial Sequence: Synthetic coding sequence
  source 1..285: mol_type = other DNA
atgcccggcgccggcgacggcggcaaggcccccgcccggtggctgggcacgggcctgcttgttgaggaagtggacaataccgtcaccctgatcatcctcgccgtggtaggaggggttattgggttactgatcctcatccttctgatcaaaaagctgattatttttatcctgaagaaaaccagggagaaaaagaaagagtgcctggtgagttcctcgggcaacgataacaccgaaaacggcctgcctgggtccaaagcagaggaaaaaccaccctccaaggtttag

SEQ ID NO: 205500 - DNA, 5970 bp, synthetic construct
  misc_feature 1..5970: note = Description of Artificial Sequence: Synthetic coding sequence
  source 1..5970: mol_type = other DNA
atggccatgctgcccccccccggcccccagagcttcgtgcacttcaccaaacagtctcttgccctgatcgaacagcgaattgcagagcggaagtccaaagagcctaaagaggaaaagaaggatgacgatgaagaggcacctaaaccaagctcagatttggaggccggaaaacaactcccatttatttacggtgacataccaccagggatggtgtctgaaccacttgaggacctggatccatattacgctgataagaaaacattcattgtcctcaataagggaaaaaccatcttcaggttcaacgctactccagccttgtatatgttgtctccttttagtcctctacgtaggatctcaatcaagatcttagtgcacagtaccctattttcgatgcttatcatgtgtaccatcctcaccaattgcattttcatgaccatgaacaaccctcctgactggactaaaaacgtggagtacacatttaccggcatctatacatttgaaagtcttgtgaagattttggcacgtggtttctgcgttggtgagtttacatttcttcgagatccttggaattggctggacttcgtcgtaatcgtattcgcttatctgacggaattcgtgaacctagggaatgtgagtgctctcagaacgtttagagtgcttagagctctgaagacaatcagcgtcattcctgggctcaaaactattgtgggcgcactgatccaatccgtgaaaaaactgagcgatgtgatgatactcaccgttttttgcttatctgtgtttgcactgataggactgcagctttttatgggaaatctgaagcacaagtgctttaggaacagcctcgagaataatgagactctcgagagtatcatgaacacccttgaatcggaagaggacttcagaaaatacttctattatctggaaggcagcaaggacgccctgttatgcggcttctctacagacagtggccagtgccccgagggatacacctgcgtgaaaattgggaggaatcccgactatggctatacttctttcgacacattctcatgggcatttctggccctctttcgcctgatgacccaggattactgggagaatctctaccagcagactttaagggctgccggtaagacttatatgattttcttcgttgtggtcattttcctgggctcattttatctcataaacttgatactcgccgtcgttgcgatggcctacgaggaacagaaccaggcgaatattgaggaagcaaagcagaaagaactggagtttcaacagatgcttgatcggctgaagaaggagcaagaagaagctgaggccatcgctgccgcggcagctgagtacacatccattagacgctctcggataatgggactttctgagtctagcagtgagacaagtaagcttagctccaagagcgccaaagagagaaggaaccgacggaagaaaaagaatcagaaaaaactaagttcaggagaagagaagggtgatgctgagaaactcagtaaatcagagtcagaggactctatacgtaggaagtcctttcacttgggtgtcgaaggccacaggcgggcacacgaaaaacggttatccacaccaaatcagtcccctctcagcatcagaggctccctattcagcgcccgccgatccagtagaacgtcattgttcagttttaagggaaggggcagagatattgggtcagagaccgagttcgctgatgatgaacacagtatctttggcgataacgaatcacgtaggggatctctatttgtgcctcatcggccccaagaacgcaggtcgagtaacataagccaggctagccgcagtccgccaatgctccctgtcaacggaaagatgcattccgccgtggattgtaatggggtagtgtctctcgtcgacggccgatctgcccttatgctgcctaatggtcagctgctgccagaggtgatcattgacaaagcaacaagcgacgactctggaaccaccaaccagatacacaagaaaagacggtgttcttcatatttgttatcggaggatatgctgaacgatcccaatttacgacagagggccatgagccgcgcctctatcctaacaaatacagtggaagagctggaggaatctaggcagaagtgtccgccctggtggtatcggtttgcacacaaattcctgatctggaactgcagtccatattggatcaaattcaagaagtgtatttactttatcgtgatggaccccttcgtggaccttgcaataacaatttgtatcgtgcttaacactttattcatggccatggaacaccacccgatgactgaagagttcaagaatgttctggctattgggaatctcgtttttactgggattttcgctgccgagatggttctgaaacttattgccatggacccgtatgaatattttcaggtgggctggaacattttcgactcactgattgtcaccttgagtttagtcgagctgttccttgctgatgttgaaggtctatcagtattgaggtctttccggcttctgagggtgttcaaactggcaaagagttggcccactctgaacatgctcattaagattatcggaaactcagttggagcgctggggaacctgactttggtcctagcgattatcgtgttcatttttgcagtagtcggcatgcaactctttggaaagtcttacaaagagtgtgtttgcaagataaacgatgactgcactctcccgaggtggcatatgaatgactttttccactcatttttaattgtcttccgagtcctgtgcggtgaatggattgagacaatgtgggactgcatggaagttgcagggcaggccatgtgcttaatcgtctacatgatggtcatggttatcggcaatcttgtagtactgaacttgttcctggcgttactgctgtcaagcttctcttccgacaacctgaccgctattgaagaggatcccgacgctaataacttgcagatcgcagttacccgaatcaaaaaggggattaattacgtgaagcaaactttgcgagagttcattctcaaggccttcagcaagaaaccaaagatcagccgggaaatccgacaggccgaggacttgaataccaaaaaggagaactatatatcaaaccatactctggctgaaatgtctaaagggcacaactttctgaaagagaaagataagataagcggatttggttcaagcgtggacaagcaccttatggaagactctgacgggcagtcattcattcacaacccgagcctgacagttactgtccctattgcccccggagaatccgacctggagaacatgaatgccgaggaactgagcagcgacagcgatagtgaatacagcaaagtccgcttaaatcgctcttcttcctcagagtgctcaaccgtggacaatcccctcccaggggaaggggaggaggccgaggccgagccaatgaatagtgatgaacccgaagcatgcttcactgacggctgcgtgtggaggttcagctgttgtcaggtcaacatcgaaagtggcaagggcaagatttggtggaatattcgaaaaacgtgctataagatagtggagcatagctggttcgagagcttcatcgttttgatgatcctgctgtcctcgggcgcgttggcctttgaggacatttacatagagagaaaaaagacaatcaaaattattctggagtacgcggataagatttttacttacattttcatcttagagatgcttctaaagtggatcgcctacggctataaaacatacttcaccaacgcgtggtgctggttggatttcctaatagtggatgtgtctcttgttactctggtggcaaacacactgggctactccgacctgggtcccataaaaagcctgcggaccctccgggcgctaaggcccttgcgcgctctctccaggtttgaaggcatgcgcgtggtggtgaacgcattgattggtgctattcctagcatcatgaacgtcctgctggtgtgcctgatcttctggctaatctttagtatcatgggcgttaatctatttgccggcaaattttatgaatgtataaataccactgacggcagccgctttcccgcctctcaagtaccaaatcggtcagaatgtttcgctttaatgaatgtcagccaaaacgtgcggtggaaaaacttgaaagtgaatttcgacaacgtggggctgggatatttgtccttactccaggttgcaacttttaaggggtggactatcattatgtacgctgctgtggacagtgttaacgtggacaagcagcctaagtacgagtactcactctatatgtacatatatttcgttgtcttcattatcttcggaagtttctttactctcaatctgtttatcggtgtaatcatcgacaatttcaaccaacaaaagaaaaagctgggcggtcaggatatatttatgaccgaagaacagaaaaagtattacaatgcaatgaaaaaactcggcagcaagaaaccacagaaacctatcccgaggccaggtaataaaattcagggctgtatatttgaccttgtcactaaccaggcctttgatataagcatcatggtgttgatctgtctgaacatggtgacaatgatggtggagaaagagggccagagccagcacatgactgaagtcctttattggattaatgtggtgttcataattctcttcactggtgagtgcgttttaaagctcatcagcttgcgccattactatttcacagtgggatggaacatttttgactttgtcgttgtgatcatctccattgtgggtatgttcctggcagatttgatagagacctattttgtctctcctactttattccgtgtcataagattggctagaatcggccggattttgagactggtgaagggggctaaggggatccggacccttctgtttgcccttatgatgtctctgcccgcgctgtttaacatcggcctgttgttgttcttagttatgtttatttacgccatttttggaatgagtaacttcgcatacgtgaaaaaggaggatgggatcaacgatatgttcaacttcgagaccttcggaaattccatgatttgcctgttccagattactacctcagccggttgggatggcctcctagcacctattttgaattcaaagccacccgactgtgatccaaaaaaggtccatcccggttcaagcgtggagggagattgcgggaacccaagtgtgggcatcttttacttcgtctcctacattataatatcatttctcgtggtggtaaatatgtatatcgctgtcatattggaaaacttctccgttgctacagaggaatctactgaaccgctgagcgaggatgactttgagatgttttatgaagtttgggagaaattcgatccagacgcgacccagtttatagagttcagtaagctcagcgatttcgccgcggccctagacccccccttgctgatcgccaagccaaataaagtgcaactcatagcgatggacctgccaatggtgagcggagatagaatccactgtctagatatcctgttcgctttcactaagcgggtcctcggggagtctggggagatggattctttgcgctctcagatggaggaaagattcatgtcagcgaacccctccaaagtctcttatgaaccaattactaccaccctgaagcgaaagcaagaggacgtttcggccacagtgatccaacgcgcgtaccggagatatcgcctgaggcaaaacgtgaagaatatcagctcaatttacatcaaagatggagaccgagatgatgatttgctgaataagaaggacatggcgttcgataacgttaatgaaaattcttcccctgaaaagactgacgccacttcctccacaacatcccccccctcctatgactccgttacaaagccagataaagagaaatatgagcaagaccgcacagagaaggaagacaagggaaaagatagcaaggagtccaagaagtag

SEQ ID NO: 205501 - DNA, 5970 bp, synthetic construct
  misc_feature 1..5970: note = Description of Artificial Sequence: Synthetic coding sequence
  source 1..5970: mol_type = other DNA
atggccatgctgcccccccccggcccccagagcttcgtgcacttcactaagcagagcttggcactgatcgagcaaagaatagccgaacgtaagagtaaggaaccaaaagaggagaaaaaggacgacgacgaggaagctcctaaacctagctctgacctagaagcaggtaagcagctcccgtttatttacggcgatatcccaccaggcatggtgtcagagcccctcgaggatctggatccatactacgcagacaagaaaaccttcatagtgctgaacaaaggcaaaacgatatttaggttcaacgcaactcctgctctctacatgttgtccccattctctcccctgcgccggatatccatcaagatcctggttcattccacactgttcagcatgttaataatgtgcaccatcttgaccaattgtatcttcatgaccatgaacaaccccccagactggacgaaaaatgtggaatatacgtttaccggaatatacacgttcgagtctctggtgaagattctcgcccggggattctgtgtgggcgaattcacttttctgcgggatccttggaactggttggactttgttgtgatagtattcgcatatgtgacagagtttgtggatctgggtaatgtgagcgccctacgaaccttcagagttctccgggctctgaaaaccatctccgtcattccaggcctgaagactatcgtcggagccctgatccaatcggtaaagaagctatctgacgtgatgatactcaccgtgttctgcctcagcgtgtttgcactgattggccttcagttgtttatgggaaacctaaagcacaaatgttttcgtaacagcttggagaataatgaaaccctggagagcataatgaacacactggagtcagaggaagattttagaaagtatttctactacctcgaaggatctaaagatgcgctcttgtgcggtttctccacggacagcggccagtgtccagaaggatacacctgcgtgaaaatcggacgcaaccccgattatggatataccagctttgatactttcagctgggcctttttggcactttttaggctcatgacgcaggactactgggagaacctctatcaacagaccctccgcgcagcaggcaagacatatatgatcttttttgtggtggtgatctttctggggagtttctatctcatcaacctgattctcgctgttgtggccatggcatatgaggaacagaaccaggccaatattgaggaagccaaacagaaggaactagaatttcaacagatgctggaccgactcaaaaaagagcaagaagaagccgaggcaatcgctgccgccgctgcagaatacaccagtatccgcagatcccggattatgggactctcggaatcttcttccgaaacatccaagttatcttcgaaatcagcgaaagagaggcggaatcgacgaaagaagaagaatcagaagaaactctccagcggcgaggagaaaggcgatgccgaaaagctctctaagtctgaaagcgaagattccatacggagaaaatctttccatctgggagttgagggacacagacgcgcccatgagaaaagactaagcaccccaaaccaatctccactgtcaattcggggttccctgtttagcgcaaggcgttctagccgcacctccctcttttcattcaaaggaagagggagggatattggttcagagaccgaattcgcagatgacgaacattccatttttggcgacaatgagtctcgccggggttctctatttgttcctcacaggcctcaggaacgccggagcagcaacatctcccaagcgtcgcggtctccgcctatgctcccggtgaatggaaaaatgcactccgccgtggactgtaatggcgtcgtgtcattagtagacggcagaagcgctttgatgctcccaaatggtcagcttctgccggaggtaatcatcgacaaagccactagcgatgatagtggcaccaccaaccagatccacaagaagcgacggtgctcttcatacctgctgtctgaagatatgttgaatgaccccaaccttaggcagcgagcaatgtcccgggcttcgatcctcacgaatactgtcgaggaactggaggagtccagacaaaaatgccccccttggtggtaccgcttcgcgcacaaattcctcatctggaactgctcaccatactggataaaattcaagaagtgtatctactttatcgtgatggaccccttcgtggacctggctattactatatgcattgtactcaacacccttttcatggctatggagcaccaccccatgactgaggaatttaaaaatgtcttggctatcgggaaccttgtgtttaccggcatcttcgccgcggagatggtcctgaaactcatcgctatggacccatacgaatactttcaggtcggttggaacatattcgatagcctcatcgtcactttgtccctcgtagaattgtttttggcagatgtcgaaggcctgtccgtactgagatccttccgcctgctgagagtgttcaaactggccaaatcctggcctacattgaacatgctcatcaagatcataggcaattctgttggggcactagggaacctgacgctggttctggccatcatcgtattcattttcgcagtggtgggtatgcagttgttcggtaagtcatacaaggaatgtgtctgtaagatcaacgacgattgcaccctgcctcgttggcatatgaacgacttcttccattccttcttgatcgtgtttcgtgtgctgtgtggtgaatggattgagactatgtgggactgcatggaagtggctggtcaggccatgtgcctaatagtgtatatgatggtgatggttataggaaaccttgtcgttctgaatcttttcctcgcccttcttttaagcagcttctcctcagacaatctgaccgctattgaggaagaccctgacgccaataatctgcaaattgcagtgaccaggattaagaaaggtattaattacgttaaacagactctgagagagtttatccttaaggctttcagtaaaaagcccaagatttctagggaaattaggcaggccgaggatctcaatacgaaaaaagagaactacatctcaaatcatacgctagctgaaatgtccaaagggcacaactttcttaaagagaaggataagatttctggctttggtagttcagttgacaagcacctcatggaagactctgatggccagagcttcatacacaacccctcacttaccgtgacagtcccaatcgcccctggggaaagcgacctcgagaacatgaatgcagaggagttgagctccgatagcgacagcgaatacagcaaggtccgattgaatagaagctcttcatctgagtgcagcaccgtggacaaccccttgcctggtgagggcgaggaggcagaagcggaaccaatgaattctgacgagccggaggcttgttttaccgacggatgcgtttggcgcttttcatgctgtcaagtgaacatcgagtctgggaaaggtaaaatatggtggaatattagaaaaacttgttataagattgtagaacactcttggttcgaatctttcattgttctcatgatcctgctctcctctggcgcactggccttcgaagacatctacatagaacgaaagaagacaatcaagatcattctggagtacgcagataaaatttttacctatatctttattttggaaatgctcttgaaatggattgcctacgggtataaaacctacttcactaacgcatggtgctggttggattttctgatagtggatgtttccctagttaccctggtcgctaataccttgggctattctgatctgggaccaatcaagtctctgcgaaccctccgcgctctgagaccactgcgcgcccttagtaggttcgaggggatgagggtagtcgtgaatgcgctaattggcgcaatcccctctattatgaacgtcttgttggtatgcctgattttctggttaatattctctatcatgggcgtcaatttgtttgctggaaagttctacgagtgtattaatactaccgatggcagcagattccctgcgtctcaagtcccgaatcgctccgaatgttttgctttaatgaatgtgtctcagaacgttaggtggaaaaatctgaaggtcaactttgataacgtcggactgggctacctttccctcctgcaagtcgccactttcaaagggtggaccattatcatgtacgctgccgtggacagcgtgaacgttgacaaacagccaaaatacgagtatagcctgtatatgtatatctacttcgtggtctttatcattttcggcagtttctttactttgaacctatttatcggagtgatcattgataatttcaaccagcagaaaaagaaactgggcggtcaggatatatttatgacagaagaacagaagaagtactacaacgcgatgaagaagttggggagcaagaagcctcagaagccaattccccgaccaggcaataagatccagggatgcattttcgacctcgtgacgaatcaagcttttgacatctcaatcatggtgctcatctgtcttaacatggtgactatgatggttgaaaaagagggacagagtcagcatatgaccgaagttctctactggattaacgtcgttttcatcattctattcactggcgagtgtgttctgaaacttatcagcttgcgacattactatttcacagtgggttggaacatttttgatttcgtcgtggtgattatttcgattgtgggcatgtttttggccgacctaatcgaaacttacttcgtgagcccgaccctgtttcgcgtgatcaggttggcccgaattgggcgcattttacggctcgttaaaggcgccaagggtatcagaacattactcttcgctctgatgatgtcactgcccgccctgttcaacatcgggctgctactgttcctcgttatgtttatctatgctatcttcggcatgagcaatttcgcatacgttaaaaaagaagatggcataaatgacatgttcaactttgaaacttttgggaatagcatgatatgcttgtttcagatcaccactagcgctggctgggacgggctgcttgcccccatcttgaacagcaaaccgccagattgcgaccccaagaaggtgcatccagggtctagtgttgagggtgactgcggaaacccaagcgtgggaattttctacttcgtgagctatattattatttcttttctagtggtcgttaatatgtatatcgcagtcatcttggaaaacttcagtgtggcaactgaggaatctacagagcctctatcagaagacgattttgaaatgttttacgaagtgtgggaaaagtttgaccctgacgcgacacaattcatagaattttccaaacttagcgattttgcagctgccctcgaccctccacttctgatagctaaacccaacaaagtgcagttaatcgccatggatctacctatggtcagcggagatcgcattcattgcttagatatcctgtttgccttcaccaaacgcgtgctgggggagtccggcgagatggatagcttgcgcagccagatggaggagcgctttatgtccgcaaatccatcaaaggtatcttatgagcccatcaccaccacgttgaaaagaaagcaggaggatgtgtcagccacggtgattcagcgcgcttatagacggtaccgactacgccaaaacgtgaagaatatatccagcatctacatcaaggacggcgaccgcgatgatgatttgctgaacaaaaaggatatggccttcgacaatgtaaacgaaaattcttcacccgaaaagacagatgccactagctctactacgtcccctccttcctacgacagcgtgaccaaacccgataaagagaagtatgaacaagacagaaccgaaaaggaggacaaaggtaaagactccaaggaaagcaagaagtag

SEQ ID NO: 205502 - DNA, 5967 bp, synthetic construct
  misc_feature 1..5967: note = Description of Artificial Sequence: Synthetic coding sequence
  source 1..5967: mol_type = other DNA
atggccatgctgcccccccccggcccccagagcttcgtgcacttcacaaagcagtcccttgcactgattgaacagcgcatcgccgagcgtaaatctaaagagccaaaggaggagaaaaaagatgacgacgaggaggctccgaagccctcttctgacctcgaggcagggaaacagctgcctttcatctacggtgacatcccaccaggcatggttagtgaacccttggaggacctcgacccctattacgctgataaaaagacttttattgttcttaataagggcaaaacgatattcagattcaacgccacaccggctctttacatgctcagcccgttttccccactgagacgcatctccatcaagattctcgtgcacagcctgttttcgatgctgataatgtgtactatcctcaccaattgtatattcatgacgatgaataaccccccagactggacaaagaatgttgaatatacctttacaggaatatataccttcgagtctctggtcaagatcttggcgcgtggcttctgtgtgggggagttcacctttttgcgcgacccttggaattggctagatttcgtcgtgatcgtgtttgcctacttgacagaattcgttaatctgggcaacgtgtctgcgctgagaaccttccgggtcctgcgcgccctgaagacaataagcgtgattcctggcctgaagactattgtgggcgccctcatccagagtgtaaaaaagctgtcagacgtcatgatactgactgttttttgcctgtccgtgtttgctcttatcgggttgcagctgttcatgggcaacctgaaacataagtgcttcaggaactcgctcgagaataacgagaccctggaatccattatgaatacgctagagagtgaagaggattttcggaaatacttttactacctggagggctccaaggacgccctcctgtgcggattctcgacagatagtggacagtgccccgaagggtacacctgcgtcaaaatcggacgcaatcccgactacggttatacatctttcgacacatttagctgggccttcttagctctgttccggcttatgacccaggactactgggaaaatctttaccagcagacattaagggctgccggcaaaacttatatgatcttttttgtcgtggtcatcttcctgggatcattctatctgataaacctgatactggctgttgtggcaatggcgtacgaagaacagaatcaggcaaacattgaggaagcgaaacaaaaggaactggaattccagcagatgttggataggctgaagaaggagcaggaggaagccgaggccattgctgccgcagccgctgagtatacaagcattcgtcgctcccggattatgggcctctctgaatcctcctctgaaaccagtaagctgtcctcaaagtccgccaaggagcgcaggaatcgccgtaaaaaaaagaatcagaaaaaactgtccagcggagaggaaaaaggggacgcagaaaaactgtctaagagtgaatccgaggactcaattcgacggaaatcctttcacctcggagttgaagggcaccggcgcgcccacgaaaaacgtctgtctacccccaaccagagcccgctctctatcaggggatcgctgtttagcgcacgccgcagctctaggacttctctgttcagctttaagggacggggcagggacatcggcagcgaaaccgaatttgctgatgatgagcactccatctttggggacaacgagtctcgtcgtggcagcttattcgtaccccatagacctcaagaaagaagatcctccaatatctcacaggcttcccgctccccaccgatgttgccggtgaacgggaagatgcacagcgcagttgactgcaacggagtcgtgtcgctggtcgacggacgttctgcattaatgttgcctaatggccagctgctgccagaggtcataatcgataaggctacatccgacgactccgggaccactaaccagatccacaagaaaagacggtgttccagctacctcttatccgaggacatgttgaacgacccaaacctcagacagcgcgctatgtcacgggctagcattcttactaatactgtggaggagttggaggagagccgtcagaaatgcccgccgtggtggtacagattcgcccataaattcctgatttggaattgcagcccctattggattaagtttaagaaatgtatctactttatcgtgatggatccatttgtcgatttggctattacaatctgtatcgtgttgaatacgctatttatggcaatggagcatcatccgatgaccgaggaatttaagaatgtgcttgcgatcggcaatcttgtattcaccgggatattcgccgccgagatggtgctgaagctcatcgcaatggatccgtacgagtacttccaggtcgggtggaacatttttgatagcctgattgttacactgagtctagtcgagctattcctggccgacgttgaaggtctgtcagtacttcggagctttcgcttattgagggtcttcaagctcgctaaatcctggccaacgttaaacatgctgatcaagatcatcggcaattcagtgggcgcgctcggtaacttgacattagtacttgctataatcgtcttcatctttgcagtagtgggtatgcagcttttcggtaagagctataaagagtgtgtgtgtaagatcaacgacgattgcaccttacccaggtggcatatgaatgatttctttcactctttcctgatcgtcttcagggtgctctgcggtgagtggattgaaaccatgtgggactgtatggaagtagcagggcaggccatgtgccttattgtctacatgatggttatggtgatagggaatttagttgtgctcaacttgtttttggccttgttactctcctctttctcatcggataacctcactgcaattgaggaggacccagacgccaataatctgcagattgcagttacccgcatcaaaaagggaatcaattacgtcaaacagacactcagagagttcatcctgaaggcattttccaaaaaaccaaagatctcgagggagatacggcaagccgaagacctgaataccaaaaaggaaaactatatctccaatcatactctcgctgaaatgtctaaagggcacaattttctcaaagaaaaggacaaaatcagtggtttcggtagctcggttgataaacacttaatggaagactcagatggtcagagttttatccacaacccttctctgacagttaccgtgccaatcgctcctggagaaagcgacttggagaacatgaatgccgaggagctgtcatccgactccgactccgagtatagcaaggtccgtttaaacaggtcttccagctcagagtgcagtactgtggacaaccctctccccggagagggcgaagaagcagaagccgagcctatgaattcagacgagccagaggcctgcttcacggacggatgtgtgtggagattttcctgttgtcaggttaatatcgagagcggtaagggaaaaatctggtggaacatcaggaaaacctgctacaagatcgtagagcattcctggtttgaaagttttattgtactgatgattttgctgtcctctggggcgctggcatttgaggacatctacattgagcggaagaaaacaataaagattatcctggagtatgctgataaaatcttcacatacatctttatcttggaaatgctgctgaaatggattgcatacggttacaaaacctactttaccaacgcatggtgctggctggatttccttatcgtggacgttagcctggtgaccctggtcgcgaatacgcttggatactctgatcttgggcccatcaagtctctgagaaccttacgcgcccttcggcctctgagggcactctctcgatttgaggggatgagggtagtcgtcaacgctctgatcggagccattccgagcataatgaatgtcttactcgtatgccttattttctggctaatcttctcaatcatgggtgttaatctgttcgccggaaagttctatgagtgcatcaacacaactgacggatcccggttcccagcgagccaggtgcctaacaggagcgagtgcttcgctcttatgaatgtaagccagaacgtcagatggaagaacctcaaggtgaacttcgacaacgtgggcctcggctatctgagtctactgcaggtcgccactttcaaaggatggacaatcataatgtatgcagcagtggatagtgtgaatgttgacaaacagcccaagtacgaatacagtctgtatatgtacatctactttgtggtcttcattatcttcgggtctttctttacacttaacctctttatcggtgtaattatcgataatttcaaccagcagaagaagaagctgggaggccaggacatttttatgaccgaagagcagaagaaatattacaacgcgatgaaaaagctgggtagtaagaaaccccagaaaccgattccacgtccaggcaacaagatacaaggctgtattttcgatctcgtcacaaatcaggcgtttgacattagcatcatggtcctaatctgcttgaacatggtgaccatgatggtggagaaagaggggcagtcccagcatatgaccgaggtactatactggataaatgtcgtcttcattatactgtttacgggtgagtgtgtcctgaaacttattagcctgcggcactattacttcaccgtcgggtggaatatatttgatttcgtcgtggttattattagcatcgtcgggatgtttttggctgatctgatagaaacctacttcgtttctcctaccctgttcagggtgatccgccttgcgagaattggacgaattctcaggttagtaaaaggcgctaaaggcatcaggacactcctctttgccctcatgatgagtctgcctgccctgttcaatatcgggcttctgctgttcttggttatgttcatttacgccatatttggcatgtcgaacttcgcgtacgttaaaaaggaagatgggatcaatgatatgtttaatttcgagaccttcggaaactccatgatttgcctttttcaaattactacatctgcaggatgggacgggctcctggcccctatcttaaactccaaaccccccgactgtgacccaaaaaaggtgcacccaggttcatcagtagaaggcgattgcggaaatcccagcgtgggaattttctacttcgtaagctacatcataatctctttcctcgtcgtcgtcaacatgtacatagccgtgattcttgagaatttttctgttgcaaccgaagaaagcactgagcctctttctgaggatgatttcgagatgttctacgaagtctgggaaaaatttgaccctgacgccactcagttcattgaattttccaagttgtccgactttgcagcagccctagacccaccactgctgattgccaaaccaaacaaggtgcagctcatagctatggacttgccaatggtgtcaggtgacaggatccactgtctggatatactattcgctttcacaaaaagagtgcttggcgaaagcggggagatggactcactgagaagccagatggaagagcgtttcatgtctgccaaccctagcaaagtgtcatatgagccgatcacgaccacccttaagagaaaacaggaagacgtttcagctactgtcattcaacgggcttataggcggtataggctgcgccagaacgtaaaaaatatttcatcaatctacataaaggatggggatcgagatgacgacttgctcaataaaaaagatatggcctttgataacgttaacgagaactctagcccagaaaagacggacgcgacctcctctaccacctcccctccttcttacgattcggtaacaaagcccgacaaagagaagtacgagcaggatcgaactgagaaagaagataaggggaaagatagcaaggaatccaaaaaatag

SEQ ID NO: 205503 - DNA, 5934 bp, synthetic construct
  misc_feature 1..5934: note = Description of Artificial Sequence: Synthetic coding sequence
  source 1..5934: mol_type = other DNA
atggccatgctgcccccccccggcccccagagcttcgtgcacttcaccaagcagtcactggctctgatcgagcagcggattgctgagaggaaaagcaaggaacccaaagaagaaaagaaggacgacgacgaagaagcccccaaacccagtagcgacctagaggctggcaagcagttgcccttcatctatggtgatatcccccctgggatggtgagcgaaccactggaagatctagatccctattacgctgataaaaagacattcatcgtgttaaacaagggcaagacaattttccgcttcaacgccacgcccgctctgtacatgttgtcccccttttccccactccgccgcatcagcatcaaaattcttgtgcatagtctgttttcgatgctgatcatgtgcacaatacttacaaattgcatttttatgactatgaacaaccccccggactggacaaagaacgtcgaatatacattcaccgggatctacacctttgagtccctggtgaaaatcctggcgcggggattttgcgttggcgaattcacatttctgagggatccctggaactggttggactttgtggtaatcgtcttcgcctatcttaccgaatttgtgaatctcggcaacgtgtccgcactcagaactttcagggtactgagagccctcaagaccataagcgtgatccctgggctgaagacgatcgtgggagcacttatccagtctgttaaaaagttgtccgacgtcatgatattgaccgtgttctgcctttccgtatttgcgctcatcggattgcagttgtttatgggtaatttgaagcacaagtgtttcaggaactccctcgaaaacaatgaaaccttggaaagcatcatgaatactctggagtccgaagaggatttcagaaaatacttttattacttggagggttccaaagacgcactgctgtgcgggttttcaaccgactccgggcagtgtccagaaggctacacgtgtgtgaagattggcaggaatccagactacggttatacatctttcgacacattctcttgggccttcttggccctcttccggcttatgacccaggattattgggagaatctctatcaacagactctaagggcagcgggcaaaacttatatgattttttttgtcgtggtaatcttcctcggatcattctatctgattaatttaatcctcgctgtggtggccatggcgtacgaggagcagaaccaggctaacatcgaggaagcgaagcagaaggagctcgaattccagcagatgctagatcgactgaaaaaagaacaagaggaggctgaagcgattgcagcagcagccgccgaatacacatctatccgtcgttcccgcatcatggggttgtccgagtctagctctgagaccagcaaactgagttccaagagcgccaaagaacgccgtaatagacgaaagaagaagaatcagaaaaagctctcctcaggtgaggagaagggagatgccgaaaaactgtccaagtctgaaagcgaggattccattaggagaaagtctttccatctgggcgtggagggacaccggcgcgctcacgaaaagaggctgagcaccccgaaccaatccccactgagtatccggggtagcctcttttccgccaggagatcaagtaggacgagcttgttttctttcaagggacggggtcgggatatcgggtcagagacagaattcgcggatgatgagcattcaatatttggtgacaatgagagtagacgcggctcactcttcgtcccacaccgcccacaggagaggcgctcctccaatatttcacaggcatcccgctcccctccgatgttgcccgtgaacggcaaaatgcacagcgccgtggactgtaacggagtggtgagcttagtggacgggagatcggcgttaatgctcccgaacgggcaacttctgcccgaaggcaccaccaatcagatccacaaaaagcggcgctgttcctcatatttgctgtccgaagacatgctgaacgacccgaatctaaggcagagggcaatgagccgggcaagcattctcactaacacagtggaggaactcgaagaatccagacagaagtgtccgccatggtggtatcgctttgcccacaagttcctaatttggaactgcagtccttactggataaagttcaagaaatgtatctatttcatagtgatggacccgtttgtcgatctcgccataaccatatgcatcgtcctgaataccctgttcatggcgatggagcatcaccctatgaccgaagagtttaagaacgtgttggcaatcggaaatcttgtttttacgggaatcttcgctgcggaaatggtgctgaagctgatagcgatggacccttatgagtacttccaagtcgggtggaacattttcgattccttgattgtgactctgagcctagtagaattgtttctagctgatgtcgaagggctgtctgttctccgttcgttccgactgctgagagtgtttaagcttgcgaagtcatggcctacgctaaacatgcttatcaagattatcggaaattccgtcggcgccctcggtaacctgaccctggtattagctattatcgtattcatctttgccgtcgtcggaatgcagctgtttggcaaatcttacaaagagtgcgtctgcaagatcaatgatgactgcacactccccagatggcatatgaacgactttttccatagcttcctgattgtttttcgggtgctctgtggcgagtggatcgagaccatgtgggattgcatggaggttgcaggacaagccatgtgtctcatcgtgtacatgatggttatggtcattggaaacctggtggtactgaatttgttcctggcactgctactgagctcatttagctcggataacctcaccgctatagaggaggatcctgatgccaataatctccagatcgccgtgacccgtatcaaaaagggcatcaactatgtcaagcaaactctaagggagttcatccttaaggctttctcaaagaagccaaaaatttctcgagaaattcggcaagcagaggatcttaacactaagaaagagaactacatctcaaatcacacgttggccgagatgagcaaaggtcataattttctgaaagaaaaggataaaatatctggctttggctcttctgtggacaagcacctaatggaggatagtgacggccaatccttcattcacaatccatccttaaccgtaactgtgcccatcgcccctggagaaagtgatctggagaatatgaatgccgaagaactgtctagcgattcagatagcgaatactccaaagtcaggttgaatcggtcaagcagctcagaatgttccaccgtggacaatcccctgcccggggaaggggaggaggctgaagctgagcctatgaattctgatgagcctgaagcctgtttcaccgacggctgtgtgtggcggttctcgtgttgccaagtgaatatcgagtccggcaaagggaaaatctggtggaacattagaaagacctgttacaagatagttgagcacagttggtttgaatcctttattgtcttgatgatcttgctctcaagtggagcactggccttcgaagacatctacatcgagcgaaagaagacgattaaaatcattctcgaatatgccgataagatcttcacctatatattcatcctagagatgctgctgaaatggatcgcctacggttataagacttacttcacgaacgcctggtgctggctcgacttcctgattgtggatgtgagcctcgttaccctcgtcgctaataccttgggatattccgatttggggccgatcaagtcattgcgcacccttcgcgctctgcggcccctccgtgcactgagtaggtttgagggtatgagagtagtggtgaacgctttgattggcgccataccatccataatgaacgtgctgctagtttgtctgatcttctggctgattttttcaattatgggcgtcaatcttttcgctgggaaattttacgagtgtattaatacaacagatggaagtaggttccccgcttcccaggtgccgaacaggtctgaatgtttcgctctgatgaacgtgagccagaacgtgaggtggaagaatctcaaggtaaactttgataacgtgggactggggtacctgagcctcttgcaagtggctacttttaaaggttggaccattatcatgtacgcagctgtagatagcgtgaatgtggataaacagcctaagtacgagtattcactgtacatgtacatatactttgtggtcttcattatttttggctccttttttacacttaacctttttataggcgtgattattgacaactttaaccagcagaagaagaagttgggaggacaggatatcttcatgacagaggagcagaagaaatactataatgccatgaagaaactagggtctaaaaagcctcagaaacctatcccccgcccaggcaataagattcagggttgcatctttgacctggtcactaaccaagcattcgacatctccatcatggtcctgatctgtttaaatatggttactatgatggtagagaaagaagggcagtcccagcacatgacagaagtactctattggataaacgttgtgttcatcattctttttacaggcgaatgtgttctgaagttaatcagccttcgccactactactttacagtcggatggaatatcttcgactttgttgtggtaataatatctatcgttgggatgttcttggcagatctgatcgagacatatttcgtttcgcccactttattccgggtgattcgcttggccagaatcgggcggatattaagactggtgaaaggagcgaaaggaattagaactttattgttcgccctgatgatgtcccttcccgcactcttcaacatcggccttcttctgttcctggtgatgttcatctacgctatctttggcatgtcaaactttgcttacgtcaagaaggaagatggcatcaatgacatgttcaactttgagaccttcggaaatagcatgatatgtctgttccagataaccacgtcggcaggttgggacggtcttcttgctccaatcttaaattcaaaaccaccagattgtgaccccaaaaaggtacaccctgggagctccgtggagggggattgcggcaatccttctgtgggaatcttctattttgtgtcctatatcatcatctctttcctcgtggtggtgaacatgtatatcgccgtgattcttgaaaactttagtgtagcgaccgaggagtccaccgagccactatccgaggacgatttcgaaatgttttatgaggtctgggagaagttcgaccctgacgcaacccagttcatcgaattttccaaattgtcagatttcgccgctgcacttgatcctcctctcttgatcgcaaagcccaacaaagttcaacttatagctatggatttaccaatggtgagtggagatcggatccactgcctagacatcctattcgcattcaccaaaagagtcctcggagagagtggcgagatggacagtctgcggagccagatggaggagagattcatgagcgctaaccccagtaaagtttcatacgaaccaattacaacaacattaaagcggaaacaggaggatgtgtcagccaccgtaatacagagagcatataggcggtacaggttgagacaaaatgtgaagaatatctccagcatttacattaaagacggggatagggacgatgacctgctgaacaagaaggacatggcattcgataatgtgaacgaaaattcatctccggaaaagaccgatgcaacgtcaagcacaactagtcccccatcttatgacagcgtcaccaagcccgataaggaaaagtacgagcaggatcgtacagagaaggaggacaaagggaaggacagcaaggaatcaaagaaatag

SEQ ID NO: 205504 - DNA, 1620 bp, synthetic construct
  misc_feature 1..1620: note = Description of Artificial Sequence: Synthetic coding sequence
  source 1..1620: mol_type = other DNA
atcctgaccaactgcatcttcatgaccatgaacaacccccccgactggaccaaaaacgtggagtacacattcacaggcatctacacatttgagtccctcgtgaaaattctcgcacgcggcttttgtgtaggcgagttcaccttcctacgggacccctggaattggctcgactttgtggttatagtgtttgcctatgtgactgaatttgtggaccttggtaatgtatccgcgctccgcaccttccgcgtgctgcgggcactaaaaactatcagtgttattcctggcctaaagacaatcgtcggagcccttatccagtctgtgaaaaaattgtctgatgtgatgatcctgaccgtcttttgtctgtcagtgtttgcattgattgggctccagctttttatgggtaacctgaaacataagtgctttcgcaacagcctggagaacaacgagactcttgagtccattatgaataccctagaatctgaggaggactttaggaagtacttctattatctggagggctccaaggacgctcttttgtgtgggttcagtaccgattcaggacaatgccccgaaggatatacttgcgttaagataggccgaaatcctgattatggctataccagtttcgatacatttagctgggccttcctggccttatttcggttaatgacccaggactactgggaaaacctgtaccagcagacccttcgggccgccggcaaaacatacatgatatttttcgtcgtcgtcatcttcctgggttctttttatctaatcaatcttatactagccgtcgttgccatggcatacgaggaacagaatcaagctaatatcgaagaggctaagcaaaaggaactggaattccaacagatgctggacagactgaaaaaggagcaagaagaagctgaagccattgcggcggcagcagctgagtacacatcaattaggagaagcaggatcatgggactttctgaatcatctagtgagacatccaagctctcgtctaaatcagctaaagaacgccgcaatcgccgaaaaaagaagaaccagaagaaactcagttcaggtgaggaaaaaggggatgccgaaaaactatccaaaagcgagtctgaagactctattaggcgcaaaagcttccatctgggggtggaaggacaccggagggcccacgagaagcgcctgtctacacctaaccaatcacccctgagcatccgggggagcctgttttccgctcgccggagtagtcggacaagcctattctctttcaagggccgaggtagagatattggtagcgaaaccgaattcgctgacgatgaacactcaatctttggcgacaatgaatctcgccgggggagtctgtttgtcccacatcgcccacaggagcgtcgatcatcaaacattagccaggcctcacggtcacccccaatgctgcccgtgaacggaaaaatgcactccgccgtggactgtaatggcgttgtctccctggtggacggaaggagtgcactgatgcttccaaacggccagcttctgcctgaagtcattatagacaaagccacaagcgacgattccggtaccaccaatcagatacacaaaaagcgaagatgctcgtcttacctgtag

SEQ ID NO: 205505 - DNA, 198 bp, synthetic construct
  misc_feature 1..198: note = Description of Artificial Sequence: Synthetic coding sequence
  source 1..198: mol_type = other DNA
atggccaacttcctgctgccccggggcaccagcagcttccggcggtttactcgtgagtctctggccgcaattgagaaaagaatggccgagaagcaggcaagaggcagcacgaccctgcaggagtcaagggaaggtcttcccgaggaagaagcccctcggcctcaactggaccttcaggcttctaaaaagctgccttag

SEQ ID NO: 205506 - DNA, 6051 bp, synthetic construct
  misc_feature 1..6051: note = Description of Artificial Sequence: Synthetic coding sequence
  source 1..6051: mol_type = other DNA
atggccaacttcctgctgccccggggcaccagcagcttccggcggtttacaagagagagcctcgcggcaatcgagaaaaggatggccgagaaacaggcacgcggcagcaccacactccaggaatccagggaagggctgccagaagaggaagcaccaagaccccagctggatcttcaggcttccaagaaactccctgatttatacgggaatcctccgcaggaactgatcggagagccgttggaggatctcgaccccttttactccacacagaagacatttatagtcctcaacaagggcaagacaatcttcagattctcggccacaaatgcgttatatgtactcagtccgttccatcctatcaggcgtgctgctgttaagatactggtccactcacttttcaatatgttgattatgtgtaccatcttaactaattgcgtctttatggcgcagcatgacccaccgccgtggacgaagtatgtcgagtacactttcaccgctatttataccttcgaaagcctggtcaagatactggcgaggggattctgtctgcacgctttcacctttctacgagatccctggaattggctggacttttccgtgatcattatggcatatactaccgaattcgtggatctcggcaacgtgtctgccctgcgcaccttccgcgtacttcgtgctcttaagacaatctccgtgataagcggcttgaaaactatcgtgggagctctcatccagtctgtgaaaaaactcgcggacgtgatggtgctgactgttttttgcctgtcagtctttgcactgattgggctgcagctctttatgggtaacctgcgtcacaaatgcgtgcggaattttaccgcactgaacggcacaaatggaagcgtggaggctgacgggctcgtctgggagagtctggacctgtacctctccgatcctgaaaattatttactgaagaacggaacctccgatgtgctgctttgcggcaacagtagcgatgcgggaacatgtccggagggctatcggtgcctgaaagctggcgagaaccccgaccacggctacacgtcatttgactcttttgcctgggcgtttctggctctctttcgcctgatgacccaggactgttgggagaggctataccaacagacccttcgctctgccggcaagatctacatgatctttttcatgctagtgatcttcctggggtctttctacttagtgaacttaattcttgctgtggtggcgatggcctacgaggagcagaatcaggcgactatcgcggagacagaggaaaaagagaaaagatttcaggaggctatggaaatgctaaaaaaagagcacgaggccctgacaatcagaggcgtcgataccgtcagccgctcgagtttggaaatgagccctctcgctccagtgaacagtcacgagaggaggtccaaacggcgcaagcgaatgagcagtggaaccgaggaatgtggagaagatcggctccccaaaagtgactctgaagatggcccacgggcgatgaatcacttgtccctcactcggggacttagccgaacatccatgaagcctagatctagccgggggagcatcttcacgtttagaaggcgcgacctgggctcagaagctgactttgccgacgacgagaactctacagcgggcgagtccgagagccatcacacatcccttttggtcccatggcctcttcgaaggacgagcgcacaggggcagcctagtcctggaaccagtgcccctgggcatgccctgcacggaaaaaaaaacagtacggttgattgcaacggagttgtaagcctgttaggggctggcgatccagaggccacttccccggggtcgcacctgctcagacctgttatgcttgagcatccccccgatactaccacccccagcgaggaaccgggtggaccccaaatgctcacctcccaagccccgtgcgtggacggctttgaagagcccggagccaggcagcgagccctgagtgctgtctccgtcctgaccagcgccctcgaggaattggaagagagtcggcacaagtgtcccccctgctggaatcggcttgctcaaaggtacctgatttgggaatgttgccccctgtggatgagcatcaaacagggggtgaaactggtggtgatggacccattcaccgatctaacaatcacaatgtgtatcgtccttaatacattgtttatggccttagaacattacaacatgactagtgagtttgaggagatgctacaggttggtaacctcgtctttactggaatattcactgcggaaatgacattcaaaatcatagcgttggacccatactattattttcagcaaggatggaacatcttcgacagcattatcgtcattctttccttgatggagctgggactgagtcgcatgtccaacctgagcgtgctgaggtccttccgcctgcttcgcgtgttcaagttggccaagtcatggcctacattaaatacattaattaagatcattggaaactccgtgggagcactcggaaatctcactctggtgcttgctattatcgtattcatcttcgcagtcgttggcatgcagttatttggcaagaactattcggaattgcgggatagcgatagtggcctgctgcctcgctggcacatgatggacttcttccacgcctttctcatcatctttagaatcctctgtggcgaatggatcgaaacaatgtgggactgcatggaggtgtctggtcaatcactgtgcttgctcgtgtttctactcgttatggtaataggtaatctcgttgtcctcaatctctttctggcattactgctctcttcttttagcgccgataacctaaccgctcccgatgaagacagggaaatgaacaacttgcaactggctttggctcgcatacagaggggactccgtttcgtgaagagaacaacatgggacttctgttgtggtcttctgcgtcagcgccctcaaaaaccagccgcactagcagcccaagggcagctcccctcatgcattgctacaccatattcccctccccccccagagacagaaaaggttccaccaaccaggaaggagacaaggtttgaggagggggagcagccaggccagggaacgcccggcgacccagagcccgtctgtgttcctatcgcagtcgccgaaagcgacaccgatgaccaagaggaggacgaggagaacagcctggggaccgaggaggagtctagcaagcagcaggagtctcaaccagtgagtggtggacccgaggcaccacctgactctagaacatggtcacaagtttctgccaccgcttcaagcgaagcagaagcctcagccagccaagcggattggcgccagcaatggaaagctgagccacaggcccccgggtgcggcgaaacgcctgaggattcttgttcggagggaagtacagccgatatgacaaacacagccgaactgctggagcaaatccctgatttggggcaagacgtgaaagacccagaggattgcttcacagaggggtgtgtgaggagatgcccgtgttgcgcagtggacacaactcaggcccctggaaaagtctggtggaggctgagaaaaacatgctaccacatcgttgaacacagctggtttgagaccttcatcattttcatgattttattaagtagtggcgctctggcttttgaggacatctacctcgaggagaggaaaaccatcaaggtgctgctcgagtatgccgataaaatgtttacttatgttttcgttcttgaaatgctattaaaatgggttgcttacggcttcaagaagtacttcacgaatgcctggtgctggctcgatttcctaatcgttgatgttagtttagtgtctctggtggccaacaccttggggttcgcagaaatgggacctatcaagagcctcagaactctccgggctttacgccccctgagggcactgtcacgatttgaaggaatgcgagtggttgtaaacgctcttgtgggcgccatccctagcattatgaacgtgttgctggtgtgtctgatcttctggctcatatttagtattatgggcgtgaatctctttgccggaaaatttggccggtgtattaatcagacagagggtgacctgcccttgaactacacaatagtaaataacaaaagccagtgcgaatctctgaacctgaccggtgagctgtattggacaaaggtgaaggtcaattttgataatgttggcgctgggtacttagccctcctgcaggttgccacattcaagggatggatggatatcatgtacgcagcagtcgatagcagagggtacgaggagcagcctcaatgggaatataacttgtacatgtacatctactttgtcatctttattatcttcggctctttctttacactcaatctattcattggggtgattatcgataatttcaaccagcagaaaaagaaactcggtggtcaggatatcttcatgacggaggaacagaaaaagtactacaacgccatgaaaaagttgggttcaaagaaacctcaaaagccaatcccccgtccccttaataagtaccaagggttcatttttgacattgtgacgaagcaggcctttgatgtgaccattatgttcctgatttgtctgaatatggtcactatgatggtggagaccgatgaccagagccccgagaaaattaatatccttgcgaagatcaacctattgtttgtggctatcttcacaggtgagtgtatcgtgaaactcgcagcgttgcgacattattacttcacaaattcatggaatatctttgacttcgtggtggtgatactgtctattgtgggtacagtcctcagcgacatcatccagaagtacttttttagtcctactcttttccgagtgatccgactggcacggattggacgcattctgagactgatccgtggcgctaagggcatccgcacactgctctttgcattgatgatgtccctccccgcactatttaatatcggcctcctgttgtttttagtcatgtttatctacagcatcttcgggatggcaaatttcgcctacgtgaaatgggaagccggcattgatgacatgttcaactttcaaacttttgccaactccatgctgtgcttgttccagattacaacatccgctggctgggatggattattaagccccatcctgaacaccggaccgccttattgtgacccaacccttcccaacagcaatggttctagaggagattgcggatctccagctgtgggcattctgtttttcacaacttacattatcatcagttttctgatcgtagtgaacatgtatattgccatcatcctggaaaacttcagtgtggctacagaggagtcaactgaaccccttagtgaagacgattttgatatgttttacgagatctgggagaagtttgaccccgaagcaacccaatttatagagtacagcgtactgagcgattttgcagatgcactctccgagccactcagaatcgctaagccaaatcagattagtttgatcaatatggatctgcccatggtctccggtgataggatccattgtatggatattttgtttgcattcacaaagagggtcctcggagaatctggcgaaatggatgctcttaagatccagatggaagagaagttcatggccgctaatccatctaaaatttcctatgagccaatcacaaccaccctgcggaggaaacatgaggaggtctcagccatggtgattcaaagggcgtttagaaggcacctgcttcagcggtcactgaagcacgcttcctttctgttccgacagcaagcggggagtgggctgtcagaggaggatgctcccgagcgagagggcctcattgcatacgttatgtcagagaatttcagtcgaccactggggcctccctcttcgagctcaatctcaagcacttccttccctccctcttatgactccgtaacgcgagctacatctgacaacctccaggtacgcgggtcagactattcgcactcagaagatctggccgactttcccccctcccctgacagggatagagaatctattgtgtag

SEQ ID NO: 205507 - DNA, 342 bp, synthetic construct
  misc_feature 1..342: note = Description of Artificial Sequence: Synthetic coding sequence
  source 1..342: mol_type = other DNA
atggcccagcacgacccccccccctggaccaagtacgtggagtacgtttccgagaacattaaactaggcaacctgtctgccctgagaacctttagggttcttagagccttaaaaaccatttccgtcataccaggtctgaagacaatagtgggtgcccttattcagagcgtgaaaaagctcgctgatgtcatggtactgaccgtgttctgtctcagcgtattcgctttgatcggccttcagctgttcatgggtaacctgcgccacaaatgcgtgcggaacttcaccgctctgaatggcaccaacggaagcgtcgaggctgacggtttggtgtgggagagctag

SEQ ID NO: 205508 - DNA, 6051 bp, synthetic construct
  misc_feature 1..6051: note = Description of Artificial Sequence: Synthetic coding sequence
  source 1..6051: mol_type = other DNA
atggccaacttcctgctgccccggggcaccagcagcttccggcggtttacccgagagtcccttgcagccatcgagaaacggatggcagaaaaacaggccaggggctccaccacgctgcaggagtctcgggaagggctccccgaagaggaagccccccgtccccagctcgaccttcaggcgagcaagaaactgcccgacttatatgggaatcccccccaagaactaattggcgaaccactggaagacctggacccattctattctactcagaaaacgttcattgttctgaataagggtaagaccattttccggttctctgccaccaacgccctgtacgtgctgtcacctttccatccaatcagacgtgcagctgtgaagatcctcgtccattctctctttaacatgcttattatgtgcaccatcctcactaactgtgtgttcatggcccagcacgatccccccccctggacaaagtacgtggaatacacgttcactgcaatttacacttttgagtccctggtgaaaattttggctcgcggattttgtctgcacgcatttaccttcctgcgagacccatggaactggttggatttctctgttattattatggcatacgtctccgaaaatatcaaattgggaaatctgagcgccttacggacctttagagtgttgagagccctgaaaaccatctctgtgatcccaggcctcaagaccatcgtgggcgcccttatccagagtgttaagaaactcgcagacgtgatggtccttacggttttctgtctgtcggttttcgcattgattggtttgcaacttttcatgggcaacctgaggcacaaatgcgtgaggaattttaccgcgctgaatggaacaaatggcagcgttgaagccgacggccttgtgtgggagtcactggatttatacctaagtgacccggaaaactatctactgaagaacggcacgagcgacgtgctcctctgtggcaactcgtcagacgctggcacctgccccgaggggtataggtgtctcaaagccggagaaaacccggaccacggctacacaagcttcgacagtttcgcttgggcctttctcgccctgtttcgtcttatgacacaggattgctgggaaagattgtatcagcagactctccgttcggctgggaagatttatatgatcttcttcatgctagtgatctttcttgggtcgttttatctggtaaatctaatactggcagtggttgccatggcctacgaggagcagaaccaggccaccattgctgagaccgaggaaaaggaaaaacgctttcaagaggctatggaaatgcttaaaaaagagcatgaagccctgaccattaggggcgtcgacacggtgtcccggagctccttagagatgagccctcttgcacccgtgaatagtcacgaacgtagaagtaagcgaagaaagagaatgagctccggaaccgaggagtgcggggaagatcggctgccaaaatctgacagtgaggacgggcccagagccatgaaccatctgtccctgactagaggactctcacggacaagtatgaaaccacggtcctcgagagggtccatattcacatttagaagaagggatctggggtctgaggctgatttcgcagatgacgaaaactcgacagcaggagagtcagagtcacatcatacctctctacttgtgccatggcctctgcgccggacgtccgctcaaggccagcctagtcccggtaccagtgcccctgggcatgctctacatgggaagaagaatagtacagtggactgtaatggagtggtctcactgctgggcgcgggggaccctgaagcaacctccccaggatcacatctgctccggccggttatgctagagcatccacccgataccaccaccccctccgaagagcctggtggaccccagatgctgacaagccaggccccatgtgtcgacggatttgaggagcctggcgccagacaaagggccctttcagctgtcagcgtgctcacttccgcactggaggagctggaagaaagccgacataaatgtccaccttgctggaaccgcctggcacagagatatctcatttgggagtgctgtccattgtggatgagcatcaagcagggcgtaaagttggttgttatggacccattcactgacctgaccataaccatgtgcattgtgctgaataccctatttatggccctggaacactataatatgacgtctgagtttgaggagatgctgcaagtcggaaatctggtgttcaccggcattttcactgcggaaatgacattcaagatcatcgctctggacccatattactactttcaacaaggctggaacatcttcgatagcataatagtgatactgtctctgatggaactcggtctcagtaggatgagcaatctttctgtcctacgaagttttcggctgctgagggtattcaaattggcgaagtcttggcccacacttaatacgcttatcaagatcattggaaactccgtcggcgcactgggaaacctgacactggttttggccataatagtgttcattttcgccgttgttggcatgcagctgtttgggaaaaattatagcgagctccgagactcagatagtggtctgctacctagatggcacatgatggacttctttcatgctttccttatcatcttcaggattctgtgtggggaatggattgagacgatgtgggattgcatggaagtgtcaggccaatcactatgtctgttggtgttcttactggtcatggtgataggaaacctggtcgtgctgaacctgttcctggcactattgctgagtagtttttcagccgataacctgacagctcccgacgaagaccgcgagatgaataatctgcaactggcgctggcacggatccaacgaggcctgcgatttgtgaagagaaccacttgggacttctgctgtggcctgctccgccagcgaccacagaagcccgctgctttggctgcacaaggacagctgccaagctgcattgccaccccttatagtcccccccccccagaaacggaaaaagtcccaccaacccgcaaagagacccggttcgaggagggggagcagcctggccagggtactcccggagacccagaacccgtctgcgtgccgatcgccgtggcggaaagcgatacagacgaccaggaggaggatgaggagaacagcctcggcacagaggaggagagtagcaagcagcaggagtcacagccggtgtcgggcggccctgaggcaccaccagacagcagaacctggtcccaggtgtctgccacagcaagcagcgaggccgaggcatctgctagtcaggcagactggagacagcagtggaaggcagagccgcaggcaccgggctgcggagaaacgccagaggatagctgcagcgagggttccacagccgacatgactaacactgccgagttgctggaacagatacctgatctaggacaggatgtgaaagatcctgaggactgcttcacggaagggtgcgtgcgccggtgcccatgttgtgccgtcgataccacgcaggcacctggcaaggtttggtggaggttgcggaaaacttgctatcacattgtggagcactcttggttcgaaaccttcataatttttatgatcctcctgtcatctggcgcgttggcttttgaggacatatatctggaagaaagaaagacgattaaggtgcttctcgaatacgccgacaaaatgtttacatacgtctttgtccttgaaatgcttcttaaatgggtagcatacgggttcaagaagtactttaccaatgcatggtgttggttagactttttaatagtggacgtgtccctcgtttcactggttgcgaacacactgggcttcgcagagatgggccctataaagtcccttaggacgctccgcgctttgaggcctctgcgagccctgtcccgatttgagggcatgcgggtggttgtcaatgcactcgtgggtgccatcccgtctataatgaatgtgctactggtctgcctcattttctggttaatattctccattatgggagtcaacttgttcgctggcaagtttggtcggtgtattaaccagaccgaaggcgatcttcctctcaattacacaattgtcaacaacaagagccagtgtgagtccttaaaccttacaggcgagctttattggaccaaggtgaaagttaatttcgacaacgtgggagccgggtaccttgctctcctgcaggtcgctacttttaagggatggatggatatcatgtatgccgcggtcgattcccgggggtatgaggaacagccccaatgggagtacaatctttatatgtatatatacttcgtcatctttatcattttcggaagcttctttacactcaatctgtttatcggggttatcattgacaacttcaatcagcagaagaaaaagctgggcggacaggatatattcatgacagaagaacaaaagaaatattataatgccatgaaaaaactgggcagtaaaaaaccccagaaaccgataccgagacccctcaataagtatcagggcttcatctttgatatcgtgactaagcaggccttcgatgtgaccatcatgttcttgatctgtcttaatatggtaaccatgatggtggagaccgacgaccagtcacccgaaaagattaatatcctggccaaaataaatctgctgttcgtggcgatttttaccggcgagtgcattgtgaaactggccgctctgagacactattactttactaattcttggaatatctttgactttgtggttgtgatcttatcaatcgttggcaccgtgttatcagacattatccagaaatattttttctccccaacactcttccgggtgatcagattggctagaatcggccgcatcctgagactgattcgcggggccaaggggatccgtacgctgctgttcgctctgatgatgagcctgccagcactgtttaacatcggcctcttgttatttctcgtgatgttcatttactcgatcttcggtatggctaacttcgcctacgtcaagtgggaggctggaatcgatgacatgtttaactttcagacctttgctaattcaatgttgtgtctctttcagatcacaacctctgcgggatgggacggtttactatccccaattctgaacaccgggccgccctattgcgatcctaccctccccaactccaatggctcaaggggagactgcggttcccccgctgttggcattcttttcttcacaacttacatcatcatttccttcctgattgtggttaacatgtacatcgccatcatcctcgagaattttagtgtggcaaccgaagaatctacggagccacttagcgaggatgattttgatatgttctacgaaatttgggagaagttcgatccagaagccactcagtttattgaatatagcgttctctcagacttcgctgacgcactgagcgaaccactgagaattgctaagcctaaccagatctccctgataaatatggatttgcctatggtcagtggcgatcgcatacattgcatggacattctcttcgcattcaccaagcgagttctgggcgagtccggggaaatggacgctctgaagatccagatggaggaaaaattcatggccgctaaccccagcaagatttcttacgagcctatcaccaccactctgaggaggaagcacgaggaagtgtccgccatggtgatccagcgggcgtttaggaggcatctgcttcagcgcagcttgaagcatgctagcttcctattcagacagcaggccggctccggactctctgaagaagacgcaccagaacgcgagggtctcatcgcctacgtaatgtcagagaacttcagtcggcccctgggcccaccttcctcatccagcatatcatctactagtttcccaccgtcctacgactccgttacccgcgccacctcggataacttgcaggtccgaggtagtgactattcgcactctgaagacctggctgacttccctccctctcccgacagagaccgggagtccatcgtgtag

SEQ ID NO: 205509 - DNA, 5997 bp, synthetic construct
  misc_feature 1..5997: note = Description of Artificial Sequence: Synthetic coding sequence
  source 1..5997: mol_type = other DNA
atggccaacttcctgctgccccggggcaccagcagcttccggcggttcactcgggaaagcctggccgccatcgaaaaaagaatggccgaaaaacaggccaggggcagtaccaccctgcaggagagtcgggaaggattgcctgaagaagaagcaccgaggcctcagctagacctgcaagcttcaaagaagctgcctgacctgtatggcaaccctccgcaggaacttataggtgagcccctcgaggatctggatcctttttattcaacacagaagacttttattgtgctgaataagggaaaaaccatttttcgctttagtgccacaaacgccctctatgtgttatcaccctttcaccccatcaggagagccgccgtaaagatattggtgcactcactgttcaatatgttaatcatgtgtaccattctgactaattgcgtgtttatggcccagcacgaccctcctccttggaccaagtacgtggaatacacttttacagcgatttatacctttgagtctctcgtcaagattctggcacggggcttttgtctccacgcttttaccttcttgagagatccgtggaattggttagacttctccgttataataatggcctacgtcagtgagaacattaagcttggaaatttgtccgccctccgtacctttcgcgtcctgcgcgccctcaaaaccatctctgtgataccgggactgaagactattgttggagccctgattcaaagtgtgaaaaagctagcagacgtgatggtactgacggtgttctgcctcagcgtcttcgctcttattggactgcaactgtttatgggaaatctccgtcataaatgtgtgaggaattttacagctctcaacggtaccaacggcagcgtggaggcagatggtctcgtgtgggaaagtctcgatttgtatctatctgatccggagaactatctcctgaagaacggcacctctgacgtcctgctttgtggtaatagtagcgacgccggaacgtgtcccgagggttatcgatgtctgaaagctggggaaaaccccgatcatggatatacctcctttgactcattcgcctgggcattcctggctttatttcgcttgatgacgcaagactgctgggagagactctatcagcagaccttacggtccgccgggaaaatttatatgatcttctttatgctagttatattcctcggatccttctatctggtgaatctaatccttgccgtggtggctatggcctacgaggagcagaatcaagccaccatagccgagactgaagaaaaggaaaagcgttttcaagaagctatggagatgctgaagaaggaacatgaggccctgactatacgcggagtggacactgtgtcaaggagtagtctcgaaatgtctcctctcgcaccagtaaactcccacgagcgtcgcagtaaacgtagaaagcggatgtcttcggggacggaggagtgcggggaggaccgccttccgaagagtgattcagaagacggcccaagagcaatgaaccacctgtccctgaccaggggtctgagtcgaacgtctatgaagcctaggtcttcaaggggctctatattcacattcagacgcagagatttaggcagcgaggccgactttgcagacgatgagaactcaactgccggcgaatcagaaagtcatcacacaagcctgctggttccatggcccctgcgccgcacttctgcccagggacagccaagtcccggcacaagcgctccagggcatgccctgcacggaaagaagaactctacagtggactgcaatggggtggtctccctcctgggagccggtgacccagaggccacttcccccgggtcccatctgctgagaccggtgatgttggaacatccaccagacactaccactcccagcgaggagccaggtggaccccaaatgttaacatcccaagccccgtgtgtcgacggcttcgaggagcccggggcaaggcagagggcgttatctgcggtttcagttctgacgtcagcactggaggaacttgaagaaagtcggcacaaatgcccaccctgttggaaccggctagcacagagatatctgatctgggaatgttgtcccctgtggatgtccatcaaacaaggggtcaaactggtggtaatggaccccttcactgacctgaccattaccatgtgcatcgtgcttaataccctgtttatggctctggagcactataacatgacgagcgagtttgaggagatgttacaagtgggaaacctcgtctttacaggaatcttcaccgccgaaatgacattcaaaatcatcgcattagacccatattattacttccagcagggctggaacatcttcgattccattattgtgattctctccttaatggaattaggtctctcccggatgtcaaacctctccgtgctgagatccttcaggttgctcagagtatttaaactggcaaaatcctggcccacactgaacaccctaatcaagatcataggcaactctgtgggggccttgggcaacttgacattggtattggcaatcatcgtgtttatctttgccgtggtcggaatgcagctgttcgggaaaaattattccgaactcagggacagtgactctgggctattgccaaggtggcacatgatggacttttttcatgcattcctcatcatatttcgaattctgtgcggcgagtggatcgagactatgtgggattgtatggaggtgagcggtcagtcgctctgtctgctggtctttctcttagtcatggtaattggaaatctcgtggtcctgaatctgtttttagccctgcttctgtcttctttctccgccgataatctgacagcgcccgacgaggatagagagatgaacaatctgcagcttgctctggctagaattcagagaggcctgcggttcgtgaagagaactacatgggatttctgctgtggtctcctgcgacaaaggccacagaagccagccgctctggcagcccagggccaactgccgtcatgcatcgccactccctactctcccccgcctcccgagactgaaaaggtgcccccgactcgtaaggagacaagattcgaggagggggaacagcctggtcaaggaacccctggagatcctgagccggtctgtgtcccaatcgcagtggccgagtcggataccgacgaccaagaggaagacgaggaaaacagcctcggcaccgaggaggagtcttcaaagcaacaagaatctcagccagtgtccggcggcccggaagcaccacctgattcacggacgtggtcacaagtgtcagcaactgcctcgagcgaggcagaagcttccgcgtctcaagcagactggcgccagcagtggaaggccgagcctcaggctccagggtgtggggagacccctgaagattcttgttccgagggatctacggccgatatgaccaatacagccgaactgctggagcagattccggacctcggacaggacgttaaagatcctgaggactgctttacagaagggtgcgtccgccgctgtccatgttgcgcagtggatactacacaggcaccagggaaggtgtggtggcgcctgagaaaaacctgctaccatattgtggagcactcttggttcgaaaccttcatcatttttatgatcttactcagtagcggcgccctggcgtttgaggatatctacctggaggaacgaaaaacaattaaggtacttctggagtatgcggacaagatgtttacatatgtattcgtactagagatgttgctaaagtgggtggcgtacgggtttaaaaaatacttcaccaacgcgtggtgctggctagacttcttgatcgtggatgtctccttagtgtcactcgtggcgaatacgttgggttttgccgagatgggccccatcaagagcctccggactctccgtgcattgagacccttgcgtgctcttagtagatttgagggaatgcgcgttgtggtgaatgcccttgtcggggcaattccttctattatgaacgttctcctggtctgtttgatcttttggcttattttttccattatgggagttaacctgtttgcaggcaagtttggaaggtgcattaaccaaacggagggcgatctgccactaaattacaccatagtgaacaacaaatcacagtgcgagtctctgaacctgaccggagagttgtactggactaaggtcaaagtgaatttcgataatgtcggagctggttacttggctctgctccaggtctacgaagaacagccccagtgggaatacaacttgtacatgtacatatacttcgtgatttttattatcttcggttctttcttcacattaaatctgttcattggggtgattattgacaatttcaatcagcaaaaaaaaaagttgggcggacaggatattttcatgactgaagagcaaaagaagtattacaatgccatgaaaaagctgggttctaaaaagcctcagaagcctattccccggcctctgaataaatatcagggtttcatttttgacatcgtgaccaagcaggcgtttgacgtcactatcatgtttctgatctgtctgaatatggttactatgatggtggagactgacgatcagtcacccgagaagattaatattttagcaaaaatcaatctactgtttgtcgccattttcactggcgaatgtattgtgaaactggccgcccttcggcattactatttcaccaattcatggaacatctttgatttcgtggtggtgatcttatcaattgtgggcactgtactcagcgatattatccaaaaatactttttctctcccacgctttttcgggtaattagactcgccaggattggaaggattctgcgtctgatcagaggtgccaaaggcatccggaccttgctgttcgccttaatgatgagcctaccagcactttttaatatcgggctgctgctgtttttagttatgttcatatatagtatcttcggcatggctaatttcgcctacgtcaaatgggaggcggggattgacgatatgtttaatttccagaccttcgccaactccatgttatgtctcttccagatcactacctccgcaggctgggatggcttgctaagtccaatccttaacactggaccaccctactgcgatcctacactacctaactctaacgggtcccggggggactgtgggtctcccgccgttggcatccttttctttaccacgtacattataattagttttctgatcgtggttaatatgtacattgcaatcattctagagaactttagcgtcgctacggaggaaagcacagagcccctttccgaggatgattttgacatgttctacgaaatctgggaaaagtttgatccagaggcaacacagttcatcgaatattcagtgttgtcagactttgctgacgcgctgagcgaacccctccgaattgctaaacccaaccagatcagcctgatcaacatggacttgccaatggtctctggagaccggatccattgtatggacattctctttgcctttacgaagcgcgtactgggggagtccggtgaaatggacgcattgaagatacagatggaagagaaattcatggccgccaacccatccaagataagctacgaacctattaccaccaccttgagacgtaagcacgaagaggtatctgccatggtgatccagcgggcgttccggcggcatctgctgcagcggtctctgaaacacgctagcttcttattcaggcagcaggccggctcaggcctatctgaagaggatgcacccgaaagagaagggctcatagcgtatgttatgtctgagaatttctcccgaccattgggcccccctagttctagctctatctcaagcactagtttcccaccctcctacgacagcgtgacgcgcgccacaagcgacaatttacaggtgcgcggatcagactatagccattccgaggacctggccgattttccccccagtcccgatcgtgatcgagagagtatcgtctag

SEQ ID NO: 205510 - DNA, 6048 bp, synthetic construct
  misc_feature 1..6048: note = Description of Artificial Sequence: Synthetic coding sequence
  source 1..6048: mol_type = other DNA
atggccaacttcctgctgccccggggcaccagcagcttccggcggttcacacgtgaatcgctggccgccattgaaaaaagaatggccgagaaacaggctcgcggaagcaccaccctacaagagagtcgcgaagggcttccggaagaggaggcacctaggccacaattggacctgcaggcctctaagaagctccccgacctctacgggaatccccctcaagagcttatcggcgaacctttggaagacctggaccccttctatagcactcagaaaacatttattgtcctgaataagggcaagaccatcttcaggttcagtgctactaatgccctgtacgttctgagtccttttcaccccatccgccgagccgcagtcaagatcctggtgcactctttgtttaatatgctgattatgtgtactatcctcacaaattgtgtgttcatggcacagcatgatcctcctccctggactaaatacgtggagtatacctttacagctatctacactttcgagtcactggtaaaaatcctcgcacggggcttttgcctgcatgccttcacatttctgcgagacccttggaactggttggacttctcggtgattattatggcctacaccaccgagttcgttgatttaggcaacgtttctgctcttcgcacattcagagtcttgcgggccttaaagacaatcagcgttatttcaggattgaaaactattgtgggagcactgattcagtctgtgaagaagctggccgatgtcatggtgctcaccgtgttctgtctgtctgtgtttgctctcatcggtttacagctcttcatgggtaacctgcgacataaatgcgtccgaaattttaccgctctgaatggaaccaacggcagcgtggaggcagacggactcgtttgggaatccctggatctgtatctaagcgatccggaaaactacctcctcaagaatggaacatctgatgtactcctttgtggcaacagttctgacgccggcacttgccctgaagggtaccggtgtctgaaggcaggcgagaacccagaccacggctacacctcgttcgattcatttgcctgggcctttctggccctgttcaggctgatgacccaagattgctgggaacggctctatcaacagactctacgctccgccgggaaaatttacatgatctttttcatgttggtgattttcttgggatctttctatctagtaaacctaatccttgctgtggtggctatggcctacgaggagcagaatcaggcaactattgctgaaacagaggaaaaggaaaaacggttccaagaggcaatggaaatgttgaaaaaggagcacgaagcactgactatccggggagttgacacagtgagtcgcagcagcctggaaatgagtcctctcgcccccgttaattcccatgagaggcggtccaagagacggaagcggatgtcatcgggcacggaggagtgcggagaagatcggttacccaaatccgatagtgaggatgggcctcgtgcaatgaatcatctgagtctgactcggggattgtccaggacatccatgaagcccagatcatctcgtggaagcatctttacattcagacggagggatctcggttccgaggccgacttcgctgacgacgagaactccaccgctggagaaagcgaaagccaccatacctccctcctcgtgccttggcctctgcggaggacatcagcacagggacagcctagtccgggtaccagtgctcccggccacgccttacacggcaagaagaattctacagtggactgcaatggcgtcgtctcactgctgggtgctggcgatcccgaagccacttctccggggagtcatttactgcgccccgtgatgcttgaacatccccctgatacaactacaccttctgaggaacctggagggccccagatgctcacatctcaggctccatgcgtcgacggctttgaggagcccggggccagacagcgggcattatccgcggtgtctgtgctaacctcagctctggaagaactcgaggaatctaggcacaagtgtcccccatgttggaatagacttgcccaacggtacttaatctgggagtgctgcccactgtggatgtcgattaaacagggggtgaagcttgtggttatggacccttttaccgacttgacgatcacaatgtgtattgtcctgaacaccttgtttatggcattagaacactacaatatgaccagtgagtttgaagagatgttgcaggtaggcaacctcgtgtttactggaatcttcaccgccgagatgacctttaaaataatcgccctggacccatattattacttccaacagggctggaatatttttgattcaatcatcgttattctttccctcatggaactagggctgagtaggatgtcaaaccttagcgtgctgagatcgttcagactgttaagggtttttaagctcgcaaaaagctggcccacattaaatactctaatcaaaattataggaaactcagttggcgcacttggcaacctaaccctggtgctcgcaattattgtattcatatttgcagttgtgggcatgcagctgtttggcaaaaattacagtgaactgcgggattcagactccggccttttgccacgctggcatatgatggacttcttccatgcctttctgatcatctttcggatactgtgtggcgagtggattgagactatgtgggactgcatggaggtttcaggtcagtcactctgtctcctggtttttttgctggtcatggtgataggaaatctggtcgtgttgaacttatttctcgcactccttttaagttctttcagcgccgacaacctcacagcccctgacgaagatcgcgaaatgaacaacctccaattggctctggcacgcattcaacgagggttacgatttgtcaagcgcacaacatgggacttctgctgtgggctcttgcgtcagagaccccagaaacctgccgctttagctgcccagggccagcttccgagctgcattgccacaccttacagccccccccctcccgagacagagaaggtgcctcccacccgaaaagagactcggttcgaagagggagaacaaccgggccagggaacacctggggaccccgaaccagtgtgtgttcccattgccgtggctgaaagcgacacggatgaccaagaagaagacgaggaaaatagcctcgggacagaggaagaaagcagcaagcaggaaagtcagccagtgtctggtgggccagaagctccccccgactcgcgaacatggtcgcaggtgtccgctaccgcatcttcggaggccgaagcaagtgcttctcaggctgactggcggcagcagtggaaggcggaaccacaagctcccgggtgtggagaaactcccgaagatagttgcagtgagggttctacggccgacatgacaaatacagctgagttgctggaacagattccagatctcggacaggatgtaaaagatccagaggattgcttcaccgaagggtgcgttagaaggtgtccatgctgtgcagttgataccactcaggcgcccggcaaagtgtggtggagactccggaagacctgttatcacatcgtggaacacagttggtttgagacatttatcatattcatgatcctgttgagttccggagcactggcttttgaggacatttacctggaagaacggaagactatcaaagtcctgctggaatacgcagataaaatgttcacctacgtgttcgtcctggagatgcttcttaagtgggtggcgtacggctttaaaaagtactttactaatgcttggtgctggctggacttcctaattgtcgatgtctctctagtgtcacttgtcgccaacacgctagggttcgctgagatgggaccaatcaagagccttcgcaccctgcgtgctctcagacctttgagggctctgagtcgctttgaaggaatgagagttgtagtgaacgctctggtcggcgccattccctccattatgaacgtcctcctggtgtgcctcatcttttggctgatcttcagcatcatgggtgtgaatttgttcgctggaaagtttggcaggtgcatcaatcaaactgaaggagatctgcccttaaattatactatcgtgaacaataaaagccagtgcgaaagccttaacctcacaggagaactgtattggacgaaagtgaaggtaaattttgacaatgtgggagccgggtatctcgctttactgcaggtcgcaacttttaaaggttggatggacatcatgtatgcggctgtagactcacgcggatacgaagagcaaccacaatgggaatataacctctacatgtacatttatttcgtcatttttatcattttcgggtcgttcttcacactgaatttattcatcggggttattatcgacaacttcaaccagcagaaaaaaaaactgggtggtcaggacatctttatgactgaggaacagaagaagtactataacgcgatgaaaaagctgggctctaagaagcctcagaaacccattccccgtcccctaaacaaataccagggcttcatttttgatatcgttaccaagcaggccttcgatgtcactatcatgtttcttatttgcctgaacatggtcacaatgatggtggaaacagacgatcagtctccagaaaaaatcaacatccttgccaagataaaccttctcttcgtggccatcttcacgggagagtgtatcgttaagctcgccgccctccggcactactatttcacgaactcctggaatatctttgactttgtggtcgtgatccttagtatcgtgggaactgtcctctcggacatcatccaaaaatacttctttagccccacactgtttcgagttattaggcttgccaggataggaaggattcttaggttgattcggggggctaaaggaattcggaccctcctatttgccctgatgatgtccctaccagcactgtttaacatcgggctcctgttatttttagtaatgtttatctattcaatcttcgggatggccaatttcgcctacgtgaaatgggaagccggcatcgacgacatgttcaattttcagaccttcgctaacagtatgctctgcctctttcagataaccacttctgccggatgggatggcctactgtctcccatcctgaacactggccctccatattgcgatcccactctccctaattctaatggtagcaggggggactgtggcagcccagcagtgggcatcttgttttttactacatatatcattatctcatttctcatagtagtgaatatgtatattgcaataatcttggaaaacttcagcgtagcaactgaagagagtacagaacccctgagcgaggacgactttgacatgttctacgaaatatgggaaaagtttgatccagaggctacacagttcattgagtactccgtgctctcggatttcgcagatgcactcagcgaacctctccgcattgcaaagccaaaccagatatcgctgatcaacatggatctgccaatggtgagcggcgaccggatacactgcatggacattctgttcgcttttaccaagcgggtgctgggcgagtcaggggagatggacgccctaaagattcagatggaagagaaattcatggccgcgaatccatcaaagatttcttatgagccaattactaccaccctgcggcggaagcacgaagaggtctcagccatggtgattcagcgggcattcaggagacacctgttacaacggagcctgaaacacgcttcttttcttttcaggcagcaggctggttcgggactttccgaggaggatgccccagagagggaaggacttattgcttacgtgatgtcagaaaactttagccgaccgctggggcctccgagcagctcaagcatcagcagtacctccttcccgccatcatacgacagtgttactcgtgccacatccgataacctgcaggtccgcggtagtgattactcccattccgaagatctggcggactttccccctagccccgatagggacagagagagtatagtttag

SEQ ID NO: 205511 - DNA, 5997 bp, synthetic construct
  misc_feature 1..5997: note = Description of Artificial Sequence: Synthetic coding sequence
  source 1..5997: mol_type = other DNA
atggccaacttcctgctgccccggggcaccagcagcttccggcggtttacacgggaatccctggccgctatcgaaaagcgcatggcagagaagcaagcgagaggatctacaactctccaggagtcccgggagggcctgcctgaagaagaggccccacgcccccagcttgacctccaagcctccaagaaacttcccgatctctatggtaatccaccgcaggaactgattggggaacctctggaggacctcgaccccttttattctacacagaaaacgtttattgtcctcaataaagggaagaccatatttcgatttagtgcaacaaacgccctgtatgttctgagcccttttcatccaatacggcgggccgccgtaaagatactggtgcactctctgtttaatatgctcatcatgtgtaccattctgaccaactgcgtgttcatggcacagcatgatccaccaccttggaccaaatacgttgagtacactttcactgcaatctacacctttgaatcactggtgaagatcctcgccagggggttctgcctgcatgctttcacctttctgcgggacccttggaactggctggacttttcagtgattattatggcttacgtatcagaaaatattaagttaggaaatttatcagcactccgaacgtttcgagtgttgcgcgcacttaagacaatctcagtaattcccgggctaaagaccattgtaggagcactgattcagagtgtgaagaaattggctgacgttatggttctcaccgtgttttgcttgtccgtctttgctctgatcgggctgcaactctttatgggaaaccttcgacacaaatgcgtgcgaaactttacagcactgaacggtactaacggaagcgtggaggctgacggtttggtatgggaaagcctggatttgtacctgagcgacccagagaattatctacttaaaaatggtacttctgacgtcctgctgtgtgggaactcctcagatgccggaacctgccccgagggttacagatgcctgaaggctggggaaaatcccgatcacggctacacgagttttgacagttttgcctgggcctttctcgctttattccgccttatgacccaggactgttgggagcggctctatcagcagacgttacgtagcgccggcaagatctatatgattttctttatgttggttatctttctaggttccttttatctcgtgaatctgattctagcagtggtggcgatggcatatgaggaacagaaccaagctacaatcgcggaaaccgaggagaaagaaaagcgattccaggaggctatggaaatgcttaagaaagagcacgaagcactgaccattaggggagtggacacagtgtctagatcctccctcgagatgagccccctggccccagtcaacagccacgagcgcaggtcaaagaggagaaaacgcatgtcgtctgggaccgaagagtgcggggaggaccgcctgcctaaatctgatagtgaagacgggccaagagccatgaaccacctttcccttacccgcggactcagccgcacctcaatgaaaccaagaagttcccgtggcagtatctttactttccggaggcgcgacctgggatcggaggcagactttgctgacgatgaaaactccacggccggcgaaagcgagagtcatcacaccagcttgctagtcccttggccactgcgcaggacaagtgcacagggccaacctagccccggaacctctgcacctgggcacgctctccacggcaaaaaaaattctaccgtcgattgcaacggggtagtgtctttgctgggcgccggcgatccggaggccacgtcaccggggtcacatctgctcaggccagtcatgttagagcacccgcccgacacaaccacgcctagcgaggagcctgggggccctcagatgcttacgagtcaagccccctgtgtggatggatttgaggagcctggggctcgacaacgcgcactctccgctgtaagcgtgctgacttcagccctggaggagttggaagaatctaggcacaagtgtcctccttgctggaaccgcctcgcccagagatacctcatctgggaatgttgtccactctggatgagcattaagcagggtgtgaagctcgttgtcatggatccctttacagatctgaccataacgatgtgtatcgtgttgaatactctctttatggcgctcgaacactataatatgacttccgaattcgaggagatgttacaggtcggcaacctggtgttcaccgggatctttactgctgagatgacctttaaaattatcgcactggacccatattactactttcagcaaggctggaacattttcgacagtataatcgtgatcctgtcactgatggagttgggactgagcaggatgtccaatctatctgtgctgcggtccttccgcctgttgcgcgttttcaagttggcaaagtcttggccgacgttaaatacgttaatcaagattataggcaactctgttggtgctttaggaaatctcactctggtgctcgccattattgtctttattttcgcagtcgtaggaatgcagctgttcggaaagaattattcagaattacgggacagcgattctggcctgttgccccgctggcacatgatggatttcttccacgcatttttgattatctttcgcattctgtgcggcgagtggattgaaaccatgtgggactgtatggaggtctcgggtcagagcctgtgcctgctggtctttctactggtcatggttatcggaaacttggtggtgctgaatctcttcctggctctgctgctgagctcatttagcgctgataatctcaccgcacccgacgaagatcgagaaatgaacaacctccaacttgctcttgccaggattcagagaggcttgaggttcgtgaagagaactacatgggatttctgttgtggtctcctgcgccaaagaccgcagaaacctgccgctctcgctgcgcagggccagctgccttcctgcatcgcaaccccctactctccccctcctcccgagactgagaaggtgccccctactcggaaggaaaccaggttcgaagaaggcgaacagcccggccaaggcaccccaggtgaccctgagcctgtctgcgtgcctattgccgtcgctgagtctgacactgacgaccaggaggaagacgaggagaacagcttagggacagaagaggaaagctctaagcagcaggaatcccagcctgtgtctggtggtccagaggccccaccggacagtcggacctggtctcaggtgtcggcaactgcctcttctgaggccgaggccagcgcctctcaggccgactggcggcagcaatggaaggcagaaccacaggcccccggctgtggcgagactcctgaggacagttgctctgagggctctaccgctgacatgaccaacacagcagagctgctggagcaaatacccgatcttggacaagacgtgaaagacccagaggattgcttcactgaagggtgcgtgcgccgttgcccctgttgtgccgtcgataccacacaggcaccagggaaggtctggtggagactacgaaagacttgctatcatatcgtcgagcatagttggttcgaaacctttattatcttcatgattctcttgtccagcggtgctttggctttcgaggatatataccttgaggagcggaagacaataaaagtgcttctagagtacgctgataaaatgttcacatacgttttcgttctggaaatgttgttgaagtgggtggcctacgggttcaaaaagtacttcaccaacgcatggtgctggctcgatttcctcattgttgacgtctcactagtgtccctagtggccaacactctgggcttcgcggaaatgggccctatcaagtctcttaggaccctgcgcgccctcaggcccctgcgcgcactgtcccgcttcgaagggatgagggtcgtagtaaatgcactggtcggggccataccatctataatgaacgtgctgctggtgtgtttgatcttctggctcatattctccatcatgggtgtaaacttatttgcaggcaagttcggccgctgtataaatcagaccgaaggcgacctgccactcaattatacgatagtcaacaacaaatcacagtgcgagagtctgaatctaactggcgagctatactggacgaaagttaaggtaaatttcgacaacgtcggcgcgggctacctggccctgctgcaggtctacgaggagcagcctcagtgggaatataacctgtatatgtacatatatttcgtgatcttcattatttttggctctttttttacactcaacttgttcattggtgtgattatcgacaacttcaaccaacagaagaagaaactcggagggcaggacatctttatgacagaggaacagaagaagtactataacgcaatgaagaagttgggctccaagaaaccccagaagccaatcccgcgccctctgaataagtaccagggattcatcttcgatatagtgacgaagcaggcctttgatgtgacaatcatgtttttaatctgcctgaatatggtaaccatgatggtcgaaacggatgatcagtcccccgagaagataaacatactcgccaaaataaacctgctattcgttgccattttcacaggggagtgcatcgtcaaacttgcagccttgcgccactattacttcaccaattcatggaacatctttgacttcgtagtggtgatcttgtcaattgtgggcaccgtgctatctgacattatccaaaaatatttcttttcacccacgttgtttcgcgtgatacgcctggcccgcattggtagaattctgcggctcattcggggcgcaaaaggcatcagaacactgctgttcgcattaatgatgtcactccctgctctgttcaacattggcctcctgttatttctggtcatgttcatttactccattttcggaatggcaaacttcgcctacgtcaaatgggaagcaggcattgatgatatgttcaatttccaaaccttcgcgaatagcatgctttgtttatttcagattaccacaagtgcaggctgggacggcttgctctcgcccatactgaataccggccctccttattgcgacccgacgcttccaaattccaatgggagccgcggagactgcgggagccctgctgtggggatcctgttctttaccacctatataatcatctcttttctcatcgtagtgaacatgtatatcgcaattatcctggagaatttcagtgttgccacggaagagtctaccgagccacttagcgaggatgactttgatatgttctatgagatatgggaaaaatttgatcctgaagcaacccaattcattgaatatagtgtgctgagcgactttgctgatgccctgtctgagcctctgcggatagctaagcccaaccagatctccctcataaatatggacctccccatggttagcggagatagaatacactgcatggacatactattcgctttcactaagcgagtcctgggagaatccggcgagatggacgccctgaagatccagatggaggaaaaattcatggcggccaatccgtctaagatatcttatgaacctatcacaaccacactccgtcggaaacacgaagaagtgtcggccatggtgattcagcgcgcatttagacggcacctactgcagcgctcccttaaacacgccagcttcttgttcaggcagcaggcgggctcaggactgtccgaagaggacgccccagaaagggagggcttgattgcttacgtgatgtcagagaacttctctagacccctgggtccacccagctcctcatccatttcatctaccagttttcccccaagttacgatagtgtgacccgagcaactagcgacaacctccaagtcagagggtccgactattctcactcagaggatctcgcggatttcccaccgagccccgatagagatagggagtccatcgtgtag

SEQ ID NO: 205512 - DNA, 6048 bp, synthetic construct
  misc_feature 1..6048: note = Description of Artificial Sequence: Synthetic coding sequence
  source 1..6048: mol_type = other DNA
atggccaacttcctgctgccccggggcaccagcagcttccggcggtttacccgggagtcgctcgcggccatagaaaaaaggatggctgagaagcaggcacgcgggagcacaacattgcaggaatcacgggaaggattgcctgaagaggaagccccccgccctcaattggacctgcaagcttctaaaaaactccctgatctctatggtaaccctccccaagaacttattggcgaacctctggaggatcttgatcctttttattctacccaaaaaacttttattgtgctgaacaagggtaagaccatctttaggtttagcgcaacgaatgccttatacgtcttaagcccgtttcatccaatccgcagggctgcagtcaaaatcctggtacacagtcttttcaatatgttgattatgtgcacaattttaaccaactgtgtttttatggcgcaacacgacccccctccgtggacaaaatatgtagaatatacatttactgccatttacacgttcgaatccttggtcaaaattctcgcacggggtttctgtctgcacgcttttacgtttctcagggatccttggaactggctggacttctccgtaatcattatggcctataccacggagtttgttgacctagggaatgtgtcggctcttagaacattccgcgtgctacgtgctcttaaaaccatcagtgtcatctctggcctgaagacaatcgtgggagctctgattcagagcgtgaaaaaactcgcagacgtgatggttctgacagtgttctgtctgtctgtgtttgcactgattggactgcagctattcatgggcaatctgcgccacaaatgcgtgagaaactttacggccctcaatggaacgaatggttctgtagaggctgacggtcttgtctgggagtctctggacctgtacctgtccgatcctgaaaattatttgctgaaaaatggaacaagcgatgtactcctatgtgggaacagttcagacgccggcacgtgcccagagggttatcggtgtctgaaagctggggaaaatccagaccatgggtacacaagctttgacagcttcgcctgggcctttctcgccctcttcaggctgatgacccaagattgttgggagcggctctaccagcagacattacggtctgcaggcaaaatttatatgattttctttatgctagtgatttttcttggcagcttttacttggtcaatctaatcctggccgtcgtcgccatggcctatgaggagcagaaccaggccacgattgccgagactgaggaaaaggagaaacgcttccaagaagccatggagatgttgaagaaggagcatgaggctttgacaatacgcggcgttgataccgtgtcaagatcctccctggagatgtctccgctggccccggtgaactcccacgaacggcgttcaaagcgtaggaaacggatgagttcaggcacggaggagtgtggagaggatcggctccctaaatcagattctgaggatggaccgcgagcaatgaaccatttgagtctaacgaggggcctcagtagaacaagtatgaaacctagatcaagtcggggatccatattcacatttcgcagacgagatctggggtcagaggccgacttcgcagatgatgagaacagcaccgcgggcgagagcgaaagccatcacacgagcctgctcgttccgtggcctctgcgaagaacaagcgcccaagggcagccttcacctggtacaagcgcccccggacacgcgcttcatgggaaaaaaaattcgacagtggattgtaacggcgttgtgtctcttttaggcgccggtgatcccgaggccacatcgcccgggagccacctgctccggcctgtcatgttggaacacccgccagatactacaacgccttccgaggaacctgggggaccacagatgctgacatctcaggcgccttgcgtggacgggttcgaagagcccggggcacggcagcgagctctctctgccgtgagcgttctgacttctgcgctggaagagttagaggagtcaagacataagtgtcccccatgctggaatagattagcgcagcggtatctgatatgggagtgctgcccgctctggatgagtattaaacagggcgtcaaactcgtggtcatggaccctttcaccgacctgacaatcacaatgtgtatcgtcctcaacacactgtttatggcactggaacactataacatgacctcagagtttgaggagatgttacaggtggggaacctcgtctttacaggcatatttactgccgaaatgacctttaagattatcgccctcgacccatactattactttcaacaaggatggaatatcttcgacagcattatcgtaatcctgtctctgatggaactgggactaagcaggatgtccaatctctccgtcttgcggagctttcgtttactgagggtgttcaagcttgctaaaagttggcccactctgaataccctgattaagatcatcgggaatagcgtgggcgctcttggtaatttgaccctggtgttggctatcatcgtgttcatttttgccgtggtcggtatgcagctgtttggaaagaactactcagaattgagagacagtgattccggcctcctgcctcgatggcacatgatggatttttttcacgcctttctcatcatcttcaggatactgtgcggggaatggatcgagaccatgtgggactgcatggaagtcagtggacagtcactctgtctgctcgtttttctgctggtaatggtcattggtaacctggtcgtattgaacctgttccttgccctcctactcagttcattctcagcagataatctgactgcccccgacgaagatcgcgagatgaacaacttacagcttgctcttgctcgaatccagcggggtttgaggttcgtgaaaagaaccacatgggacttctgttgcggcctgctgcgacaacgtccacagaaaccagccgcgttagctgcccagggccaactcccctcttgcatagcaacaccttacagcccgcccccaccagagaccgaaaaggtgcctccaaccaggaaggaaacaagatttgaagaaggagagcagcccggacagggtacacccggcgatcccgagccagtttgtgtcccaatagcagtcgctgaaagcgataccgacgaccaggaggaagacgaggagaacagcctcggcactgaggaagagtcaagtaaacaggagagccagccggtgtctggcgggccagaggcaccacctgatagtcgaacctggtctcaagtatctgcgactgcctcctccgaagcagaggctagtgctagtcaggcagattggagacagcaatggaaggcagagcctcaggctcccggctgcggtgaaactcctgaagattcttgttctgaggggagcactgcagacatgaccaataccgcagagctactcgagcagattccggatctggggcaggatgtgaaggatcccgaggactgcttcactgaaggttgtgtgagacgatgtccatgttgtgccgtcgatacaactcaggcacctggtaaagtgtggtggcgcctgcgtaaaacatgttaccacatagtggagcattcctggttcgagacgtttatcatattcatgatcctcctatctagcggcgcacttgccttcgaggatatctatctggaggaacgtaagacgattaaggtgctactggagtacgcagataaaatgtttacatacgtctttgtgcttgagatgttgctgaaatgggtggcttacggttttaaaaagtacttcacgaacgcctggtgctggttggactttttgatcgtggatgtctcgctcgtcagcctggtggccaacacactgggatttgcagaaatgggacccattaagtccttacgtacccttcgagcactgaggccgctcagagccctgtctagatttgagggcatgcgggtggtggtcaacgccctggttggggccatccccagtatcatgaacgtgctcctggtttgcctgattttctggttgatattctctattatgggggtcaacttattcgcaggaaagttcgggcggtgtatcaatcagacggagggagatctcccattgaactataccatcgtgaacaataagtcccagtgcgagtctttgaaccttacaggcgaactatattggaccaaggtgaaagtgaacttcgacaatgtcggagccggctatctagccttgcttcaggttgccaccttcaaaggatggatggatatcatgtacgccgccgttgactctcgggggtacgaggaacaaccacagtgggaatataatctctacatgtacatctacttcgtcatctttattatatttgggagcttttttactttgaatctgtttattggagtaattatcgacaactttaaccagcaaaaaaaaaaattgggaggtcaggacattttcatgactgaggagcagaagaagtactacaatgccatgaagaagctggggagcaaaaagcctcagaaacccatcccaagaccgctgaacaaataccaagggttcatttttgatattgtaactaaacaggcttttgatgttaccataatgtttcttatttgcctgaacatggttacaatgatggtggagacggacgatcagagccccgaaaaaattaacatactggccaagataaacctgctgttcgtagcaatcttcacaggcgagtgtatcgtcaagcttgcagctctacgtcactactacttcacaaatagctggaacatattcgacttcgtcgtggtgattctttctatcgttgggaccgtgctgtcagatatcatccaaaaatactttttttcccctactctgtttcgtgttattaggctcgcacggatcggccgcattctgcggcttatccgcggcgcgaaaggtatcaggactctgctttttgctctcatgatgtcacttcctgcgctttttaacattgggttactcctttttcttgttatgttcatctattccatcttcggcatggcaaactttgcctatgtcaagtgggaagccggcatcgacgatatgtttaatttccagacctttgccaacagcatgctttgcctgtttcagatcacaaccagtgcgggctgggacgggctcctgagccctatcctcaataccgggccaccatactgtgaccctaccctgcctaattcaaatggatctcggggtgactgcgggagtccagctgttgggatcctgttttttacaacatatatcattatttcattcttgatagtcgtaaatatgtacatcgccataatccttgagaacttcagcgtggcaacagaggagtcaaccgagcccctatcagaggacgatttcgacatgttctacgagatctgggagaagtttgacccagaggcaacacagttcattgagtacagtgtgttatcagacttcgccgatgctctcagcgaacctctgcggatagctaagcccaaccagatctctctgattaacatggacctgcctatggtgtctggcgaccgtatccactgcatggacatcttgttcgcttttaccaagcgtgtactgggagaatcgggcgagatggacgccctgaagatccagatggaggaaaaattcatggctgcaaatccctctaaaatatcttatgagcccattacaaccacgctgcgcagaaaacatgaggaagttagcgcaatggttattcagcgcgcctttcgcagacacctgctgcaacggtccctgaagcatgcctcatttctgtttaggcaacaggcgggctcgggactgtcagaagaggacgcccctgaacgcgagggactgattgcatatgtaatgtctgaaaatttttctaggccgctaggaccaccaagctcctccagtatctccagcacatcttttccaccatcctatgatagcgtgacgagagcaacctctgacaatctgcaggtgagaggttctgactattcccactctgaggatctggcggacttcccaccgagccctgatcgagatcgggaatccatcgtatag

SEQ ID NO: 205513 - DNA, 5889 bp, synthetic construct
  misc_feature 1..5889: note = Description of Artificial Sequence: Synthetic coding sequence
  source 1..5889: mol_type = other DNA
atggccaacttcctgctgccccggggcaccagcagcttccggcggtttacaagagagtcactggccgcaatagaaaagagaatggccgaaaaacaggccagaggctcgacgacactgcaggagtcccgcgaaggtctgcctgaggaagaagctcctcgaccccagctggatctgcaggcaagcaaaaaactcccggatctgtacgggaacccaccgcaggaactgatcggcgaaccactggaggatctagatcccttttacagcacacagaaaacttttattgtgctgaacaagggtaagacaatatttagattcagcgctaccaacgcgctgtacgttctgagtccttttcatccaatcagacgggctgccgtaaagatactcgtacactccttgtttaacatgttgatcatgtgcactattctcaccaattgtgtattcatggcacaacacgatcccccaccctggaccaagtatgtggagtataccttcaccgccatttacactttcgaaagtctggtgaagatacttgctcgcggcttctgtttgcatgcctttaccttcctgcgagatccctggaactggttggactttagtgttatcattatggcctatacaacagagttcgttgacctggggaatgtcagcgcactgagaacctttcgcgtgcttcgcgccctgaaaactatttcagtgataagcgggttaaagactattgtaggcgctttaatacaatccgtgaagaagctggctgatgtgatggtcttaactgtattttgcctctccgtctttgctctcatcggtttacagctgttcatgggcaatctcagacacaaatgtgtgaggaacttcacagcgttgaacggtactaacggcagtgttgaagccgacggtctggtgtgggagagcctggacctatacctcagcgatcccgagaactacctgctaaagaacggaaccagcgatgttctgctgtgtggcaactcaagtgacgccggaacttgccctgagggatacagatgtcttaaggctggagagaatccagaccacggttacaccagctttgactcttttgcctgggcctttcttgcactttttcggcttatgacccaggactgctgggagcggctgtaccaacagaccctgagatcagccggcaaaatctatatgatttttttcatgctggtcatcttcctgggcagcttttatctggtgaatctcatccttgccgtggtcgccatggcttacgaggagcagaaccaggctacaattgctgaaacagaggagaaggagaagaggttccaggaagctatggagatgctcaagaaggagcatgaggccctgacgattcgcggggtcgacaccgtttcacggagctcgctcgaaatgtccccacttgcccctgttaattcccacgaaaggcgcagtaagcgtcggaagagaatgagcagcggtactgaggagtgcggggaggaccgactgccaaaaagcgacagcgaagatggaccaagagcaatgaaccacctttctttgactcggggcctatcccgtacttctatgaaacccagaagctccagaggcagtattttcacattcaggcggcgtgatctgggcagtgaggcagactttgcagatgacgagaacagcaccgccggggagtcagagagtcatcatactagcctactggtgccttggccactcaggaggacaagtgcacaaggacaacccagtccgggtacatccgctcccggccacgctttacacggcaaaaaaaacagcaccgtagactgcaatggagtggtgtccttgcttggcgccggcgatcccgaagctacaagccctggatcccaccttttaaggccagtgatgttggagcacccccctgatacaaccactccatctgaagagcccgggggcccccagatgctaacgtctcaggctccatgtgtagacggcttcgaggagccgggcgctaggcagagagcgctttctgctgtctccgttctcacctctgccctcgaggagctcgaggaatcgcgtcataagtgtcctccttgttggaaccgtctcgcccagcgctatctcatctgggagtgttgtccgctgtggatgtctatcaagcagggggtgaaactggtggtcatggacccttttacagacctgaccattacaatgtgcatcgttcttaatactttatttatggctcttgaacactataacatgactagcgagttcgaggagatgctgcaggtaggaaacctggtgtttacaggcatcttcaccgccgaaatgacttttaagattattgccctggatccatattactactttcagcagggctggaatatcttcgattcaataattgtgatcctctccttgatggagttgggcctgagtaggatgagcaacctttctgttctaagatcctttcgcctgttgagggtgtttaagctggctaaaagctggccaacgctgaacactcttataaagattatcgggaatagcgtgggcgccctgggcaaccttacactggttcttgccattatagtgtttatcttcgccgtcgttgggatgcaactttttggaaagaactactcggaacttagggattcagactcgggactcctgcctcgctggcatatgatggacttcttccacgcatttctcattatctttcgaatcctctgtggcgagtggattgagacaatgtgggattgcatggaagtctctggacagagcctgtgcctgttagtttttctcctcgtgatggtgattggtaatttggtggtgctgaatctctttctggcactgctactctcaagcttctctgctgataacctcaccgcgcccgacgaggatagggaaatgaacaacctgcaactggcactcgcccgaatccagcgcggccttaggtttgttaagaggacaacttgggatttctgctgtggcctgctcagacagcggccccagaagcctgccgcacttgccgcccagggccagttgccaagctgcatcgcgacgccatacagcccaccaccaccagagacagagaaggtgcctcctacccgtaaggagaccaggttcgaagagggcgagcaacctggacaaggcacgcccggggaccctgagcctgtctgcgtgccaatcgccgttgccgaatcagataccgacgatcaggaggaagacgaggagaactcgctcgggaccgaggaggagtcttctaagcagacccccgaagacagctgttcagaaggcagtacagccgacatgactaatactgcagaacttcttgagcagatacccgacctaggccaagacgtcaaggaccccgaagattgttttacagagggatgcgtgcggcggtgtccctgctgcgctgtcgatactactcaagctccagggaaagtgtggtggagactgaggaagacttgctaccacattgtagaacactcttggtttgagactttcattatttttatgattctcctcagttccggcgccctcgcattcgaagacatttacctggaagaaaggaagaccatcaaagtgctgcttgaatatgccgataaaatgtttacttatgtattcgtgctggaaatgttgctgaaatgggtcgcttacggattcaaaaaatacttcaccaatgcttggtgctggcttgattttcttatcgtagacgtgagtctggtaagcctggtggccaacactctgggatttgccgagatgggccctatcaagtcactccggactctgcgtgccctgcgtcccctgcgagctctcagtaggttcgagggcatgagagtggttgtgaatgcgctagttggcgcgattcccagcatcatgaacgttctcctcgtttgcctgatcttttggcttatcttttccattatgggagttaacctttttgctgggaagttcgggagatgtatcaatcagactgaaggcgacttacccttaaactatactatagtgaacaacaaaagtcagtgcgagtctctaaatttaaccggtgagttgtactggaccaaggtcaaggttaatttcgacaatgtgggcgcaggctacctagctctccttcaggttgctacctttaaggggtggatggatatcatgtatgcagcagtggatagccgggggtacgaagagcaaccgcagtgggaatacaatctgtacatgtacatttacttcgtaatatttataatttttgggtcatttttcaccctaaacctgtttatcggcgttattatagataacttcaatcagcaaaaaaaaaaacttggtgggcaggatatcttcatgacagaagaacagaaaaaatattataacgcgatgaaaaaactgggatccaaaaagccccagaagcctatcccacgaccactcaacaagtaccaaggattcattttcgacatcgtgactaaacaagcttttgatgttaccatcatgttcctgatttgcctgaatatggtcaccatgatggtggagactgacgaccagagtccggagaaaatcaatatcctggcaaagataaacttgttgtttgttgccatctttaccggtgagtgcatagtcaagctagccgccctgagacactattactttacaaactcctggaacatatttgatttcgtggtggtgatcctgagcattgttggcacggttctgtccgatattatccagaaatacttctttagccccaccctgtttcgggtgatccgactcgcaaggattggtaggattcttcggttgatccggggtgccaaggggattcgtactctactcttcgcactaatgatgtctctccctgcattgtttaacatcggacttctactcttcctcgtgatgtttatctactccatctttggtatggccaactttgcgtacgtgaagtgggaggctggaattgacgacatgttcaatttccagacctttgcaaatagcatgctctgtctttttcagattacaacttctgccgggtgggacggactcttgtcacctatcctaaatacaggacctccgtactgcgatcccacattaccgaatagcaatgggagtcggggagattgtggaagtccggcggtcgggatcctgttctttaccacctatattatcattagttttcttattgtggtcaatatgtacattgccatcatccttgagaacttttctgtggctaccgaagagtcaactgagcccctctctgaggacgactttgacatgttttacgaaatctgggaaaagtttgatcccgaggcaacccagtttatcgagtacagtgtgttaagtgactttgctgatgccctgtctgagcccttacggatcgctaagcccaatcaaattagcctgatcaacatggatttgccaatggtgtcaggcgacagaatccactgcatggacatactcttcgccttcaccaagcgggtgctgggtgaatcgggggaaatggacgcgttaaaaattcagatggaggagaaatttatggcagctaacccttccaaaatctcctacgaacccataactacaacactaaggaggaagcatgaagaggttagtgctatggtgatccagagggctttccgcagacatttacttcagaggagcttaaagcatgcctccttccttttcagacagcaggcgggttctggtctgtccgaggaggacgcaccagaaagggagggcctgatcgcctatgtcatgagcgaaaacttctcccggccactcgggccaccatccagctcttctatcagttccacctcattcccacctagctacgactccgtgactcgagcaacctctgacaatctccaggtccgagggtccgattattcacactctgaggatctagcagattttccgcccagcccggaccgagacagggagtccatagtgtag

SEQ ID NO: 205514 - DNA, 5889 bp, synthetic construct
  misc_feature 1..5889: note = Description of Artificial Sequence: Synthetic coding sequence
  source 1..5889: mol_type = other DNA
atggccaacttcctgctgccccggggcaccagcagcttccggcggtttactagggagtcgctggcagcgatcgaaaagaggatggccgagaagcaagcccgtggctctaccacattacaggaatcaagagagggattaccagaggaggaggctcctagaccgcaattggacctccaggctagcaaaaaactccctgatctgtacggaaatccccctcaggagttgattggtgaaccactggaggacttggatcctttctattcaactcagaaaaccttcatcgtgttgaataaagggaaaaccatctttcgcttctcagcgaccaatgctctatatgtactgtcaccatttcatcccatccgccgagccgcggtcaagatcttagtgcattctctctttaatatgctgatcatgtgcacaatccttaccaactgtgtgtttatggcgcaacacgacccccctccatggacaaagtacgtggaatacacatttacggcaatctacacctttgaatcactagtgaaaatcttagccagaggattttgcctgcatgccttcacattcctccgtgatccatggaattggttggacttcagcgtgattataatggcctatgtttcagaaaatataaaactgggcaacctttctgccctcagaacttttagggtactccgtgccttgaagactatttccgtgattcctggtttgaagaccatcgtaggcgccctcatacaatcagtgaaaaagctagcagacgtcatggtcttgacggtgttttgcctgagcgtgtttgctctcataggattacagcttttcatgggaaacctacgacacaaatgcgtacgcaatttcactgctctgaatgggacgaacggaagcgtggaagctgacgggctcgtgtgggagagcctcgatctgtatctgtccgaccctgagaactacttacttaaaaatgggacatcagacgtgcttttgtgcgggaattccagcgatgccggcacatgccctgaaggatatcggtgcctgaaagctggtgaaaaccccgatcatggatacacatcctttgacagctttgcatgggctttccttgccctgttccggctgatgacgcaagactgttgggaaagactgtaccagcagactctgagaagcgctggtaagatttacatgatttttttcatgctcgtcattttcctgggatccttttatctcgtgaatttgatcttggctgtggtagcaatggcgtacgaagaacagaaccaggctaccatcgctgaaaccgaggaaaaggagaagcgatttcaggaggccatggaaatgctgaaaaaagagcatgaggcactaacaatacgcggagtcgacactgtctcacgatcatctctcgaaatgtccccactggccccagtgaactctcacgaacgccgctccaagaggagaaagcgtatgtcatcagggacagaggagtgcggcgaggaccgcctgccaaagtcagactcagaggatggcccaagagccatgaatcacctgagcttgactagaggactatctagaacctccatgaaacctcggagttccagaggcagcattttcacatttcgccgccgcgacctcgggtcagaggcagatttcgctgacgatgaaaattcaaccgctggcgagagtgaatctcaccacaccagtttgttagtgccttggccactcaggcgcacgtctgcacagggccaaccttcgcctggcacctctgccccggggcacgctctccatggcaagaaaaacagcacggtcgattgcaatggagtggtgtccctgttaggggctggtgatccagaagcgaccagccctggctctcaccttctgcgcccagtgatgctcgagcatcctccagatacgacaactcccagcgaggaacccggagggccacagatgctgacctctcaggcaccttgtgtcgatggcttcgaagaaccgggcgcgcggcagcgagccttgtccgcggtcagcgtgctcacatcggctctcgaggagctcgaagagtcaaggcacaagtgtcctccgtgctggaatagactggctcagcgctacctgatttgggaatgctgccctctgtggatgtccataaaacagggggtgaagctggtggttatggatcctttcactgatctgaccatcacaatgtgtatagttcttaatacattgttcatggcactagagcactacaacatgactagcgagttcgaggaaatgttgcaagtcggcaacctcgtgtttaccggtatctttaccgccgagatgaccttcaaaattatagccctggacccatactactatttccagcaggggtggaacatctttgactcaattatcgtgatcctgagtctgatggagctgggcctcagtagaatgtctaatctgtctgtgttacgctccttcaggttattgcgggtgttcaagttggctaaaagttggccaaccctgaacaccctcatcaaaattattggcaattcagttggagcacttggaaacctgactctcgtgttagctatcattgtattcatctttgccgttgtggggatgcagctctttggaaagaattattccgaattgcgagacagcgatagcgggctactgcccagatggcacatgatggatttcttccacgcattccttattatctttagaattctgtgcggagagtggattgagactatgtgggactgcatggaggttagcggccaaagtctgtgccttctggtgtttctgttggtgatggttattggcaacctagttgtactgaatttgtttctggcccttctgttatcgagcttttccgcggataacttaacagctccagatgaagaccgggaaatgaacaacctgcagctggcactggctcggattcaaagaggactgagattcgtaaagcggactacctgggatttttgttgtggtctgctcaggcagcgaccccagaaacccgcagccctggcagcccagggacagctacctagttgtatagctactccttactcccctcctccccccgagacagagaaagtgccccccacgcggaaagagacaagattcgaggagggcgaacagccaggccaaggaacccccggcgacccagaacctgtatgtgtccctatagccgtggcagaatctgataccgatgaccaagaggaggatgaagaaaactctctagggactgaagaggagagttccaagcagacccctgaggattcgtgctccgaaggatccacggccgatatgaccaataccgcagaacttctagagcagattccggacttgggccaagatgtgaaggatcccgaggactgcttcactgaaggctgcgtgaggagatgtccctgctgtgctgtggatactacccaggctcctggtaaggtttggtggagacttcggaagacctgttaccacatcgtagaacattcctggtttgagacattcataatttttatgattctgttatcatccggagctctggccttcgaagatatctatcttgaggaaagaaaaaccattaaggtcttgctagaatacgctgacaagatgttcacttacgtcttcgtgctggagatgctccttaaatgggtcgcctacggctttaagaagtacttcacgaacgcttggtgttggttagacttcttaatcgtcgacgtaagcttggtcagcctggtggccaacacactaggttttgccgagatgggccccatcaaaagcttgaggacgctgcgagccctcaggcccctgcgagccctgtcacgattcgagggaatgcgggttgtggtcaacgccttggtcggagccataccaagtatcatgaacgttttacttgtctgtttgatcttctggctcatcttcagtattatgggcgtgaacttgtttgccggcaaatttgggcgatgcattaaccagactgaaggcgatcttcctttaaactacacaatagtgaataacaagtcccagtgtgagtcactcaacttgactggcgagctgtactggactaaagtgaaggtgaactttgacaatgttggtgcaggttaccttgctctgctgcaagtggcaacatttaagggttggatggacataatgtatgctgctgtggacagcagaggttacgaagagcaaccacaatgggaatataatctatatatgtatatatactttgtgatctttataatctttggcagtttcttcactctgaatcttttcattggtgttatcattgataatttcaatcagcagaagaagaaattgggcggacaggatatcttcatgacggaagagcagaaaaagtattataatgccatgaaaaagctgggatctaaaaagccccaaaagccaattccacggccacttaacaagtatcagggttttatctttgatattgtcactaagcaggcctttgatgttaccattatgtttctcatatgtctgaatatggttacaatgatggtggagacagacgaccaatccccggaaaaaatcaacatcctggcgaagataaacttgctcttcgtggccatatttaccggagaatgtatagtaaagttagcagcactcaggcattattacttcaccaacagctggaatatcttcgacttcgtggtagtgatcctgtctattgtgggaaccgtcctgtctgatataatccagaaatattttttcagcccaacgctgttccgggtgattcggttagcccgaattggtaggatactgcgtctaataagaggagctaaaggcattcgaacgctgttgtttgcactgatgatgagcttgccggctctgtttaacatcggactcctcctgtttctggtcatgtttatctatagcattttcgggatggcaaattttgcttacgttaagtgggaggctgggattgatgacatgttcaacttccaaacttttgccaatagtatgctgtgtttgttccaaataacaaccagtgcagggtgggacgggctgctatcccccatactcaataccggacccccctattgtgaccccactctgccaaattcgaatgggtctcgtggagattgtggcagccccgccgtcgggatcctcttctttaccacctatattattatctcatttctgattgtggttaatatgtacatcgcaatcattctggagaatttctctgtagcaacagaagagtcaaccgaacccctttcagaggacgattttgacatgttctatgagatttgggaaaaattcgaccccgaagcaacgcagttcatagaatactccgtcctgtcagatttcgcggatgctctgtccgaaccactgcgaatagccaaacccaaccaaataagtctgattaatatggacttaccaatggtgtccggagaccggattcactgcatggatattctgtttgccttcacaaaaagagtactgggtgagagtggggaaatggacgctctcaagattcagatggaggaaaaatttatggcagcaaatccttccaagatcagttacgagccgatcaccaccaccctgcggaggaagcacgaggaggtcagcgccatggttatacagcgcgcttttcgccggcaccttcttcaaagatcactgaagcatgctagttttttgttcagacagcaagctggctccggactcagcgaggaagacgctccagaaagggaaggacttatcgcgtacgttatgtcggagaatttcagcaggcccctgggccccccgtccagctcgtcaatctcgagtacgagctttccgccgagctacgactcagtgacccgcgccacttcggacaatttgcaggtgcgtgggagcgactattcacattcagaggacctggcagatttccccccttcacccgatagggatcgagaaagtattgtgtag

SEQ ID NO: 205515 - DNA, 5889 bp, synthetic construct
  misc_feature 1..5889: note = Description of Artificial Sequence: Synthetic coding sequence
  source 1..5889: mol_type = other DNA
atggccaacttcctgctgccccggggcaccagcagcttccggcggttcacacgagagagcctcgccgctatagagaagcgtatggcagagaaacaggcccgcggttcaacaacgctgcaagaatctcgagaaggattgccagaagaagaggcgccacggcctcagctggatctgcaagcgtcaaagaaactgcccgacttgtatggcaaccctccccaggagctgatcggagagccactggaggatttagatcctttttacagtacacaaaaaaccttcatcgtgttaaacaaaggcaagactatctttcgattcagcgccaccaatgcgctgtatgtgctgtctcctttccacccaatccggagagcagctgttaagatcttggtgcactccttgtttaatatgcttataatgtgcacaattctcaccaattgtgtgttcatggctcaacacgacccccctccgtggacgaagtacgtggagtacaccttcaccgcaatctacaccttcgagtcactggttaagatcctggcaagagggttctgtctgcacgcctttactttccttagggatccttggaattggctggacttcagcgtcattataatggcctacgtgagcgaaaacattaaactggggaacctgtcagccctcaggaccttcagggtcctgcgagctctgaaaaccatttccgtaattcctggactaaagacaatcgttggcgccctgatccaaagcgtcaagaagctggccgatgtgatggtacttacagttttttgcctctctgtatttgcactgataggcctgcagctgtttatgggcaatctgcgccacaagtgcgtgcgaaatttcactgcactaaacggtaccaacggtagcgtggaagcagacgggctggtgtgggaatccctggacctgtatctgagtgacccagagaactacctcttaaagaatggaacgagtgatgtactgctctgtggcaattcaagtgacgcaggcacatgtccagaaggttaccgatgtctgaaagccggtgaaaatcctgaccacgggtacacatcttttgattcatttgcctgggccttcctcgctctgttcaggttgatgacccaggattgctgggaaaggctgtatcagcaaacactccggtccgcaggaaaaatctacatgattttctttatgcttgtgatcttcctcgggagcttttacttggtgaatctgatccttgcagtggtggctatggcgtatgaggaacagaatcaagctacgatcgctgagacggaggagaaagaaaagcgcttccaagaagccatggaaatgttgaagaaggaacacgaggcactcacaattaggggcgtggatacggtcagccgatcctcgctggagatgtctcctctggccccagtcaattctcatgaacgacgtagcaagaggcggaagcgcatgagcagtggcacagaagagtgcggcgaagatagattgccaaaaagtgattctgaagacggtccaagagctatgaatcacctgtcattgaccagagggttatcgcgaacctccatgaaacctcgcagtagccggggcagcatattcacttttcgccggcgggacctagggtcagaggcggactttgcggacgacgagaattccacggccggcgagtcagagtcgcatcacaccagtctgttagttccttggcccctccgacggacctctgcccaggggcagccatccccaggtacttccgcacccggccacgccctgcacggcaaaaaaaattctacggtggattgcaatggtgtcgtaagcctgttgggcgcgggcgaccctgaagcaacaagcccaggctcgcatttgcttcggccagtgatgctggagcatccccctgacacgaccactccgagtgaggagccaggtggtccacagatgctaacctcacaggcaccatgtgttgacggcttcgaagagccgggagcccgccagcgggcactgtcggccgtgtctgtgctaacttctgcacttgaggaactagaagagtccaggcacaagtgtccaccctgttggaatagattggctcagagatatctaatatgggagtgttgtccactttggatgtcaataaagcaaggtgtgaagcttgttgtcatggacccatttaccgacctaaccatcactatgtgcattgtgctcaacacgctgttcatggccctggaacactataacatgacctcagagttcgaagaaatgcttcaagtaggcaacctagtgttcacagggatcttcacagccgaaatgacattcaagatcattgccttggatccatactactactttcaacagggctggaatatcttcgacagcattatcgtgattctcagtctcatggagctcggactcagccgtatgagtaacttgagtgtcctgcggagcttccgtctgctgcgcgtgtttaaactcgccaaatcctggcctaccttgaatactttaataaagatcattgggaatagcgtgggcgccctcggtaacctaacactcgtgctggccatcattgtctttattttcgccgtggtgggcatgcaactgttcggcaaaaactatagtgagctgcgcgattcagactcagggttacttcctagatggcacatgatggatttcttccatgcgttcttaattattttcagaatcttgtgtggtgaatggatagagaccatgtgggactgtatggaagtgtcgggtcagtcgctctgcctgctggtctttctgctagtgatggttattggcaatctcgtggtgctgaacctgtttttagcactgcttctgtcatcattctctgctgacaatctgaccgcccccgacgaagaccgagaaatgaacaatcttcagctggccctcgccagaatacagcgggggctcagattcgtgaagcggaccacctgggatttctgttgtgggctactgcggcaacgccctcaaaagccagcggccctggctgcacagggtcagttgccctcttgtatcgcaactccatactcaccaccgccgcccgaaaccgagaaagtaccaccaactcgcaaggaaacccgcttcgaagaaggagagcagcccgggcagggcacacctggtgatcctgagcctgtatgtgtgcccattgctgtggcagagtcagatactgatgatcaagaggaagatgaggagaattccttgggcactgaggaggaaagctcaaaacagaccccggaggactcctgtagcgagggctccaccgctgacatgactaatactgccgagttgttagagcagatccccgacttgggacaggacgtaaaggaccccgaagactgtttcacagaaggctgcgtgcggaggtgcccttgctgtgccgttgatacgacgcaggcgcctggcaaggtgtggtggcggctaagaaagacctgctatcatatcgtggagcatagttggtttgagacatttattatcttcatgatcctgttaagttcaggggcactggcctttgaagacatttacctcgaggagagaaaaacaataaaagtgctcttagagtatgctgataaaatgtttacctatgtgttcgttctagaaatgctgctcaaatgggtcgcctatgggttcaaaaagtactttacaaacgcttggtgctggttggattttctgatcgtggatgtgtcattggtctctttagtggccaatacgcttgggtttgctgagatgggccctattaaatctctcaggacccttcgagcactgagaccccttagagcattgagtcggttcgagggtatgcgagttgtcgtgaacgctctagtgggagccatcccttccatcatgaatgttttgcttgtgtgcctcatattctggcttatctttagcataatgggtgtaaacctgttcgcggggaaattcggtcggtgcatcaatcagacagagggtgacctcccattaaactacaccatcgtgaacaacaaatcgcagtgcgaatctctgaatctcacaggggaattgtattggacaaaggtgaaggtgaatttcgataatgttggggcaggatatctcgcattgttacaggtggccactttcaagggttggatggacattatgtatgcagcggtcgactcaaggggctacgaagagcagcctcagtgggaatataacttgtatatgtacatctatttcgtgatcttcattatctttggatcattttttactctaaacctgttcatcggagtcattatcgacaatttcaaccaacagaaaaaaaaactcggaggccaggatatttttatgacagaagaacaaaagaaatattacaatgctatgaagaagcttggcagcaaaaaaccgcaaaagccgataccacggcctcttaacaagtatcaggggttcattttcgatattgtgacaaagcaggcgttcgacgttaccatcatgtttctaatctgtctgaacatggtcacgatgatggtggaaaccgacgaccaatcgccagagaaaataaacatccttgctaaaatcaatctgcttttcgtggccatattcaccggagagtgcatcgttaaacttgctgctctgcggcattattattttactaattcctggaacatttttgatttcgtagtggttattctttccattgtcggcaccgtgctgagcgacataatccagaagtatttctttagcccaacactgttccgggtgatccgactcgcgagaatcgggagaatccttcgacttattagaggtgcaaaggggattaggacactgcttttcgccctcatgatgtcactgcctgccctgttcaatataggcctcctcctatttctggtgatgttcatttattccatttttgggatggcaaacttcgcttacgttaagtgggaggccgggattgacgacatgtttaatttccagaccttcgccaattcaatgctttgcttatttcaaatcactacttccgcaggctgggatggattgttaagtcccattctaaatactggaccaccctactgtgacccaaccttacccaattcaaacggttcaagaggcgactgcggatctcccgccgtggggattttatttttcaccacttacattattatctcattccttattgtagtgaatatgtatattgcaattattctggagaattttagtgttgcaactgaggagtcgactgagcccctttccgaagatgacttcgatatgttttacgaaatatgggagaaattcgacccagaagccacccagttcattgagtattctgtgcttagcgacttcgctgacgcactcagcgaaccccttcggatagcaaaaccaaaccaaataagtctcataaacatggacctgccgatggtgtccggagacaggatccattgcatggatatcctgtttgccttcacaaaaagggttctgggcgagagtggtgagatggacgcgctcaagattcagatggaagagaaattcatggccgcgaaccctagcaaaatttcatacgaacccatcacaacaactctccgccgcaagcatgaggaagttagtgccatggtgatccagagggctttccgccgacacttactccagcgtagtctcaaacatgctagtttcctctttcgccaacaagcaggatccggtctctccgaagaggatgcaccagagagagaggggctcatagcctatgtcatgtctgagaatttctctaggcccctcggacccccgtcttcctcaagcattagctccacctcattcccaccatcctacgactctgttactagagcgacttcagacaacctacaagttagaggatcagattacagccatagcgaggatctggccgactttcccccctcccccgacagggaccgagaaagcattgtctag

SEQ ID NO: 205516 - DNA, 5952 bp, synthetic construct
  misc_feature 1..5952: note = Description of Artificial Sequence: Synthetic coding sequence
  source 1..5952: mol_type = other DNA
atggccaacttcctgctgccccggggcaccagcagcttccggcggttcactcgagagagcctggccgccatagaaaagcggatggcagaaaagcaggctcggggcagcaccacactacaggagtcccgcgaaggcctgcctgaagaagaggcccctcgccctcagttagatctgcaggcttctaagaagctgccagatctgtacggtaaccccccacaggagctcatcggagaaccgctggaggatctggatccattctattcgacacaaaagacattcatcgtcctgaataaaggaaaaactatcttcagatttagtgctactaacgcattgtacgtacttagtccctttcatcctattcgaagggcagcagtcaaaatcctggttcattcccttttcaacatgcttatcatgtgtacaattcttacaaattgcgtctttatggcgcagcatgatccgcccccatggacaaagtatgtggaatataccttcactgctatttacacatttgaatccctcgtgaagattctagctcgggggttctgtttgcatgcgttcacctttctccgcgatccatggaactggctcgacttctccgtgataattatggcctacgtttcagagaacataaaactcggaaacctgagcgctctccggaccttccgagtgctgagggccctcaagacgatctctgtcataccaggactgaaaacgattgtcggggcacttatacagagcgtgaagaagcttgccgatgtgatggtcctcacggtgttttgcctttctgtgttcgccctcattggacttcagctgttcatgggcaatctgcgccacaaatgtgtgcgcaatttcacagcacttaatggtacaaacgggtctgttgaggccgacgggctcgtgtgggagtcccttgacctatatctcagtgacccggaaaactatctcttgaaaaacggcacctccgatgtcctgctctgcggaaattctagtgatgctgggacttgccccgagggttatcgatgccttaaggcgggagaaaaccctgaccacggctatacgagtttcgatagtttcgcctgggcctttttggcactctttcggctaatgacacaggactgctgggagaggctataccagcagaccctgcgcagcgccggaaagatctacatgatatttttcatgcttgtgatttttctgggtagtttctatttagtgaacctcattctcgctgtggttgcgatggcctacgaggaacagaaccaggcaaccatagctgaaactgaagaaaaggaaaaacgcttccaggaggcaatggaaatgctcaaaaaggagcacgaggccctgaccatcaggggggtggacacagtgtctagatcttctctggaaatgtcgcctctagcacccgtgaattcgcacgagcggcgcagcaagaggagaaagcgcatgtcctccgggactgaagaatgtggtgaggacagactgccaaaatccgacagcgaggacggacctcgtgctatgaaccacttgtctttaactaggggcctgagcaggacctccatgaagcccaggagctctaggggctcaatcttcacctttagaaggcgcgacctggggtccgaagcagacttcgccgacgatgaaaattcaaccgctggcgagagcgagagccaccacaccagtctgctggttccttggcctcttagacgcaccagcgctcagggccagccttcaccaggcactagcgcacccgggcacgcattgcatggtaagaaaaacagcacggtggattgtaatggggtcgtatctctcctgggcgcaggcgaccccgaggccactagtcccggaagccacctgctcagaccagttatgctggagcatcctccagatactacaacgccctccgaagaacctgggggcccgcagatgctcacgagccaagcaccgtgtgtggacggatttgaggaacccggtgctaggcaacgcgctctgagcgccgtatccgtgctgacgtccgctctcgaggagctcgaggagagtcggcacaaatgcccgccctgctggaaccggttggcacagcggtatctgatttgggaatgctgtcccttgtggatgagcattaagcagggtgtcaaattagtcgtgatggacccgttcactgaccttacgatcacaatgtgcatcgtcctgaatacactgtttatggccctcgagcattacaatatgacatccgagtttgaggagatgttacaggtcgggaacttagtttttacggggattttcaccgcagagatgacgtttaagatcatagcccttgacccgtattactactttcaacaaggatggaatatcttcgattcgatcatcgtgatattgtctttgatggagctgggactgagtcggatgtccaatctcagcgtgctgcgctcatttcggctgttgcgggtgttcaaactggccaaatcctggcccaccctgaataccttgataaaaattatcggcaacagtgtgggcgctctgggaaacctgacactcgtcctagccattatagtatttatctttgccgtggtgggcatgcagctgtttggaaaaaattattctgagttgagggattctgattctggcctgctgccccgctggcacatgatggactttttccacgcctttctaatcatcttcaggattctctgtggagagtggatcgagaccatgtgggactgcatggaagtgtccggccagagtctctgtcttctggtgttcttgcttgttatggttataggtaatttagtggtgctaaacctgtttcttgccttactgctctctagtttcagcgcggacaatttaacagcaccagacgaggatagggagatgaacaacctgcaactcgcgttagcacgtattcagaggggtctacggtttgtcaaaaggaccacttgggacttttgctgtggcctgctgcgacagcggccgcagaaaccggccgcactcgcagctcagggtcagttgcctagctgtatcgctaccccctattctcctcctccccccgagactgagaaggtaccccccaccagaaaggagacgcgctttgaagaaggggaacagccaggccagggaactcccggcgatccagagccagtttgcgtcccgatcgctgtggcggaatccgatacagacgatcaggaggaagatgaggaaaactcattgggaacggaggaagagtcctcaaagcaggaaagccagcctgtcagcggaggtcctgaagccccccctgattccagaacctggagccaggtgtctgcaacagctagctcagaagctgaagcctcagcttcccaggcagattggaggcagcagtggaaggccgagcctcaagctcccggatgcggcgagactccggaggacagctgtagcgaaggatccactgccgatatgactaacactgccgaattgttagagcagatacccgatctaggccaggatgtgaaagacccggaagactgctttacagaggggtgcgtaagaagatgtccgtgttgcgcggtggatacaacccaggcgccaggcaaagtgtggtggcgcctccgtaaaacttgctaccatatcgttgaacactcttggttcgagaccttcattatctttatgattctgctcagcagtggcgcactcgcctttgaagatatttacctggaggaaaggaaaaccatcaaggtcctgcttgaatatgccgacaagatgtttacttatgtgtttgtgttagagatgctgctgaaatgggtggcctatggttttaagaagtacttcaccaacgcctggtgctggctcgattttctgatagttgacgtaagtctggtgtcactagtggccaataccttgggcttcgccgaaatgggccccattaaaagcttgcggacactccgcgccctgcgacccctgcgtgcgttatctaggtttgaggggatgagggtcgtcgttaatgccctcgtaggcgccattccaagcatcatgaacgtgttgttggtctgtctaattttctggcttatcttttctatcatgggtgtcaatctcttcgccggtaagtttggaaggtgcattaaccaaacagagggcgatctgccgttgaactacaccatagttaacaacaagtctcagtgtgagtctctgaatttaacaggtgagctgtattggactaaagtcaaggttaacttcgacaatgttggagccggttatcttgctctgctccaggtggccaccttcaagggatggatggatatcatgtatgcggccgtcgactcccgaggctatgaggagcagcctcagtgggaatacaatctttatatgtatatatactttgtcatcttcattatttttggatcctttttcactctaaacttgttcatcggcgtaattatagataatttcaaccagcagaaaaaaaaattgggagggcaggacatttttatgactgaagagcagaagaagtactataatgctatgaaaaaattggggtctaagaaacctcagaaaccgatcccacgtcccttgaataagtaccaggggtttatcttcgatatagttaccaagcaggcgtttgacgtcacgattatgtttctcatctgtttgaacatggtcaccatgatggtcgagacggacgaccagtcaccggagaagatcaacattctggctaagattaatctcttgttcgtcgctatcttcactggaactgtcctgagtgacataattcagaaatacttcttctcgcctacactcttccgtgtcattcggctggccaggattggtcgaatcctcagactaatcagaggggcgaaaggaatcaggacactgctgtttgccttgatgatgtcactcccagcgcttttcaatatcggcttgctgttattcctggtgatgttcatttattcgatttttgggatggcaaactttgcctacgtgaaatgggaagccggaatagacgacatgtttaatttccagacttttgcgaattccatgctatgtctgtttcaaatcaccactagcgctgggtgggatggcctgttaagccctattctgaataccggacctccgtactgtgacccaactctcccaaatagcaacgggagcagaggcgactgtggctcgcctgcagtgggcattctgttcttcacaacttatatcatcattagtttcctgatagtggtcaacatgtatatcgccattattctggagaacttttctgtggcgaccgaagaatctaccgagccactgtctgaagacgactttgatatgttttacgagatttgggaaaagtttgaccctgaagctacccagttcatcgagtacagcgtgctgtcggattttgcagatgccctatctgagccactgcggatcgcgaaacccaatcagatttctctcattaacatggatctccctatggtctctggtgatcgcatccattgcatggacatcttgtttgcttttactaagagggtgctgggagagagtggtgagatggatgccctgaagatccaaatggaggaaaaattcatggcagccaaccctagtaagatcagttacgaacctataacgacaacactaagaaggaagcacgaggaggtttctgccatggtaattcagcgtgcattcagaaggcatctcctgcagaggagcctgaaacacgctagcttcttgttccggcagcaggcaggatcaggactgtcagaggaggacgcccccgagagagaaggacttattgcttacgtgatgagcgaaaacttcagtcggcctttgggcccaccttcttcgtcatcaatctcttcaacgtcctttcctcctagttacgatagcgtgacaagagcaactagcgacaatctgcaagtccgagggagcgattattctcactccgaggacttggcagactttcccccttctcctgacagagatagagaaagcatcgtgtag

SEQ ID NO: 205517 - DNA, 5049 bp, synthetic construct
  misc_feature 1..5049: note = Description of Artificial Sequence: Synthetic coding sequence
  source 1..5049: mol_type = other DNA
atgctggccagccccgagcccaagggcctggtgcccttcaccaaggaatcctttgaactgattaaacagcatatcgccaagacccacaatgaggatcatgaggaggaggatctgaaaccaacccctgatttagaagtgggcaaaaaactaccgttcatctacggtaatctgtcccagggcatggtgagcgagcccctggaagacgtcgatccctactactataaaaaaaagaacactttcatcgttctaaacaagaatcgcactatcttcaggttcaatgccgcctctatcttgtgcactttgtctccctttaattgcatccggcgcactactattaaggtcctggtgcaccctttcttccagcttttcatcctcattagcgtgttgatagattgcgtgtttatgtccctcaccaatttgccaaaatggcgacctgtactcgaaaatacattactcggtatctatacttttgaaatcctggtgaaattgttcgctaggggagtgtgggctggatcattttcttttctgggagacccctggaattggctagacttttctgtgaccgtgttcgaggtgatcatccgctacagccctctggattttattcctactttacaaaccgcaagaacgctcaggatcctgaaaataatacctctgaaccagggcctgaaaagcctggttggagtactgatacattgtttaaagcagttgatcggagttataatcttgaccctcttctttctcagtatattctccctcattggaatggggctgttcatggggaatctgaaacacaaatgttttagatggccacaggagaatgagaatgagaccctgcacaatcggacaggtaatccttactatatccgggaaaccgagaacttttactatctagaaggggagcgttacgcattgctctgcggcaatcgcaccgatgccggtcaatgcccggaaggatatgtgtgcgtcaaagcagggatcaaccccgaccaaggattcactaattttgacagctttggctgggcactcttcgctctcttcaggcttatggcccaggactatcccgaagtcctttatcaccaaattctgtacgcttcaggcaaagtctatatgatcttcttcgtcgtggtgtccttccttttctctttttatatggcatcactctttctgggaattttggccatggcctatgaggaggaaaagcagagggtgggagaaatatccaagaaaattgaaccaaaatttcaacagaccgggaaggaactccaggaggggaacgagactgacgaggctaagaccattcagattgagatgaaaaagcggtcacctatttccaccgacacttcgcttgatgtcctggaagacgcaaccctgaggcacaaagaggaactcgagaagtccaaaaagatttgccctctgtattggtacaaatttgcaaagacatttctaatttggaactgttctccatgttggctaaagctgaaggagtttgtgcacagaatcatcatggccccgtttaccgatcttttcctgattatatgtataattttaaatgtctgtttcctgactctggagcattaccccatgagcaagcagaccaacacgttgcttaacatcggcaatctggtgttcatcggaatctttacagccgaaatgattttcaaaattatcgctatgcacccatacggctattttcaggtcgggtggaacatttttgacagtatgatcgtgttccatggtctgattgaactgtgccttgcaaacgtggccgggatggctcttctgcgcctgttcagaatgttgcgtattttcaaactggggaagtactggccaacctttcagatcctcatgtggagcctgagcaactcatgggtggctctcaaggacctcgtccttctgctgtttacattcatttttttctcagccgcctttggcatgaagctatttggtaagaactatgaagagttcgtgtgtcacattgacaaagactgtcagctgccacgttggcacatgcacgacttctttcactccttccttaatgtgttcagaatcctgtgcggcgagtgggtagagacactgtgggactgtatggaagtggctggacagtcgtggtgcatccccttctacctgatggtaatcttgatcggaaatctcctggttctgtacctttttttagcccttgtgtcatcattctctagctgtaaggatgtgacggccgaggaaaataatgaagcgaagaacttgcagctggcagttgccaggataaagaaggggatcaactatgtactgctgaagattttatgcaagacacaaaacgtgccaaaggacaccatggatcacgtgaacgaggtgtacgtcaaggaggatatctcagatcatacactaagcgaattatccaatactcaggattttctgaaagacaaagagaagagcagcggcacggagaaaaacgccacagaaaatgaaagccagagtctcataccttctccttcagtgagcgaaacagttcccattgcaagcggcgagtctgacatcgaaaatttagataacaaagagatccagtctaaatccggagatggtggctccaaagagaaaataaagcagagctcttcgagtgagtgcagtactgtggacatcgcaatatctgaggaagaagagatgttttacggaggggaaaggtcaaagcacctcaagaatggatgtcgccgaggctcctctctcggacagatttccggagccagtaaaaagggcaagatctggcagaatatacgaaagacctgctgcaagatcgtcgagaacaattggtttaaatgctttatcggcctcgttacgctactgagcactggcaccctggcctttgaagacatatacatggaccagcgtaagaccattaagatcctgctggaatacgcagatatgatatttacgtacattttcattcttgagatgttacttaaatggatggcctacggtttcaaggcgtatttctccaacggatggtatcgcctggattttgttgtggtcatagttttctgcctgagcctgataggcaagactcgcgaggagctgaagcctctaatctcgatgaagttcctccggcccttacgggttctttcgcaattcgagcgcatgaaagttgtggtgagggccctcattaaaacgacactccctacacttaacgtcttcctcgtgtgccttatgatatggctgattttctccatcatgggcgtcgacttgtttgccggtcgcttctatgagtgcatagacccaacctccggggaacggtttccaagttctgaggtcatgaataaatctcgttgcgagtctctcttatttaacgagagtatgttgtgggagaacgctaaaatgaattttgacaacgtggggaatggattcctttcgctactgcaggtcgctacattcaatggatggatcaccatcatgaattccgcaatcgacagtgtggccgtgaatatccagcctcatttcgaagtgaacatatatatgtactgctactttatcaatttcataatcttcggcgtcttcctccccctgtctatgctcattaccgtgataatcgacaacttcaacaagcacaagatcaaactgggaggaagcaatatcttcattactgtcaagcagcggaaacaatacagacgactgaagaagctgatgtatgaggattctcagcgacccgtgccccgtccactgaacaaactccagggcttcatatttgacgtcgttacatcccaggcctttaacgtaatcgtgatggtgctgatctgcttccaggctattgctatgatgattgacacagatgtccagtccctgcaaatgtctatcgccctgtactggattaactctatcttcgtgatgctgtataccatggaatgcatcctgaaactcatcgccttcagatgtttctactttacgatcgcatggaatatatttgactttatggtggtcatcttctccataactggattatgccttccaatgacagtgggttcctacctcgtgccgccttctttagtgcagctaattctcctctcaaggataattcatatgctgcgcctggggaaaggtcctaaggtgtttcacaacttgatgctccccctcatgctcagtctcccagccctgcttaacattatcctgctcattttcctcgtgatgttcatatatgccgtatttggtatgtacaacttcgcttatgttaagaaggaggccggaatcaatgatgtttcaaacttcgaaaccttcggaaattctatgctttgcctttttcaagtcgctatattcgcgggctgggacggaatgctggacgccatcttcaactcgaagtggtcggactgcgatcccgacaaaatcaatccagggactcaggtgcgaggagattgcggaaatcccagcgttggaatcttctattttgtaagctacatcctaatttcttggctcattatcgtgaacatgtacatagtggtggtgatggagtttctgaacattgcctctaagaagaagaataaaacactctcagaggacgacttccgcaagttctttcaggtttggaaacgttttgatccagaccggacccagtatatcgacagctctaagttgtcagactttgcggctgcactggacccaccactattcatggcaaaaccaaacaaaggccagctgatcgctctggacctgccaatggcagtgggggaccgcattcactgtctagacatattgctagcctttactaaaagagtaatgggacaagatgtgagaatggagaaggttgtctctgagatagaatccgggttcttgctcgccaatccatttaagatcacttgcgaacccattacgaccaccctgaagcgcaagcaggaagcggtgtctgcgacaatcatccagcgggcctataaaaactatcgtctccgccgcaacgacaaaaatactagcgatatccacatgattgacggcgacagagatgtgcatgctaccaaggagggggcatactttgacaaagccaaggagaaaagccccattcaatcccagatatag

SEQ ID NO: 205518 - DNA, 5049 bp, synthetic construct
  misc_feature 1..5049: note = Description of Artificial Sequence: Synthetic coding sequence
  source 1..5049: mol_type = other DNA
atgctggccagccccgagcccaagggcctggtgcccttcaccaaggaaagcttcgagttgataaagcagcacatcgcgaaaacccacaacgaggatcacgaggaggaggatctgaaaccaacccccgacctcgaagtcggcaagaaactcccgtttatttatggaaatctgagccagggaatggtctctgaacctctggaagacgttgacccttattactacaagaagaaaaacacctttatcgtgctgaataaaaaccgaactatcttcagatttaacgctgcaagcatcctttgcaccctgtccccattcaactgtatcagacggaccaccatcaaggtactggtccacccatttttccagctattcatcctgatttcggtcttgatcgattgtgtcttcatgtccctgaccaacttacccaagtggaggccagtgctggaaaacacactgctgggtatctatactttcgaaatcctggtgaaactattcgcacgcggcgtctgggctggcagctttagtttcttgggcgacccttggaattggttggactttagcgtgaccgtttttgaggtaatcatcaggtatagccccctggacttcattcccacactgcagacggccaggacactccgcatcctgaaaatcattccgcttaatcagggcctaaagagcctcgtgggggtcctgattcactgtctcaaacagctaattggggtgattattctgacacttttttttttatctatcttcagcctcattggtatggggctgtttatgggcaaccttaaacacaaatgcttcagatggccacaggagaatgaaaatgaaacactgcacaatcgcacagggaatccttactatataagggagaccgagaatttctactatctcgagggcgagagatatgcgttgctgtgtggaaatcggaccgatgctggtcaatgcccagaggggtatgtctgcgtgaaggcagggattaaccctgaccagggctttaccaacttcgactcctttggttgggccctctttgctctatttagattaatggcgcaggattatccagaagttctttaccaccagatcctgtatgctagtggcaaagtgtatatgatcttctttgttgttgtgtccttcctgttttccttctacatggcttctcttttcttaggaatcttggccatggcttacgaagaggagaaacagcgggtgggcgagatatccaaaaagatcgaacctaaattccaacagacaggcaaggaactgcaggagggaaacgagacagatgaagccaagaccattcagatcgaaatgaagaagcggagtcccatctccactgatacttctctcgacgttttggaagatgctaccctccggcacaaggaagaactagaaaaaagtaaaaagatctgcccactgtactggtataaattcgccaaaacatttctcatttggaattgttcaccttgttggctgaagctaaaggagtttgtgcatagaattatcatggccccatttacagatctgttcctgatcatatgcattattttaaacgtttgcttcctcacattggaacattaccctatgagtaagcagaccaatacactgctgaatatcggcaacctagtgtttattgggatattcactgctgaaatgatttttaaaattatcgctatgcatccatatggatactttcaggtggggtggaacatttttgacagtatgatagtattccacggactaattgagctgtgcctagctaacgtggccggaatggcgcttctgaggctgttcagaatgttgcggatctttaagctgggcaaatattggccaaccttccagattctgatgtggtcactctcaaacagctgggtggcccttaaggatcttgtcctgcttctgttcacctttatctttttcagtgcagcatttggcatgaagctgttcgggaaaaactatgaagaattcgtttgccatatcgataaagattgtcagttgccacggtggcatatgcatgacttttttcactcattcttgaacgtctttaggatcctgtgcggcgagtgggtagagacgctgtgggattgtatggaagtggctggccagagctggtgcattcccttctatctcatggtcattttgataggcaacctcctggtgctctacctgttcctggccttggtgagttcattttcttcatgcaaggatgtgacagcagaagaaaacaatgaagccaaaaatttgcagttggccgtggcgcgcattaagaaagggatcaattacgtgttactaaaaatcttgtgcaaaactcagaatgtccctaaggacacaatggaccatgtgaacgaagtatacgtcaaagaggatatcagcgaccatacactctctgagctaagtaatacacaggatttcctgaaggacaaggagaagagctcgggaacagaaaaaaatgcaacagagaacgaaagccagtcactcattccatcacctagtgttagtgagacagtgccgattgcctccggagagagcgatatcgagaatctagataacaaagaaatacagagcaagtctggggatggtgggagcaaggagaagattaagcagagtagctcgtctgaatgctcaacagtagatattgcgatctccgaagaagaagaaatgttttacggaggcgaacgatccaaacatctcaagaacgggtgtcgtaggggctcaagcttggggcaaatctccggggccagtaaaaaagggaaaatttggcagaacatccgaaagacttgctgtaagattgtggaaaacaactggtttaagtgtttcatcggcttggttacacttctgtccacaggcacgctggcctttgaggacatctacatggaccagaggaagactattaaaattctgttggagtatgccgatatgatcttcacatatattttcatcctggagatgctccttaaatggatggcatatggctttaaagcctatttcagcaatggatggtacaggctggactttgtagtggttatcgtcttttgcctgtcactcattggcaagacccgggaagagttaaagccacttatatcaatgaagttcctgcgcccactgagagtgctgtcacagttcgagcgcatgaaagtggtcgtcagagctctgatcaagacaacactgcccaccctgaatgtcttcctcgtgtgcctaatgatctggctgatcttctccatcatgggggtggatctcttcgccggaaggttttatgaatgtattgaccccacctctggtgaacgtttcccctcttctgaggtgatgaacaagagcagatgcgaatctctgctcttcaacgagtccatgctatgggagaacgctaagatgaacttcgacaacgtaggaaatggattcttaagcttgctgcaggtcgctacattcaacggctggatcacgatcatgaatagcgccatcgattcagtggcagtcaatattcagccacatttcgaggtgaatatctatatgtattgctacttcatcaattttatcatcttcggcgtctttctgcccctttccatgctgataacggtgatcatagataattttaacaagcataagattaagctgggtggttctaatatcttcatcaccgttaagcagcgcaagcagtataggcggttaaaaaaactcatgtatgaggacagccagagacccgtaccgagaccactcaataaacttcaagggtttatattcgatgtagtcacatcccaagctttcaacgtcatcgtgatggttttgatatgcttccaagccattgccatgatgatcgataccgacgttcagagtctgcagatgtccattgctctatactggatcaattctatctttgtaatgctctacacaatggagtgtatcttgaagctcatcgcattccgatgtttttatttcaccattgcatggaatattttcgatttcatggttgtgatctttagtattaccgggctctgcctgcccatgaccgtgggctcttacttggtgcctccttcgctggtacagttgatactgttgtctagaatcatccacatgctgcgactcggcaaggggcccaaggtcttccataaccttatgctccctctaatgctgtcattgccagctctattgaacatcatcctgctgatcttcttggtaatgtttatatatgcggtgtttggcatgtacaacttcgcatacgtgaagaaagaagcagggattaacgatgtttccaattttgagacttttggcaattctatgttatgcctgtttcaggttgcgatctttgccggctgggacggcatgctagacgcaatcttcaactctaagtggagcgactgtgaccccgataagattaaccccggaacacaggttaggggtgactgcggtaacccgtctgtcggaattttctacttcgtgtcttatatcctgatcagctggctaatcattgttaatatgtacattgtggtggtcatggagttcctcaatatcgcaagcaagaagaagaataagacgttatccgaggacgactttcgcaagttcttccaagtttggaagcgttttgatcccgaccggacccagtacatcgattcatccaagctttccgatttcgccgcagctctggaccctcctttgttcatggctaagccgaataagggccaactcattgctctggatctaccaatggctgtcggggaccggattcactgcctggacatactgttggcctttaccaagcgtgtaatgggacaggatgtgcggatggagaaggtagtgagtgaaatcgagagcggattcctgctggctaacccctttaaaattacctgcgaacccatcaccactactctgaagcgtaaacaagaagccgtatccgcaaccatcatccaaagagcctacaaaaactatcgcctaaggcggaatgataagaacacaagcgacatacacatgatcgatggggatagagacgttcatgcaaccaaggaaggcgcttactttgataaggcaaaggagaaaagccctattcagtcacaaatctag

SEQ ID NO: 205519 - DNA, 2592 bp, synthetic construct
  misc_feature 1..2592: note = Description of Artificial Sequence: Synthetic coding sequence
  source 1..2592: mol_type = other DNA
atgctggccagccccgagcccaagggcctggtgcccttcaccaaggaatccttcgagctgattaaacagcatattgcgaagacccataatgaagaccacgaagaggaagatcttaagccaacacctgacctggaggtcggcaagaaattaccattcatctatggcaatctctcccagggcatggtcagcgagccactggaggatgtagacccgtactattataaaaagaaaaatacatttatcgtattaaataagaaccggaccatatttcgtttcaacgcagcgtcgattctgtgcactctgagtccgttcaactgcatccgccgaacaacgataaaggtgttggtccaccccttcttccagctgtttatactgatcagcgttttaatcgattgtgtgttcatgagtctgacgaatcttccaaagtggcggcctgttctggagaacaccttactaggcatttacacatttgagatcctcgtgaaactttttgcccgaggagtgtgggccggatctttctcatttttaggggatccgtggaattggttagacttctcagtcaccgtgttcgaggttatcattcgatattccccactggacttcatcccaacactacagactgcaaggactctacgtatcctcaaaatcatacccttaaaccaggggctgaaatcactcgttggggtgttaatacactgtctcaaacagctcatcggtgtaattatcttgacgctgttcttcctgagtatattctctctgatcggaatgggactgtttatgggcaacctgaaacataaatgttttcggtggccccaggagaatgagaacgagactctccacaataggaccgggaacccttattacattcgggaaaccgaaaatttctactatctggagggggagcggtatgccctactgtgcggcaaccgtaccgacgctggtcagtgccctgaggggtacgtgtgcgtcaaggctggaattaatccagaccagggcttcacgaactttgactctttcggctgggcactttttgctctgttcagactgatggctcaggattatccagaggtcctctaccatcagatcttatacgccagcggaaaggtttacatgattttcttcgtggtcgtctctttcctgttctccttttacatggcatctctctttctcggaattttagctatggcctatgaggaggaaaagcagcgcgtgggagaaatttctaagaaaatcgaaccaaagttccagcagaccggaaaagaacttcaggaaggcaacgagacagacgaggctaaaacaatacagattgaaatgaagaagaggtccccaatttccactgacacttccctagatgtgctcgaagacgccaccctgcgccataaggaggaacttgagaaatcaaaaaaaatttgtcctttatactggtacaaattcgcaaaaactttcttgatttggaattgctccccttgttggctgaagcttaaagaatttgttcacagaattatcatggctcctttcactgatctcttcctcatcatttgtattattctcaacgtatgtttcctgaccctagagcactacccaatgagtaagcaaaccaacaccctcctgaatatcggtaatcttgtctttatcgggatctttactgcagaaatgattttcaagattattgccatgcatccctacgggtattttcaggtcggatggaacattttcgatagcatgattgttttccacggcttgatcgaactctgcttagcgaacgtggctgggatggctctgttgcgactgtttaggatgctcaggatcttcaagctaggcaagtattggcccaccttccagatcctcatgtggtctctgtccaattcatgggttgccctgaaggatctggtgctgttgctatttaccttcattttcttttcggctgcctttggaatgaaactgttcgggaaaaactacgaagaatttgtgtgccacatcgataaagactgtcagttacccagatggcatatgcatgacttctttcacagttttcttaatgtgtttaggatcctttgcggggaatgggtagagacgctttgggattgtatggaggtcgccggccagtcatggtgtatccctttttacctgatggtgattcttatcggcaacctcctagtgttatatctgttcttagcactcgtcagcagcttttcctcatgtaaggacgtaactgctgaagagaataatgaggcaaaaaatttgcagctcgccgtcgctagaatcaaaaaagggataaattacgtactattgaagattttgtgtaagactcagaacgtaccgaaggacaccatggaccacgttaacgaagtgtatgtgaaagaggacatctctgatcataccctgtccgaacttagtaacactcaggattttttaaaggacaaagagaagtccagcggcactgagaagaacgcaaccgaaaacgaaagtcagagcctcatcccgtctccctcagtgagcgagaccgtacccattgccagtggggaaagcgacatagaaaatctcgacaataaggagattcaaagcaaatcaggcgatggaggcagtaaatag

SEQ ID NO: 205520 - DNA, 1209 bp, synthetic construct
  misc_feature 1..1209: note = Description of Artificial Sequence: Synthetic coding sequence
  source 1..1209: mol_type = other DNA
atgctggccagccccgagcccaagggcctggtgcccttcaccaaggagtctttcgaactgattaaacagcatatcgcaaagactcacaacgaagaccatgaagaggaggatctgaagcctaccccagacctagaggtaggcaaaaagctccccttcatctacggcaatctgtctcagggtatggtgtcagagcctctggaagacgtagacccatattattacaagaaaaagaacaccttcattgtattaaacaagaaccggacgatcttcaggttcaatgcagcttctatcttgtgcaccctgtctccctttaactgcattaggcgcaccactataaaggtcctggtgcatccatttttccaactcttcattctaatctccgtactgattgactgtgtctttatgtcactcaccaacttaccaaagtggaggcccgtgctggaaaatacactgctcgggatctatacattcgagatcctcgttaaactgtttgcccggggcgtctgggctggtagctttagcttccttggggatccttggaactggctggacttctccgttaccgtatttgaggtgattatacgctactccccactggatttcatccccaccctgcaaacggcccgcacactgaggatcctcaaaataatcccactgaaccagggacttaaatccttggtaggggtgttgattcattgtctcaagcagcttattggggtcatcattcttacgctctttttcttgtctattttcagccttatcggcatgggcctatttatgggaaacctgaagcataagtgcttccgttggccccaggaaaatgaaaatgaaacgttgcataatcggaccggtaacccttactatataagggaaactgagaatttctactatctggagggggagagatatgcccttctctgtgggaatcggactgacgcgggccaatgtccagaaggttacgtttgcgtgaaggctggaatcaaccctgatcagggtttcacgaacttcgacagtttcggctgggccctgtttgcgctgtttcgacttatggcccaagattatcccgaagtactctaccatcagatcctgtacgctagcggcaaagtgtacatgattttttttgtcgtcgtttccttcttgtttagtttttacatggcctccctcttcctcgggatcctggcgatggcctatgaagaagagaaacagtag

SEQ ID NO: 205521 - DNA, 5871 bp, synthetic construct
  misc_feature 1..5871: note = Description of Artificial Sequence: Synthetic coding sequence
  source 1..5871: mol_type = other DNA
atggagttccccatcggcagcctggagaccaacaacttccggcggtttactccagagagtctggtggaaatcgaaaaacagatcgctgccaagcagggaactaagaaggcacgcgagaaacatcgggaacagaaggatcaggaagagaaaccgcggccgcagctggaccttaaggcttgcaaccagctacctaaattctacggtgagctgccggctgagctcatcggagagccgcttgaagacttggatcccttctacagcactcacaggacctttatggtcctgaacaagggaaggacaatcagcaggttctccgcaacccgggccttgtggttatttagcccctttaacctaattagaaggacagccataaaggtgagcgtccattcttggttctcattgttcatcactgtcacaatcctggtgaactgtgtttgcatgacacggacagatttgcccgaaaaaatcgagtatgtctttacagtaatttataccttcgaagccctaatcaagatactagcacgtggattctgcttgaacgaatttacctacctaagggacccttggaactggcttgacttctccgtcattactttagcgtatgtcggaaccgctatcgatctacgtgggatttcagggctcaggaccttcagagtgctcagagctctgaagactgtgtccgtgattcccggcctgaaggtcatcgtgggtgccctcattcatagcgttaagaagttagccgacgtgacaatcctcacgattttctgcctatctgtttttgcattggtaggcctacagttatttaagggaaatcttaaaaacaagtgtgtgaagaacgatatggctgttaatgaaacaaccaattacagcagccacaggaagccagacatatacattaacaagcgcggtacctccgatccgctgctgtgtggaaatggatcagactctggccactgtcctgacggctacatctgtctgaagacgagtgacaatcctgacttcaactacacctcttttgatagttttgcttgggcttttcttagtctcttccggctcatgacccaggactcatgggagcggctctaccagcagactcttcgcactagtgggaaaatttacatgatcttcttcgtcctggttattttcctagggagcttttatctagtgaacttgattctggccgtggtgaccatggcatacgaagaacaaaatcaagctaccaccgatgagatcgaggcaaaagaaaagaagtttcaggaggcactagaaatgctcaggaaggaacaggaagtgcttgccgctttggggattgacaccacgtcgctccatagtcacaatggatctccgctgacttcgaagaacgcaagtgaaagaaggcatcggatcaagccccgggtctctgaaggctctacggaggataacaagtcccctcggagcgatccctacaaccagcgccgcatgtccttcttggggctcgccagtggcaagcgaagggcctcccacggctccgtgttccacttccgaagtcccggccgagatatttcactgccggaaggagtgactgacgatggcgtgttccctggtgaccacgagtctcataggggctcactactgctcggagggggcgccggacagcagggccccctgccacgcagcccgcttccacaaccttccaatcccgacagccgccacggagaggacgagcaccagcctccccctactagcgagttggcaccgggcgcggtggatgtgagcgcttttgacgccgggcagaagaaaactttcctctccgcagagtaccttgacgagccatttcgcgcccagcgggccatgtctgttgtttctattatcaccagcgtacttgaagaattggaagagtccgaacaaaagtgccctccttgcttaacctcacttagtcagaagtatttgatttgggattgctgtccaatgtgggtgaagctcaagactatactgttcggactggttaccgatccctttgctgagttgactataaccctgtgtattgtggtgaataccatctttatggccatggagcatcatggaatgtcacccaccttcgaggccatgctccagatagggaatatcgttttcactatcttctttaccgcagagatggtttttaaaataatcgccttcgatccatactactactttcagaaaaagtggaatattttcgactgtattattgtgaccgtgagtctgctcgaacttggagttgccaagaagggctccttgagtgtgcttcgaagctttcgtttgctcagggtgttcaagctcgccaagtcttggcctacattgaacacactcatcaagataatcggcaatagcgttggggcccttggaaacctgacaattattctggctattatagtgtttgtcttcgcactggtcgggaaacagctgctgggcgagaactacagaaacaatcggaagaacataagtgctcctcacgaagactggccgaggtggcatatgcacgactttttccattcctttttgatcgtgttccgtatactatgtggcgaatggattgaaaatatgtgggcctgtatggaggtcgggcagaaaagtatctgtttgatcctctttttgactgttatggtcttgggtaatctggtggtgttgaacctgtttattgcactcctgctaaattctttttcggccgataatcttaccgctcccgaggacgacggcgaagttaacaacctgcaggtagccttggcccgcatccaagtcttcggccataggaccaagcaggccctctgctccttcttctcccgctcctgccctttcccccaacctaaagccgagcccgaactcgtcgtaaagctccccctttccagcagcaaggctgagaaccacatcgcggcaaacactgcccgcgggtcttcagggggattgcaggctccccgcggacctagagatgaacattcggactttatcgctaatcctacggtttgggtgagtgtgcctatcgcagaaggtgagtctgatctcgatgacctggaggatgatggaggagaggacgcccagtcatttcaacaggaggtgattcctaaaggacaacaagagcagctgcagcaggtagagaggtgtggagaccacctgacaccgagaagcccgggaaccggaacaagctctgaagacctcgctcccagtcttggggaaacttggaaggacgagtctgtcccacaagtgcccgccgagggcgtggacgacacttcttcttccgagggttctactgtggactgtctggacccagaggagatactgaggaagatccctgagttggcagacgacctagaggaacctgatgattgttttactgaggggtgtatcagacattgcccctgttgcaaactcgacactacaaagtctccatgggatgtaggatggcaggtgcgaaaaacttgctatcgcattgtggagcatagctggttcgaaagcttcattatcttcatgattctgctgtcaagcggcagcctagcctttgaggactactacctagatcagaagcctaccgtgaaagcattgctggagtatactgatagagtgttcacctttatctttgtgtttgaaatgctgttgaagtgggtggcatacgggtttaaaaagtactttaccaacgcctggtgttggctcgattttctcatcgttaacatttcactcatctccctaacagccaagattctagagtattctgaagtggcacctatcaaggccctaagaacattacgtgctttgcgcccactgagggccttgtcaaggttcgagggtatgagggtcgtagtagatgctctggtgggtgcgattccgtccatcatgaatgtgctgcttgtctgtcttatcttctggctcatcttcagcatcatgggagtcaacctgttcgccggcaagttctggagatgcataaactacaccgacggggagttttcattagtgcccctgtccatcgtaaataataagtcggactgtaaaatccagaattccaccggctcttttttttgggtcaacgtgaaagtgaactttgacaacgttgcgatgggctacctggccctgcttcaggtcgctacattcaagggttggatggatattatgtatgctgccgtggattccagggaagtgaacatgcaacccaaatgggaagacaacgtttacatgtatctatacttcgtcattttcatcatctttgggggattttttacccttaacctgtttgtgggggtgataattgacaatttcaatcagcaaaaaaagaagttggggggacaggatatctttatgacagaggagcagaagaaatactacaatgctatgaagaagctgggatccaagaagccacagaaacctatccctagacccttgaataagtttcagggcttcgtcttcgacattgtgacacgccaggccttcgatataacaattatggtcctgatctgcttgaacatgatcacgatgatggttgagacggacgatcagagcgaagagaagaccaagatcctcggcaagattaaccaatttttcgtggcagtgttcaccggggaatgtgtgatgaagatgtttgccctgcgccagtattacttcacaaacggatggaacgtgttcgacttcattgttgtggttctcagcatagcaagcctgatctttagcgccatcctgaagagcctacagagttatttttcccctacgcttttcagggtcatcaggttggctcgtattgggcgaattctgagactgatcagagccgccaaggggatccggacgctcttattcgccctaatgatgtccctgcctgccttattcaacatcggtttgctgttgttcctagtcatgttcatttatagcatctttggcatgagttcttttcctcacgtccgatgggaagccggcattgacgatatgttcaacttccagacattcgccaattcaatgctctgtctttttcagatcaccaccagtgcgggatgggacggactgctcagtcccattctgaacaccggaccaccctactgcgatccaaatctcccaaatagcaacggaaccaggggcgattgcggctctccagcagttggaatcattttcttcactacatatataatcatttcgttcttgattatggtgaatatgtatatcgcggtcattttagagaacttcaatgttgccaccgaagagtcaacagagcccttatctgaagatgactttgatatgttctacgagacttgggaaaaattcgatcccgaagctacacagttcattacatttagcgccttgagtgacttcgcagacacacttagcgggcctctgcgcattcccaagccgaacagaaatattctgattcagatggatctgcctcttgtgcccggtgacaagatacactgtcttgacatactgtttgctttcaccaagaacgttctgggtgagtcgggtgaactggactctctaaaggcgaatatggaggaaaaatttatggccaccaacctatcgaaatcaagttacgagcccatcgcgaccactcttcgctggaagcaagaggacatctccgccactgtcattcaaaaagcctaccggtcttacgtgctgcacaggagcatggcactttctaacaccccttgtgtccctcgagcggaagaggaggccgctagtctaccagatgaagggttcgtggctttcacggccaatgagaactgcgtactacccgacaagtccgagacagcaagtgctacatcattccccccctcatatgaatcagtgaccagggggctcagcgacagagttaatatgcggactagtagttcgatccagaatgaggacgaggcaacttcaatggaactcattgccccaggtccttag

SEQ ID NO: 205522 - DNA, 5376 bp, synthetic construct
  misc_feature 1..5376: note = Description of Artificial Sequence: Synthetic coding sequence
  source 1..5376: mol_type = other DNA
atggacgaccggtgctaccccgtgatcttccccgacgagcggaacttcagacccttcaccagtgacagcctggccgctatcgaaaaacgaatcgccatccaaaaggaaaagaagaaatctaaagaccagactggggaggtgcctcagccccgcccccagctggacctaaaagcgagccggaagctgcccaagttgtacggtgatatcccacgggaacttatcggcaagcccttagaagacttggaccccttctataggaaccacaagacattcatggtcttgaacaggaagcgcaccatctacagattctcggccaagcatgcgctgttcattttcggaccattcaatagcattcgctccctcgcaatccgcgtgtccgtgcactcactgttttctatgttcataatcgggaccgtgatcattaattgtgtgttcatggccactggccctgccaagaattccaatagtaacaacacggacattgcagagtgtgtctttaccggcatctatatttttgaagcccttataaaaatcctggccagaggcttcatactcgacgagtttagctttctcagagacccatggaattggctggattccatcgtaatcgggatagctattgtgtcttatatcccgggaattaccatcaagctgctgccactccgcacatttagggtattcagagcccttaaagctatctctgtggtgagccgtctgaaagtaatagtgggcgcccttctgcggtccgttaaaaaactcgtaaacgtgatcatactgacgtttttttgtctgagcatattcgcgttggtgggccagcagctctttatgggttccttgaacctcaagtgtatttcgcgggactgtaagaatatctccaaccccgaggcttatgatcactgtttcgagaagaaggaaaacagtcccgagtttaagatgtgcggaatatggatgggcaactccgcctgctcaattcagtatgagtgcaagcacacaaaaatcaaccctgattataattacaccaacttcgataatttcgggtggtcttttctcgcaatgttccgcctcatgacacaagacagctgggagaagctctatcaacaaaccctgcggactacaggattatattctgtgttctttttcattgtagtcatatttctgggttctttctacctgatcaatcttaccctcgccgtggtgacaatggcttacgaggagcagaacaaaaacgtggcagccgagatagaggcaaaagaaaaaatgttccaggaggcacagcagctcctgaaggaagaaaaagaagcgttggtggcaatgggtatagatagaagctctcttacatccctggagacgagctactttactccgaagaaacgaaagcttttcggaaataaaaaaagaaaatccttttttctcagggagtcgggcaaagaccaacccccgggatccgatagtgacgaagactgccagaaaaaaccccagctcttggagcaaacaaaaagactgtcccagaacctcagcctggaccactttgacgagcatggggatcctttgcaacggcaaagggccttatccgctgtctccatactgaccatcaccatgaaggagcaggagaaaagccaggagccatgcctcccctgcggcgagaatctggccagcaagtacctggtctggaactgttgccctcaatggctgtgcgtgaaaaaggtgttgagaacagtgatgactgatcccttcaccgaacttgccatcacaatctgcatcatcataaacaccgtgtttctggcgatggagcaccataagatggaagcatcattcgaaaagatgctgaatatcgggaaccttgttttcacctcaatctttatcgcagaaatgtgtctgaaaattatagcgttggacccttatcactactttcggaggggatggaatatattcgattctattgtcgccctactcagctttgcggacgtaatgaactgtgtgctgcaaaagaggagctggccatttctgcgaagcttcagagtcttgcgagttttcaaactagccaaaagctggcctaccctgaatacactcataaaaatcatcggcaactcagtgggggccctgggatcactcacagtagtgctggtaattgtaatctttatttttagcgtggtcggcatgcagttgttcggccgttcatttaacagccaaaaaagccccaaactctgcaatcccaccggacccactgtgtcctgtctgagacactggcacatgggagacttttggcattcgttcctggtggtgttccggatcctgtgtggggagtggatagagaacatgtgggagtgcatgcaggaagcaaacgccagtagttccttatgcgttatcgtctttatcctgatcacagtgatagggaaactggtcgtccttaatctcttcattgcattgcttctaaatagctttagcaatgaggagaggaacgggaatttggagggcgaggcccgcaaaaccaaagtgcagctggccctcgacaggttcaggagggcattttgcttcgttcgacatactttagagcacttttgccacaaatggtgcaggaaacagaaccttcctcagcagaaggaagttgcaggggggtgcgctgcgcagagcaaagacatcatacctcttgtgatggagatgaaaaggggaagcgagactcaggaagaacttggcattctcacatccgtgccaaagacgttaggcgtacgtcacgattggacctggctggctcctctcgctgaagaggaagatgatgtcgaattctccggcgaagataacgcccagcgaatcacccagcccgagcccgagcagcaagcctatgagctccatcaggagaataagaagcccactagccagcgcgtccagtctgtggagatagatatgtttagcgaggacgagccacatctgacaatccaggatccccgcaagaagtctgacgttaccagtattctcagcgaatgctccacaatcgatctgcaggatggatttggatggctgcctgaaatggtgcctaagaaacagcccgaacggtgcttgccaaaggggtttggctgttgttttccatgttgtagtgtggataagcggaaacccccctgggtaatctggtggaatttgcggaagacctgttaccagatagtcaagcactcttggttcgagtctttcattatttttgtgattttgctctccagcggggccctcatttttgaagacgtccacctggagaaccaacccaagatccaggaacttctgaactgcacagacattattttcacccacatctttatccttgagatggtgcttaagtgggttgcattcggcttcggtaagtacttcacaagtgcatggtgctgtctggattttatcatagtcatcgtgagtgtcactaccctgattaaccttatggagctgaagagtttccggactctgagagccctgcgcccacttcgggctcttagccaatttgagggtatgaaggtggtggtgaacgctttgatcggcgctattcctgccatcttaaatgtgctgctcgtctgtctgattttttggctcgttttttgtattttgggggtttatttcttcagcgggaagttcggcaagtgtattaatggcactgatagcgtgattaattatactatcatcacaaacaaaagtcagtgtgagagcgggaatttctcctggataaaccaaaaagtcaacttcgacaatgtggggaatgcatatctcgcccttcttcaggtggcgacttttaaagggtggatggacataatctacgccgccgtagattctacagagaaagaacagcaacctgagttcgagagcaatagcctgggctacatctattttgtggtgtttatcatttttggatctttctttacattgaatctgttcataggggtgattatagataactttaaccagcagcagaagaagctaggaggccaagatattttcatgacggaagagcagaagaagtactacaatgccatgaagaaactcggatctaaaaaaccccagaaacctattcccagacctttaaataagtgccagggcctggtttttgatatcgtgacctctcagattttcgatatcatcataattagtctgattatactgaacatgatttctatgatggccgaaagctacaatcaaccgaaagcgatgaagtcaattctcgatcacctgaattgggtgttcgttgtgattttcaccctggagtgtcttatcaaaatttttgccctgagacagtattacttcacaaatggctggaacctctttgattgcgttgtcgtccttttatctattgtgtccacaatgatttcaactctggagaatcaggagcacatccccttccctccgaccttgttcaggatcgtgagactggcaaggatcggccgcatactgcggctcgttagggcagcccgaggcattcggaccctgttgtttgcgctcatgatgagtctgccttcattgtttaatattggcctgctgctgtttctgatcatgtttatatatgcaattctaggtatgaattggttcagcaaagtcaaccctgagtctggcatcgatgatatcttcaatttcaagacattcgcttccagcatgctttgtctgttccaaatctccacatctgctggatgggactctctcttgtcaccgatgctcagaagtaaggagtcctgtaactcatcctctgagaactgtcacctgcctggaatcgccacgtcttacttcgtctcctacatcatcatcagctttttaatcgttgtgaacatgtatatcgccgtcatactggagaacttcaacaccgctacagaggagtcagaggacccactgggcgaagacgactttgacattttttatgaggtctgggagaaattcgaccccgaagccacccagtttataaagtattccgctttgtctgactttgccgacgctttaccggagccgctgagagtggcgaaacccaacaaataccagttcctcgttatggacctgcccatggtgagtgaagaccggcttcattgcatggacatcttgtttgcattcaccgctagagtccttgggggatctgacggactcgattctatgaaagctatgatggaggagaagttcatggaagcgaacccattgaagaaactttacgaacccattgtcactaccacaaaacgcaaagaggaggagaggggggcagccatcattcaaaaagctttccgcaagtatatgatgaaggtcactaagggggaccagggagatcagaatgatctcgaaaatggacctcacagcccgctgcagactctgtgcaatggcgacctgtcttctttcggtgtagctaagggtaaggttcactgcgactag

SEQ ID NO: 205523 - DNA, 4335 bp, synthetic construct
  misc_feature 1..4335: note = Description of Artificial Sequence: Synthetic coding sequence
  source 1..4335: mol_type = other DNA
atggacgaccggtgctaccccgtgatcttccccgacgagcggaacttcaggccctttacgtcagactctctcgctgcaatcgaaaaacggattgcaatccagaaggaaaaaaagaagtccaaggaccaaaccggcgaagtgccccagccacgccctcaactcgacctgaaggcaagtaggaagctgccaaagctgtacggagacattccacgcgagctaattggtaagcccctggaagacctcgatcccttctataggaaccataaaacttttatggttctgaatagaaagcgtacaatttataggttctccgctaaacacgctctgttcatatttggcccgttcaacagcattaggtctttggcgattagggtgtccgtccactctctgttcagtatgttcatcatagggaccgtcatcattaactgtgtctttatggccacaggcccggctaaaaatagtaattcaaataataccgacattgcagagtgtgtcttcaccggtatctacattttcgaggccctcatcaagatcttagctcgtggcttcatcctcgatgagtttagcttcctgagggatccttggaattggctggactccatcgtcattggaattgctatcgtttcttatatccccgggattacaatcaaattactgccacttagaacttttcgcgtattccgggccttaaaggcaattagcgtggtctccaggcttaaggtgattgtgggtgcgttgctgcgatctgtcaaaaaattagtgaacgtgattatcttgacatttttttgcctttcaattttcgctctggttggacagcaacttttcatgggctccttgaacttaaaatgtatatctcgcgactgtaaaaatatatccaatcctgaggcttacgatcactgtttcgagaagaaagaaaattcacctgaattcaaaatgtgcggaatttggatgggtaatagcgcatgcagtatccagtatgagtgcaaacataccaaaattaaccccgactacaactacaccaatttcgacaacttcggctggtcttttctcgcaatgttccgcctgatgacccaagatagctgggaaaagttgtaccagcagaccctccggaccacaggcctgtactccgtgttcttttttatcgtggtaatcttcttgggcagcttttacctgattaatctgactcttgctgtggtcacaatggcatacgaagagcagaataaaaatgtcgccgccgagatcgaggctaaggaaaagatgtttcaggaggcccagcagctgctgaaagaggagaaagaggccctcgtcgccatgggcatcgatcgctcctctctaacaagcctggagacatcatattttacgcctaagaagagaaaattatttggaaacaaaaagagaaagtctttttttctacgcgagtccggcaaggaccagcctcctggcagtgatagcgatgaagattgtcagaaaaagccccagcttttggaacagaccaagcgattgtcacaaaacctgtccttggaccacttcgatgaacatggggatccattgcagagacagagggccctgagtgcagtttctatcctcacgattaccatgaaggagcaggaaaagtcgcaggagccttgtctgccatgcggagagaatctagcttcaaagtatctggtatggaactgctgcccgcagtggttatgtgtcaagaaggtgcttcgcaccgtgatgacagaccctttcaccgagttggctattacaatctgtatcattataaatactgtgtttctggccatggaacaccataagatggaggcctcatttgagaaaatgcttaacatcgggaatctcgtgttcacaagtatctttatagccgagatgtgcctgaagattatcgctctggacccttatcattacttcaggcgcggctggaatattttcgacagtattgtggccctgctttcgtttgcggacgtgatgaactgtgtactgcagaagagaagttggccctttctgagatcttttcgtgtactgcgtgtctttaagttggctaagagttggccgacactcaacacacttatcaaaatcatcgggaacagcgtaggggcattgggtagcctgactgtggttcttgtgatcgtgatatttatcttttctgttgtaggaatgcagctgttcggcaggtccttcaactctcagaaaagccccaaattatgtaaccctacaggacccactgttagctgcctgcggcactggcacatgggggacttctggcacagtttccttgtggtttttcgtattctctgcggcgagtggatcgaaaacatgtgggagtgcatgcaggaggcgaatgctagcagcagcctgtgcgtcatagtgtttatcctgatcactgtgattgggaaattggttgtcctcaacttgtttatagcacttctgttgaactctttctcgaacgaagagcgaaatggcaacctagagggtgaagcaagaaaaacgaaagtgcagcttgcgctggatcgcttcagacgcgcgttctgcttcgtgagacacaccttagagcatttctgccataagtggtgtcgaaagcagaatctgccacagcagaaagaggtggcaggaggatgtgccgcacagagtaaggatattatcccactggttatggagatgaaacgaggatccgagacccaggaagaacttggaatactgacctctgtcccaaagacactcggcgtgaggcacgattggacgtggctagcccccctggctgaagaggaggatgatgttgaatttagtggtgaggataacgcacagaggatcacacagcccgaaccagaacagcaggcctatgaactgcatcaggagaacaagaagcctacatcccagagggttcagtccgtggaaattgacatgtttagtgaagatgagccacatttgaccattcaggacccaagaaaaaaatcggatgtgacctccattctgagtgagtgctcgacaattgacttgcaggatggcttcgggtggctgcctgaaatggtgcctaagaagcagcctgaacgttgccttcctaaaggattcggatgttgctttccttgctgcagtgtggacaagagaaaacctccttgggtgatttggtggaacctacggaagacgtgttatcagatcgtgaagcattcttggtttgaatctttcattatcttcgtgatccttctgtctagtggtgccttaatttttgaggatgtgcacctggaaaaccaaccgaaaatccaggagctcctgaattgcactgatattatctttactcatatttttatcttggaaatggtattaaagtgggtagcttttgggttcggcaaatacttcacctcagcctggtgctgtctggactttattatagtgattgtgagcgtgaccaccttgattaacctgatggagctgaagtctttccgtactctacgcgccttgcggcccctgagggccttatcccagtttgagggtatgaaggttgtggtgaatgccctaattggggcaattcctgctatactaaacgttcttcttgtctgcctgattttttggttggtgttctgcatcctgggtgtgtactttttttctggcaagtttggtaaatgtataaatggaactgacagcgtgatcaactacaccatcattacgaacaaaagccaatgtgagagcggaaattttagttggatcaaccagaaggtgaatttcgacaatgtaggcaatgcctacctggccctgttgcaagtcgcaaccttcaaagggtggatggatattatctacgcagccgtggatagcacagagaaggagcaacagccagagttcgagtcaaattccctcggctatatctattttgtggtttttattatatttgggtcattttttacgcttaacctgtttatcggggtgattattgataattttaatcaacagcagaagaaactgggggggcaagacatctttatgacagaagagcagaaaaagtactacaacgccatgaaaaagttaggctccaagaaacctcagaaacccatccctaggccactgaataagtgtcaggggctggtcttcgacattgttacctcgcagatcttcgacattataatcatctctttaataatcctcaacatgattagtatgatggccgagtcctacaaccagccaaaggccatgaagagcatcctggaccatctaaattgggtgtttgtagtcatattcacgctcgaatgccttatcaaaatcttcgccctgcgacagtattacttcaccaatggctggaatcttttcgattgcgtggtggtgctgctgtccattgtctcaaagtag

SEQ ID NO: 205524 - DNA, 5376 bp, synthetic construct
  misc_feature 1..5376: note = Description of Artificial Sequence: Synthetic coding sequence
  source 1..5376: mol_type = other DNA
atggacgaccggtgctaccccgtgatcttccccgacgagcggaactttaggccgtttacttcggacagtcttgctgctattgagaaacgcatcgcaatacaaaaagagaagaagaaaagcaaggaccaaaccggcgaggtccctcagcctcggcctcagctggaccttaaggccagcagaaaactgcccaagctctatggtgatatcccacgcgaactgattggcaaaccgttggaggacctggaccccttctatcgcaatcataagacgtttatggtcctgaatcgaaagcgtaccatctacagattctcagccaagcatgctctgtttatctttggaccctttaattcaatacggagtcttgctatccgcgtgtccgtgcactcccttttcagcatgttcataataggcactgtcatcatcaactgtgtgttcatggccactggtcccgctaaaaattcaaattccaacaataccgacatagcagagtgtgtgttcactgggatatatattttcgaagcactgataaaaatcctagcgagggggtttatcttggacgaatttagcttcctccgagacccatggaactggctggattccatcgtcatcggtattgctatcgtgtcctatatcccaggcataaccattaaactcctccccttgcggactttcagagtcttccgggccttgaaggcaatatccgtggtttcccgcctcaaagtaatagtcggcgcactgttaaggagtgtcaaaaagcttgtaaatgtcataatcttaacctttttctgcctaagcatctttgcgttggtggggcagcagctgtttatgggatcacttaatttaaaatgtataagccgggactgcaagaatatctctaacccagaggcctacgaccactgctttgagaagaaggagaacagtcccgagtttaaaatgtgtggaatctggatgggcaattccgcctgcagtatccagtacgagtgtaaacacacaaagattaatcccgattataattataccaattttgataatttcggctggtccttcctggccatgtttcgactcatgacccaggatagttgggagaagctgtatcagcagaccctgcggaccactgggctgtattctgtatttttctttatcgtggttatattcctgggcagcttttatctcatcaacttgactcttgctgtcgtaacaatggcgtatgaggaacagaataagaatgtggccgcggagatcgaggccaaggagaagatgtttcaggaggcccagcaactcctcaaggaagagaaagaggctcttgttgccatgggcatagacaggtcatctctgacttccttggagacaagctacttcacgcccaagaagagaaagctgttcggaaacaagaagcgtaaatcctttttcctgcgggaaagcggcaaggatcagcccccagggtctgatagtgacgaggactgtcaaaagaagcctcaactactcgagcaaacgaaaagactgtcacagaacctttccctcgatcacttcgacgaacacggggatcctctgcagaggcaacgggcgctgtccgcagtgagcattctgaccattactatgaaagaacaggagaagagccaggaaccttgcttgccgtgtggggagaacctggcatcaaagtacctcgtctggaattgttgtccccaatggctgtgcgtcaaaaaggtgctgcggacggtcatgacagatccttttacggagctcgcaattacaatctgtattattatcaacaccgtcttcttggctatggagcaccacaaaatggaagcctctttcgaaaagatgctgaatattggtaatctagtgttcaccagtattttcattgctgaaatgtgcttgaaaataatcgcactcgatccctaccattattttagacgtggctggaatatattcgactcaatcgttgcgctgttgagtttcgccgacgtgatgaactgtgtcctgcagaagcggtcttggccattcttgagaagcttccgagtccttcgagtttttaagttagccaaatcatggcctactcttaataccctgatcaaaatcatcggtaacagtgttggcgctctaggttcattgacagtcgtcctggttatcgtgatctttatctttagtgtggtgggcatgcagctatttggacggtcgttcaattctcaaaagtccccgaaactctgcaacccaactggccctaccgtcagttgtcttcggcactggcacatgggagatttctggcatagcttcttggtggtgttccgcattctgtgtggagagtggatcgagaacatgtgggagtgtatgcaggaggccaacgctagctcctctttgtgcgttattgtctttatcctgatcactgttatcggaaagctggtggtgctgaatctgttcatcgctctcctcttgaacagtttctctaacgaagaacggaacggtaacttggagggtgaggctcgaaagaccaaagtccagttagctctagaccggtttcggcgcgctttttgttttgtgaggcataccctggaacatttttgccacaagtggtgtcgaaagcagaacctgcctcagcagaaagaggtggcagggggatgcgccgcccagagtaaggatatcatcccccttgtgatggaaatgaaacggggcagtgagacccaggaggagttagggatcttgacctccgtgccgaagactctgggcgtgcggcacgactggacatggcttgccccacttgccgaggaagaagatgatgtcgagttttctggggaggataatgcccagaggatcacgcaaccagagcctgaacagcaagcctacgagctgcatcaggagaataaaaaacctaccagtcagagggtccaaagcgttgagattgatatgttcagtgaagatgagcctcatttgaccatccaagatcctaggaagaagtccgacgtaacatccatactgagcgaatgctccaccattgacctgcaagacggcttcggctggctgcccgagatggtgccaaaaaaacagcccgagcgctgccttcctaagggattcggctgttgtttcccatgttgctcggtcgataaacgcaaacctccgtgggtgatttggtggaacttacgtaagacatgttatcagatcgttaagcacagttggttcgaatccttcattattttcgtcatcctgctgtcgtctggcgcgcttatattcgaggacgttcatctggaaaatcagccgaaaattcaggaactcctcaactgcacagacataattttcactcatatattcatcctggagatggtgctaaagtgggttgcatttggtttcggtaagtatttcacctccgcgtggtgttgtctcgacttcatcatagtgattgtgtccgtgaccacccttatcaatctgatggaactgaagtccttccgaacccttcgcgccttacgtccgcttagagcgctgtctcagtttgaagggatgaaagtcgtggtaaacgcgctgatcggggctattccagccatcttgaatgtgctgctggtttgtctaatcttttggctggtcttctgtattcttggcgtgtacttcttctctggtaaattcggcaaatgtataaatggaaccgacagcgtgatcaattacacaatcatcactaacaagagccagtgcgagtccggcaatttctcttggattaatcagaaggtgaatttcgataatgtcggaaacgcatatctggctctcctgcaagtggccacgttcaaggggtggatggatataatttatgctgccgttgactctacagagaaggaacaacagccagaattcgagagcaattccctaggctatatttactttgtggtcttcatcatcttcgggtcattcttcaccctgaacttgtttattggcgtcatcatagacaacttcaatcagcagcagaagaaactcggcggtcaagacatatttatgaccgaagaacagaaaaagtactacaacgccatgaaaaaactcggctccaaaaagccacaaaaacccattcctcgccccctaaacaaatgtcaggggctcgtgttcgatattgtaacctcacagatattcgatattattatcatctctctgattatattgaatatgatttctatgatggccgagagttacaaccaacccaaggcaatgaaaagcattctggaccacctgaactgggtgtttgtggtgatttttacattggagtgccttattaagatcttcgcccttcggcagtattatttcacgaacggttggaatttgttcgattgtgtggtggtcctgctgtctatagtgtcaaccatgatcagtaccctggaaaaccaagagcacattccatttccccccactttgttccgcatcgttagactggctcggatcgggaggattctgagactggtccgagccgcacggggcatccgtacactcttgtttgcccttatgatgagcctgcctagcctctttaacatcggactgttgctctttctgattatgttcatttacgccattcttggcatgaactggttctcaaaagtcaaccccgaatccggaattgatgacattttcaactttaagacattcgcctctagcatgttgtgtttattccaaatctcaactagtgcaggctgggatagcctcctctcaccaatgctgcggtcaaaggagagctgcaactctagttctgagaattgccacttgcctggcattgccaccagctattttgtgtcctacatcattataagcttccttatcgtggtgaatatgtacattgctgtgatcctggagaacttcaacacggcaaccgaggagagtgaagaccccctaggggaagacgattttgacattttctatgaggtctgggaaaagttcgacccagaagcaactcaattcataaaatactcagccttgagcgattttgctgatgcgcttcccgagcccctgcgcgtggctaaaccgaataagtatcagttcctggtcatggatctgcctatggtcagcgaagaccgcctgcactgtatggacattctgtttgcatttaccgctcgagtgctcggaggaagcgacgggctggacagcatgaaggctatgatggaagagaagttcatggaggccaatcctctgaaaaaactctacgagcccattgttacgaccactaagaggaaagaagaggagagaggcgctgcaatcatacagaaagcctttagaaagtatatgatgaaggtgacaaaaggagaccagggcgaccagaacgatttggaaaacggccctcattccccccttcaaaccttgtgcaatggcgacttatcatcatttggagtagctaaaggtaaagtgcactgcgactag

SEQ ID NO: 205525 - DNA, 5217 bp, synthetic construct
  misc_feature 1..5217: note = Description of Artificial Sequence: Synthetic coding sequence
  source 1..5217: mol_type = other DNA
atgctgaagcggaagcagagcagccgggtggaggcccagcccgtgacagatttcgggccagacgaatcactgagcgacaatgccgacattctgtggatcaataaaccttgggtacatagcttgctgcgcatttgtgccatcatttcggttatctccgtttgcatgaataccccaatgacttttgaacattacccaccattgcagtatgtcacatttacactggataccctgctgatgttcctctatacggctgaaatgatcgctaaaatgcatatcagaggaattgtgaaaggcgacagttcttacgtcaaggaccgctggtgtgtgttcgatgggttcatggtgttttgtctttgggtatcccttgtgctccaggtttttgagattgccgacatcgtggaccaaatgtcgccatggggcatgttgaggattccccggccgctgattatgatcagggcctttcggatatactttcgctttgagctgccccgcacccgcatcactaacattctaaagaggtcaggagaacagatctggtctgtgagtatcttcttgctgttctttctgctcctgtacgggattctcggcgtgcagatgttcggcactttcacatatcactgtgttgtgaatgatacaaaacctggtaacgtgacttggaatagtttggccatccctgacacccattgcagtccagagcttgaggaaggctaccagtgcccaccaggatttaaatgtatggatttggaggatctgggcctgtcccggcaggagctgggctatagcggctttaacgagatcggcactagcatctttactgtctacgaagctgcctcacaggaggggtgggtgttcctgatgtatcgcgcaattgactcttttccgcggtggagaagttatttttactttataaccctcatatttttcctagcttggttggtgaaaaacgtattcatcgcagtcataatcgaaacctttgcggagatccgtgtccagttccagcaaatgtggggcagccggtcttccaccacaagcacagccaccacccagatgtttcacgaagacgctgccggaggctggcagcttgtcgctgtggatgtgaataagccccagggaagagctcccgcctgtcttcagaaaatgatgcgatcttctgtcttccacatgttcatactgtccatggtgacagtagacgttatagtcgccgcctcaaactactacaaaggcgagaactttaggaggcagtacgacgagttttacctcgcagaggtggcttttacagtgttattcgatctcgaggccctgttgaaaatctggtgtttgggattcacgggttacatttcctcatccctccataagtttgagcttctgctcgtgatcggcactacactccacgtttacccggatctataccatagccagttcacttacttccaggtcctgcgtgtggtgaggctaatcaagatctctccagctctagaggacttcgtgtacaagattttcggccccggtaagaagttgggttcactggttgtgttcactgcctccctgttaatcgtaatgtcagcgatctctctccaaatgttctgtttcgtagaggaacttgataggttcactacattccctcgggcatttatgtcaatgttccagattctcacgcaggaaggctgggtggatgtgatggaccagactctgaatgctgtgggccatatgtgggccccagtggtggctatttacttcattctgtaccacctgtttgccaccttgattttgctctcgctgttcgtggctgtgattctggacaacctcgaactcgacgaagatttgaagaagctcaagcaactcaaacagtcagaagccaacgctgacactaaagaaaaactgcctctccgtttgagaatatttgagaagtttcccaacagacctcagatggttaagattagtaagctgcctagcgattttacagtgcccaaaatccgcgaaagtttcatgaagcagtttatagaccgccagcagcaggacacctgctgtctcctccgctcacttcctacaacttccagttcatcctgcgatcactccaagcgttctgctatagaggacaacaaatatattgaccagaaacttcgaaagtctgtgttttctatccgggctaggaatctgcttgaaaaagaaacggcagtgacaaagatactcagagcttgcacaaggcagagaatgctgtcaggctcattcgaagggcagccagccaaagaacgctctatactcagtgtgcagcaccacattcgtcaggagagacgctctctaaggcacggtagtaactcccagcggatttcacggggcaaatctctagaaacgctcacccaggaccacagtaacactgtccgatataggaacgcccagcgggaagatagcgagattaaaatgattcaggaaaagaaagagcaagccgagatgaaacggaaggttcaggaagaagaacttcgcgaaaaccacccatactttgataaacctctctttatcgtcggccgagagcaccgcttccgcaatttttgcagggttgtcgtaagagctcggttcaacgcttccaagactgacccagtgacaggcgcagtcaagaataccaagtatcaccaactgtacgacctgttgggtctagtgacatatctggactgggtcatgatcatcgtcacaatatgctcgtgcatttccatgatgtttgagtcaccttttcggcgggtgatgcacgcccccacccttcagattgcagaatacgtctttgtaatcttcatgtcaattgagctgaacctgaaaataatggccgacggccttttcttcaccccaacggcggtgattcgggattttggtggggtcatggacatctttatctatttggtgtccctgatctttctttgctggatgcctcagaacgtccccgcggaatctggggctcagttactcatggtcttgagatgcctgcgtcctctgcgcatcttcaagctcgtgccacagatgcgaaaggtggtgagagaactgtttagcggctttaaagagattttcctcgttagtatattgctcctgacccttatgctcgtcttcgcctcttttggagtgcagctcttcgcaggcaaacttgctaagtgcaacgatccaaacattatcagacgggaagactgcaatggcattttcagaatcaatgtctcagtctcgaagaatctgaaccttaagcttagacccggagaaaagaaacccggtttttgggtaccccgcgtgtgggcaaatcccagaaattttaactttgataatgtgggaaacgcaatgttagctctgtttgaggtgctgtctctgaaaggatgggtcgaagtgcgcgatgtgatcattcaccgcgtcggccccattcacgggatctacattcacgttttcgtcttccttggctgcatgattggcctgactctcttcgtcggcgtggtgatagcgaactttaacgaaaataaaggcactgcattgctcaccgttgatcagagacggtgggaggatctgaagagtaggctcaaaatcgcccaaccgcttcacctacctcctcgtccggacaacgacggttttagagccaagatgtatgacatcacccagcaccccttctttaagcggacgatcgccctgctcgtcctggcacaaagtgtgctactctctgtgaagtgggacgtcgaggatcccgttaccgtgcccctagcaaccatgtcagtcgtgtttacattcatcttcgtgctggaagttacaatgaagataatcgccatgtcgcccgctggtttttggcaaagtcgtaggaatcgctacgatctgctggtgactagcctgggagtggtgtgggtggttctgcattttgccttgttaaacgcatatacgtacatgatgggcgcatgtgtaatcgtgttccggttcttctctatctgtggtaagcacgtcacccttaagatgttgctgctgacagttgtggtatctatgtacaagtcattctttatcatcgtgggaatgttcttattacttctttgctatgcttttgcaggtgtggttctgtttggtacagttaaatacggcgaaaatattaacagacatgcgaacttttcttcagctggtaaagcaattaccgtcttatttcgcattgtgacaggggaggattggaacaagatcatgcacgactgtatggtgcagccccctttttgtactcccgatgagtttacctactgggctactgattgtggtaactacgccggggctctcatgtatttctgctcattctacgtgatcatcgcttacataatgctgaatctgctggttgctattattgtggagaatttcagcctgttttacagtaccgaggaggatcagctgctctcctataacgatctcaggcactttcagataatctggaacatggtagacgacaaacgcgagggcgtgattcctaccttcagggtgaaattcctgctccggcttctgagaggtcggctggaggtagacctggataaagacaagctgctgtttaaacatatgtgttatgaaatggagagactgcacaatggcggcgatgtcacgtttcatgatgtcctaagcatgcttagctatcgttcagtggacatccgcaaatccctgcagttggaggagttactggccagggaacaattagaatatacaatcgaggaagaggtggccaaacagactattcggatgtggctgaaaaagtgcttaaaacgaatcagggccaaacaacagcagagctgttccatcatacattctctgcgcgagtcacagcaacaggagttatcacggttcctgaacccaccatctattgagacaacgcagcctagtgaggacaccaatgcgaatagccaggacaattctatgcagcccgaaacatcgagccagcagcagctgctatccccaacgctttctgaccgcgggggctctcgacaggatgcagcagatgcgggaaaaccccagcggaagttcgggcagtggcggctaccttctgcccctaagccaattagccactcggtttcctcagtcaacttgaggttcggaggtcgcactactatgaagagcgtcgtgtgcaagatgaatcctatgacagacgcagcctcatgtggatccgaggtgaagaagtggtggactcgacaacttacagtagagtcagacgagtctggagatgatctcctggacatctag

SEQ ID NO: 205526 - DNA, 2007 bp, synthetic construct
  misc_feature 1..2007: note = Description of Artificial Sequence: Synthetic coding sequence
  source 1..2007: mol_type = other DNA
atgctgaagcggaagcagagcagccgggtggaggcccagcccgtgaccgactttggccccgatgagagtctgtccgacaatgctgatatcctctggatcaacaagccttgggtgcacagcctactgagaatatgcgctattataagcgtgatttctgtttgcatgaacaccccgatgacttttgagcactaccctcccctccagtatgttacctttactttggacaccctgctcatgttcctctatactgcagagatgatcgccaagatgcacatccgaggtatcgtaaagggagattcaagctacgtgaaagatagatggtgtgttttcgatggcttcatggttttctgtctgtgggtgagcttggtgcttcaggtgttcgaaatcgcagacattgtggaccagatgtccccctggggcatgctccggattccaaggccgctcataatgatccgggcttttcgaatctatttcagatttgaactgcctcgcacccggataacaaacatactcaaacgcagcggggaacaaatttggagcgtgtcaatctttctgcttttcttcctccttctctacggaattctaggagtccaaatgtttggcacatttacatatcactgcgtcgtcaatgacacaaagcctggaaatgtgacttggaactcccttgccatacctgatacccattgtagccccgaacttgaagaaggctaccagtgtcctcctgggtttaagtgcatggacttggaagatcttggattatctcgccaggaattgggatactcgggcttcaacgagataggcacatccatttttaccgtgtacgaggctgcaagccaggaaggatgggtatttctgatgtatagagccatagattcctttcctcgttggagaagctacttctacttcattacactcatcttctttctcgcctggcttgtgaagaatgtttttattgccgtgataatcgagacatttgctgaaataagagtgcagttccagcagatgtggggcagtcgctctagcactacttctactgctacgacccaaatgtttcatgaagacgccgccggggggtggcagttagtggctgtggatgtaaataagccccaaggccgcgcccctgcttgtttgcagaaaatgatgaggtcctccgtgttccatatgttcattctgagcatggttacagtagatgttatcgtggccgcgtcaaactactacaaaggcgagaactttcgcaggcagtacgacgagttttacctggccgaagtagcctttaccgtactctttgacctcgaggctctgcttaaaatatggtgtttagggtttaccgggtatattagttcaagcctacataagttcgagttactgctcgtaatcggaaccacattacacgtgtatccagacttatatcatagccagttcacttattttcaagtgctgcgagtggtgcgtctgataaaaatctcccccgcacttgaggacttcgtgtacaaaatatttgggccgggcaagaaactaggcagtctagttgtgtttactgcatctctgctgattgtcatgtctgccatttctttgcaaatgttttgcttcgtggaggagttggatagatttaccacgtttcctcgcgcattcatgagcatgttccaaatcctgactcaggaggggtgggtggacgtgatggatcagacactgaacgcagttggtcacatgtgggctccagttgtggccatctactttatactgtaccacctcttcgctacattacctccaagccttatccgggacttatgcggtacacaagacgcatgcccatcctgcctaccgctgcagcctcccaaccccctacctggtagccagactttggctcgcctgactcaccaggcgcttactacccctcccgggatgagaagttcccagctctttagtaaaatctctcttctgttaggaatctgtgtcgcatgggagtcaatactgggctctctcagtctgtcccacaacctaagatag

SEQ ID NO: 205527 - DNA, 657 bp, synthetic construct
  misc_feature 1..657: note = Description of Artificial Sequence: Synthetic coding sequence
  source 1..657: mol_type = other DNA
atgctgaagcggaagcagagcagccgggtggaggcccagcccgtgacagactttggccctgacgagtctctctcagataacgcagacatactttggattaataagccttgggtgcactcattactgaggatctgtgccattataagcgtgatatccgtttgtatgaacacacctatgacgtttgaacactaccccccactgcagtacgtcacatttactctggatactcttctgatgttcctgtacacagctgagatgatcgctaagatgcacattagaggcattgtcaaaggggattcaagttacgttaaggaccgttggtgtgtgtttgatggattcatggtcttctgtctttgggtgtcgttggtgctccaagtgttcgaaatagccgacatcgtagatcagatgtcaccatggggcatgttgcgcattccccgccctctaatcatgattcgcgcattcagaatctattttcggtttgagttgcctcgaactcgaatcacgaatattctgaaacgtagtggagagcagatctggtcagtgtccattttccttttgttctttttgctactatatgggatattgggtgtgcaaatgtttgggacatttacataccactgtgtcgttaacgataccaaacccggcctgtctctctag

SEQ ID NO: 205528 - DNA, 657 bp, synthetic construct
  misc_feature 1..657: note = Description of Artificial Sequence: Synthetic coding sequence
  source 1..657: mol_type = other DNA
atgctgaagcggaagcagagcagccgggtggaggcccagcccgtgacggacttcgggcctgacgagagcctaagtgacaatgccgatattctctggattaataagccatgggtacacagcctgcttcgtatatgtgccataatctcggttattagtgtctgcatgaatacccctatgacgttcgagcattatccccctctgcagtacgtgaccttcactttggatacactgctgatgttcctgtacactgcggaaatgatcgccaaaatgcatatacggggcatcgttaaaggggactcctcctacgtgaaggaccggtggtgcgtgttcgacggattcatggtgttttgcctgtgggtctctctggtgctgcaggtcttcgaaattgctgatatcgtggatcagatgagcccgtgggggatgcttaggattccacgccctctgattatgatccgcgcgtttcggatctacttccgcttcgaactgccacgaacacgcatcaccaatattcttaagcgttccggggagcagatctggtctgtctccatcttccttctctttttcctccttttgtacggcattctgggggtgcagatgtttgggacgtttacataccattgcgtcgtgaacgacaccaaacccggcctgagcatttag

SEQ ID NO: 205529 - DNA, 1725 bp, synthetic construct
  misc_feature 1..1725: note = Description of Artificial Sequence: Synthetic coding sequence
  source 1..1725: mol_type = other DNA
atggccagcaccgagggcgccaacaacatgcccaagcaggtggaggtccgcatgcacgattctcatctggggagcgaagaaccaaaacaccgccacctgggactccgcttatgcgacaaacttggaaaaaatctcctactcacattaaccgtgttcggagtcatcttgggcgcggtttgcggagggctcctcagattggcatccccaatacacccagacgtggtaatgctgatagcatttccaggagacatcctgatgcgcatgctgaaaatgctgatactgcctctaatcatctcatcattgatcaccggccttagcggcctcgacgccaaggctagcggacggctcggtacccgcgccatggtttactacatgagtactaccattatcgccgccgtgctgggggtcatccttgttttggctattcatcctggcaaccccaagttgaaaaaacagcttggacccggcaaaaagaacgatgaggtaagcagcctggacgccttcctcgatcttattcgaaacctatttcccgaaaatctcgtgcaggcctgctttcagcagatccagacagtgaccaagaaagtcctggtggcacccccaccggatgaggaagctaatgcaaccagtgcagtggtctccctgttgaacgaaactgtgacagaagtccctgaagaaacaaaaatggtgattaaaaaaggcttggagttcaaagacgggatgaatgtcttgggacttatcgggttttttatcgcctttggaattgcaatgggaaaaatgggcgatcaggccaaactcatggttgatttttttaacattctgaatgagatcgtcatgaagttggttatcatgattatgtggtatagtcccttggggatagcttgcctgatctgtggaaagatcattgctattaaggaccttgaggtcgttgctcggcagctcggtatgtacatggtgactgtgataattggcttaataatccacggaggcatatttttgcccctgatttattttgtggtgaccaggaaaaacccattcagtttctttgcaggcatttttcaggcttggattaccgcactgggtacggcctccagcgcaggaactttacccgtgacttttcgatgtctggaggaaaaccttggaatcgacaaacgggtcacccgcttcgtattgcctgttggggcgacaattaatatggatgggactgccttgtatgaggccgtggccgcaatctttatcgcacagatgaacggggttgtattagacggcggacagatcgtgaccgtgagtctgacggccacattagccagtgtgggggcagctagtattcctagcgctggactggttactatgctgcttatcctgacggcagtgggacttcctacagaggatatatcgttattagtggccgtcgactggctgctggaccgcatgcggacatctgtaaacgtcgttggggacagcttcggtgccggtatcgtgtaccacttgtctaaatcagagcttgacaccatagattctcagcatcgcgtgcatgaggatatcgaaatgacaaagactcagtcgatctatgatgatatgaagaatcaccgagaaagcaattctaatcagtgtgtctacgctgcacacaacagtgtgatcgtggacgaatgtaaagtgaccttggcagcgaacggaaaatcagccgactgctcagtcgaggaggagccatggaaacgtgaaaaatag

SEQ ID NO: 205530 - DNA, 1698 bp, synthetic construct
  misc_feature 1..1698: note = Description of Artificial Sequence: Synthetic coding sequence
  source 1..1698: mol_type = other DNA
atgcccaagcaggtggaggtgcggatgcacgacagccacctgggctccgaagagccaaagcatcgacatctgggtctccgcctttgcgacaaattaggaaagaatctcctgctcaccctaaccgtgtttggagtgattttgggagctgtatgtggcggtttattgcgcttagccagtcctatacatccagatgttgttatgctgattgcctttcctggcgacatcttgatgagaatgctgaagatgctgatcctgcctctcataatctcctccctgatcacagggctctctgggctcgacgcaaaggcgagcggaagacttgggacccgggccatggtgtactacatgagcacaactataatagcagccgtcctgggagtcatcctggtcctcgcaattcacccaggtaatccgaaactgaaaaagcagcttggccctgggaagaaaaatgacgaagtgagctcactcgacgccttcctggatctcatcaggaatcttttcccagaaaatttagtgcaagcttgcttccaacagattcagacggtgactaagaaagtcttagtggcccctccgccagacgaggaggccaacgcaaccagtgccgtagtttccttgctgaatgaaactgtgacagaggtccccgaggagactaagatggtcataaaaaagggactcgagttcaaggacgggatgaacgtattggggttgataggtttcttcattgcttttggaatagcgatgggcaaaatgggcgaccaggccaaactgatggtggatttctttaacattctgaatgaaattgtgatgaagcttgtgatcatgatcatgtggtacagccccttgggaatcgcctgcctcatctgcggcaaaatcatcgccatcaaagatcttgaggtcgttgcacgtcagctgggaatgtacatggttactgtgatcatcggccttatcatccacgggggcatctttctgcccctgatctacttcgtcgtgacgcgaaaaaaccccttctctttctttgccggcatctttcaagcatggattaccgcactgggcacggcctcgagcgccgggacacttcctgtgacattcaggtgcctggaggaaaatctcgggattgataagagggttaccagattcgttctgcctgttggcgcgactattaatatggatggcactgccctgtatgaggctgtggcggctatttttatagcgcaaatgaacggggttgtgttggatggcggccagattgtgactgtgtcactgactgctactctagcaagcgtaggagccgcctccataccatctgctggcctggttacaatgctcctgatccttactgccgttggcctgcctacagaggatatcagcttactggtggccgtcgactggctgctggaccgtatgcgcacatctgtcaacgtggtaggggactctttcggagctggaattgtttaccatctcagcaaatctgagcttgacaccatagactctcagcaccgcgttcatgaggatattgagatgacgaaaacacagagcatttacgatgatatgaagaatcacagggaaagcaactctaaccaatgcgtctacgctgctcataacagtgtgattgtggatgaatgcaaggtaacgctggccgcgaacggcaagagtgccgactgttccgtggaggaggaaccgtggaaacgagagaaatag

SEQ ID NO: 205531 - DNA, 1698 bp, synthetic construct
  misc_feature 1..1698: note = Description of Artificial Sequence: Synthetic coding sequence
  source 1..1698: mol_type = other DNA
atgcccaagcaggtggaggtgcggatgcacgacagccacctgggctctgaagagccaaagcaccgccatttaggtttacggctctgcgataagctgggcaaaaatctgctgctgactctaactgtgttcggggtaatacttggagccgtgtgcggaggccttctccggttggcatcccctatacacccagacgtagttatgctaatcgcttttccaggggatattttgatgcgtatgctcaaaatgctgatcctgccactgataatttcatcactcatcacaggcctgtctggactggacgcaaaggcctctggaaggctcgggactcgcgccatggtgtactatatgagcacgaccattattgccgccgttctcggggtgatcttggtactggccatccatcctggaaaccccaaattgaaaaaacagctgggaccgggcaagaagaatgatgaggtgagctcactggacgcctttcttgatctgatccgaaacctgttcccagaaaacctggtccaggcatgcttccagcaaatccagaccgtgaccaaaaaagtgctcgtggcgcctcctccagacgaggaagcaaatgcaacttccgcagtggtctcactactgaacgaaaccgttactgaggtgccagaggaaacgaaaatggttatcaagaaaggactcgaatttaaggacggcatgaacgtcctaggtctgattggttttttcattgcttttgggatcgccatgggcaaaatgggggatcaggcgaagctgatggtcgactttttcaacattctaaacgaaattgtgatgaagttggtaataatgatcatgtggtattcccccctcggcattgcttgcctgatttgcggtaagataattgccatcaaggatcttgaagtagtggctaggcagttggggatgtacatggttaccgtcattatcggtctgattatccatggagggatcttcctgcctttgatctatttcgtggtcactagaaagaaccccttctctttttttgccggaattttccaggcttggatcacggcgcttggtaccgcgagctccgccgggacacttcccgtaacgttccggtgcctggaagaaaatctagggattgataagcgcgtgactaggttcgttctgccagtcggagcgacaatcaacatggatggaaccgctttatatgaggccgttgcagctattttcatagctcagatgaatggggttgtgctggacggtgggcagattgttaccgtctcactgacagcaacactcgcgtctgtaggggctgcatccatccctagtgcaggcctggtgacaatgttgctcatactaacagcggtaggactcccaactgaggatatttctctcctggtggccgtagattggttactggatagaatgcgcacttcagtcaacgttgtaggcgactcttttggcgctgggatagtctaccatttgagcaaaagcgagctcgacactatcgatagccaacatagagttcatgaagatatcgagatgacaaagacgcagtctatttacgatgatatgaaaaatcatcgagagagcaatagcaaccagtgcgtgtatgccgcccacaattctgttattgtagacgagtgcaaagtgactttagctgcaaatgggaagtccgccgactgttcagtggaagaagagccttggaaacgcgaaaaatag

SEQ ID NO: 205532 - DNA, 1629 bp, synthetic construct
  misc_feature 1..1629: note = Description of Artificial Sequence: Synthetic coding sequence
  source 1..1629: mol_type = other DNA
atgaccaagagcaacggcgaggagcccaagatgggcggccggatggagcgttttcagcagggagtccgtaagaggacattgttagctaagaaaaaggtccaaaacattacgaaggaagatgtcaaatcatatctgtttagaaatgccttcgtgctgctgacagtgacagcggttatcgtgggcaccatactggggttcacactgcggccttatagaatgagctatagagaggttaagtattttagcttccctggtgaattacttatgaggatgctgcagatgctggtcctgccacttattatcagttctctcgttacaggaatggctgctctggactctaaagcctctgggaagatggggatgcgggccgtcgtgtattacatgacgactactattattgcggtggtgattggcattatcatcgtgatcattatccatccaggcaagggcacaaaggaaaatatgcacagagaaggaaagatcgtaagggtcaccgccgcggatgcatttttggatctgattcgaaatatgtttcccccgaatttggttgaagcctgcttcaaacagttcaaaaccaactacgagaagcggtccttcaaggtgcctattcaggccaacgaaacactggtcggtgccgtgattaacaacgtcagtgaagctatggagactctgacaagaatcaccgaagagctggtgccagtgcctggcagcgtgaatggcgtgaacgctctgggactggtggtgttcagcatgtgtttcggctttgtgatcggcaacatgaaagagcagggccaggccctgagagagttttttgactcactcaatgaagctataatgagactggtggccgtgataatgtggtacgctccggttggcatcctatttctaatcgcgggcaagattgtggagatggaggacatgggcgtgattggcggtcagctcgcaatgtacacggtcacagtcatcgtgggactcctgatccacgccgtgatcgtccttccattgctttacttcctggtcacccgcaagaacccgtgggtgtttattgggggattacttcaggcactgatcaccgccttgggcacatcttctagctcggcgaccttgccaataacttttaagtgcctggaggagaataacggcgttgataagagggtaacacgattcgtccttcctgtaggggcgaccattaatatggatgggaccgcgctgtatgaggcgctggccgcaatcttcatcgctcaggtcaacaacttcgagcttaattttggccagattattactatttccatcacagcaacagcagcgagcatcggggcagcgggcatcccacaggccggtctggtgacaatggtcattgtactgacatctgtgggtcttccaactgacgacattacactcatcattgctgtagactggttccttgacagactgcggactactaccaacgtgctgggagacagcttgggggccggcattgttgagcacctgtcacggcatgagcttaaaaacagggacgtcgagatgggtaacagcgtgattgaagagaatgagatgaagaagccatatcagctgattgcccaggacaatgagaccgagaagcccattgacagtgaaacaaaaatgtag

SEQ ID NO: 205533 - DNA, 1494 bp, synthetic construct
  misc_feature 1..1494: note = Description of Artificial Sequence: Synthetic coding sequence
  source 1..1494: mol_type = other DNA
atgaccaagagcaacggcgaggagcccaagatgggcggccggatggagcgcttccagcagggcgtaaggaaaagaaccctgctggctaagaagaaggtccagaatattactaaagaagacgtgaagtcatacctcttcagaaatgcgtttgtcctcctgactgtgactgcggtaatcgtcgggaccattctaggcttcacactgaggccttataggatgagctatcgggaagtcaagtatttctcatttcccggagaactgctgatgaggatgctgcagatgctcgtacttcccctaatcatcagctctctggtcaccgggatggcggcgctggactccaaagcttctggcaaaatgggtatgagggctgttgtctattacatgacaacaaccattatcgctgtggtcatcggtatcattatcgtgattatcatccatcccgggaagggcaccaaggagaatatgcaccgagaagggaaaattgtacgcgtaacagccgccgatgcctttttagacttgatcaggaacatgtttcccccaaatctggttgaggcttgcttcaagcagtttaagacaaactacgaaaaaaggagctttaaagtcccaatccaagccaatgagactctcgtcggtgccgttataaataacgtttcagaggctatggagacattgacccggatcactgaagaattagttcccgtacctggtagcgtcaacggcgtgaatgccttgggactggtagtttttagtatgtgcttcggttttgttattggaaatatgaaagaacaaggtcaagccctccgagagttcttcgattcactcaacgaggcgattatgagattggtggccgttatcatgtggtacgctcccgtcggcattctctttcttattgcaggaaaaatagtcgaaatggaagacatgggggtcattggagggcaactggcaatgtataccgtgactgtgattgtggggctgctgatccacgctgtgatagttttaccactcttgtattttcttgtgaccaggaaaaatccatgggtgttcataggcggcctgcttcaggcattgattactgcgctgggtaccagttcctcatctgccactctgcccatcacctttaaatgtttggaagagaataacggggtggataaaagggtcactaggttcgtgctacctgtcggcgctacgataaacatggacgggactgccttgtacgaagccctggcagctatattcatcgcacaagtcaataattttgagctcaacttcgggcagattataactatccgggatagattgagaaccaccacaaatgtgctgggagactctcttggggccggaatagtggagcatctgtccagacacgagcttaagaatcgggatgtggaaatgggaaattccgtcattgaggagaacgagatgaagaagccctatcagttgatcgcacaggataatgagacagaaaaacccatcgattcggagaccaaaatgtag

SEQ ID NO: 205534 - DNA, 348 bp, synthetic construct
  misc_feature 1..348: note = Description of Artificial Sequence: Synthetic coding sequence
  source 1..348: mol_type = other DNA
atgaccaagagcaacggcgaggagcccaagatgggcggccggatggaacgattccagcaaggtgttcggaaacggactctgttagcaaaaaagaaggtccagaatattacaaaggaggacgtgaagagctacctctttagaaacgccttcgtgctcctgacagtcaccgccgtaatagtcgatgagaagaccgaggcacaaattctgaccactcagctgatgaataccgagtgggactctaacccaccttttagactgcaagtcctgatccatcataccgtccttggcgccatcacaccgatcctggcactgctacagcagtttgccgaaggtcttcccgaggtgtag

SEQ ID NO: 205535 - DNA, 1473 bp, synthetic construct
  misc_feature 1..1473: note = Description of Artificial Sequence: Synthetic coding sequence
  source 1..1473: mol_type = other DNA
atgaccaagagcaacggcgaggagcccaagatgggcggccggatggaacgttttcaacaaggcgtccgaaaaaggaccttactagccaagaagaaagttcagaacatcaccaaagaggacgtaaagtcctacttgtttcgcaacgccttcgtactgttgaccggaatggctgccctggactccaaagcttccgggaagatgggcatgcgtgcagtggtctattacatgaccaccactatcatagcagtggttatcggaattattattgtcatcataattcaccccggcaaggggactaaggaaaatatgcatcgtgaaggaaaaatagtgcgggttaccgctgccgacgcatttcttgacttaatccgcaatatgttcccaccaaatctggttgaagcctgtttcaaacagtttaagacaaattacgaaaagcggtccttcaaggtgccaatccaggcaaacgagaccttggttggggccgtgatcaataatgtgagcgaagccatggagactctgacaagaatcaccgaggagttggtacctgtgccaggcagcgttaatggggttaacgccttgggtctggtggttttttccatgtgtttcggatttgttataggcaacatgaaagaacagggccaggctttaagagaattctttgacagcctgaatgaggcaatcatgcgccttgttgccgtcattatgtggtacgccccggtaggtatcctgttcttaatcgctggaaaaatagtggagatggaggacatgggggtcattggtgggcagctcgccatgtacacggtgactgtcattgtgggtttgcttatacatgcggtgatcgtactgccccttctttattttttggtgaccaggaagaacccatgggtattcatcggcggtttactgcaggccctgattactgctttggggacatcttcgagctctgcaacactaccgattacctttaaatgtctggaggaaaacaacggcgttgacaaaagggtgactagatttgttctccctgtcggggccacaatcaacatggacggaaccgctctttatgaggctctcgccgcaatttttattgcccaggttaacaatttcgagcttaacttcgggcagataatcacaatatccattacagccaccgcggcctcaatcggcgccgctgggataccacaggcagggctggtcaccatggtgatcgtactaaccagcgtgggcctgccaacagatgatatcaccctgattatcgcagtggattggtttttggacaggctgcgcaccacgaccaacgtgctcggcgattcactgggcgcaggaatcgtggaacacctcagcagacatgagttaaagaaccgggatgtcgagatgggtaattctgtcattgaggaaaacgagatgaaaaagccttatcagcttatagcccaggataacgaaaccgaaaagcccatagattccgaaacgaaaatgtag

SEQ ID NO: 205536 - DNA, 324 bp, synthetic construct
  misc_feature 1..324: note = Description of Artificial Sequence: Synthetic coding sequence
  source 1..324: mol_type = other DNA
atgaccaagagcaacggcgaggagcccaagatgggcggccggatggagcgcttccaacaaggggtgaggaaacgcacactgctggctaaaaaaaaagttcagaatataacgaaagaggacgtaaagtcctatctatttcggaacgcgtttgtcttgcttacagttaccgcagtgatcgtgggtaccattctgggtttcaccctaagaccttatcgcatgtcatatcgcgaagtgaagtacttcagctttcctggcgagttgcttatgaggatgctccagatgctggtgctccctctaattatttcaagccttgtgaccggatag

SEQ ID NO: 205537 - DNA, 324 bp, synthetic construct
  misc_feature 1..324: note = Description of Artificial Sequence: Synthetic coding sequence
  source 1..324: mol_type = other DNA
atgaccaagagcaacggcgaggagcccaagatgggcggccggatggagcgttttcaacaaggcgtacggaagcgtaccttactcgccaagaaaaaggttcaaaatatcactaaagaagacgttaaaagttatctcttcaggaacgcctttgtgctgcttaccgtgactgccgtgatcgtgggaacgatcctgggttttacgttgagaccctaccgcatgagttatcgtgaggttaaatacttttccttccccggggagcttctcatgagaatgcttcagatgttagtgcttccactgattatatcaagtctcgtaacagggtag

SEQ ID NO: 205538 - DNA, 306 bp, synthetic construct
  misc_feature 1..306: note = Description of Artificial Sequence: Synthetic coding sequence
  source 1..306: mol_type = other DNA
atgaccaagagcaacggcgaggagcccaagatgggcggccggatggagcggttccagcagggcgtgagaaagcggaccctcctggctaaaaagaaggttcagaatatcaccaaagaagatgtcaaatcgtatctgttcagaaacgcctttgtgctgcttaccgtgacagctgttatcgtgggaacaatactaggatttacgctccgcccttacaggatgtcataccgagaggtcaaatacttctcatttccaggagagctattaatgagaatgcttcaaatgttggtgctgccactcattatctag

SEQ ID NO: 205539 - DNA, 987 bp, synthetic construct
  misc_feature 1..987: note = Description of Artificial Sequence: Synthetic coding sequence
  source 1..987: mol_type = other DNA
atgaccggcgtgttcgacagcctggtggccgacatgcacagcacccagatcgctgccagtagtacataccatcagcatcaacagcccccaagcggggggggagcgggcccagggggcaactcaagttcctcttcatccctacacaaaccacaggagagtcccactctccccgttagcactgctaccgattcctcttattacactaaccaacagcacccggcggggggcggcgggggcggagggagcccctacgcccacatgggatcctaccagtaccaagccagcggtcttaataacgtgccctatagtgcaaaatccagctacgatcttggttatacggccgcttatacctcctacgcaccatacggaactagttcctctcctgccaataacgaaccggaaaaagaagacctcgagcctgaaatcaggatagtgaatgggaagcccaagaaagttcgaaaaccccggacaatttattcctcttttcagctcgcggctctgcaacggcgttttcagaagacacagtatctggctcttcccgagagggcggagcttgcagccagcttagggctaacgcagacacaggtgaagatctggtttcaaaacagaaggtctaaatttaagaagatgtggaagtccggggaaataccgtcagagcaacatcctggcgcttcggcctcccccccctgtgctagcccccctgtgagcgctcctgcttcctgggatttcggtgtgccacagaggatggcaggcggggggggccctggttcgggcggttcaggcgccggttcaagcggctcaagtccttcttccgcagcttcggcctttctgggtaattacccatggtaccaccaaactagcgggagtgcaagccacctccaggccactgctcccctgttgcatcctacgcagacgccgcagcctcatcaccaccatcaccaccatggcgggggcggggcaccagtgtccgccggcactatcttttag

SEQ ID NO: 205540 - DNA, 1359 bp, synthetic construct
  misc_feature 1..1359: note = Description of Artificial Sequence: Synthetic coding sequence
  source 1..1359: mol_type = other DNA
atgctgctgcggatgctgcggatgatcatcctgcccctggtggtgtgttcacttgtttctggcgctgcatccctggatgccagttgcctgggtaggttggggggcatcgcggtcgcctattttgggctcacgaccctgtctgctagcgcgcttgccgtggcactcgccttcattatcaaaccagggagtggagcccagactctgcagagctcagacctggggctagaagatagtggaccccccccagtgccaaaagagaccgtagattccttcctggacctggcccgcaatttattcccatctaatttggtggttgccgccttcagaacttatgccacagactataaagtcgtgacacagaacagtagctcaggcaatgtgacacacgaaaagattcctatcggaacagagattgaaggcatgaacatcctggggttggtgctattcgcactcgtgcttggcgtggctctgaaaaaactgggatccgagggcgaagaccttatccgtttcttcaatagccttaacgaagcaacaatggtgctggtatcatggattatgtggtatgtgcccgtaggaatcatgtttctggttggttcaaaaatcgtggagatgaaggacatcatcgtcctagtcaccagcctgggaaagtacattttcgcctccatactcggacacgtgatccacgggggcatagttcttcccctgatatacttcgttttcacacggaagaatccattcaggttcttgctcggcctactggccccctttgccacggcttttgccacctgttccagctccgcaacactgccaagcatgatgaagtgcatagaggagaataacggcgtggataagaggatcagccgctttattctgcctattggagccacggtgaacatggacggtgcagccatttttcaatgtgtagccgctgtgtttattgcacaactgaacaatgtggaactgaatgctggacagatctttactatccttgtgaccgccactgcatcttcagtaggtgcggccggcgtgcctgctggaggcgtgctgactattgctattatccttgaagcaatcggccttcctacccatgatcttcctctcatactggcggtggactggatagtggatcgcactactaccgtggtcaatgttgagggggacgcgcttggggccggaatcctgcatcacttaaaccagaaggctaccaaaaaaggcgaacaggagttggctgaggtgaaggtcgaagccataccaaattgcaagagcgaagaggagacctcccctctggtcacccaccagaatcccgcaggtccagttgcatcagcaccagagttagagagtaaagaaagtgtgttgtag

SEQ ID NO: 205541 - DNA, 705 bp, synthetic construct
  misc_feature 1..705: note = Description of Artificial Sequence: Synthetic coding sequence
  source 1..705: mol_type = other DNA
atgaacatcctgggcctggtgctgttcgccctggtgctgggcgtggcattgaagaaactcggctcagagggagaagacctaatcaggttttttaactctctcaacgaggcgaccatggtgttggtgagttggatcatgtgcagcgctactctgccgtctatgatgaaatgcatagaggagaacaatggggtggataagcgaatcagtcggtttattctgccaattggtgctacggtgaatatggatggcgcagcgatattccagtgcgtggcggctgtgttcatcgcacagctaaataacgttgaactcaatgctggacagattttcactattctggttaccgccacagctagttccgtgggggcggccggagtgcctgctggcggggtactgaccatagccataattcttgaggctatcgggttaccaactcatgacctaccccttatcttggcagtcgactggatagtcgacagaactaccacagttgtcaatgtcgagggggacgctttgggtgccgggattctacaccacctgaaccagaaagcaacaaagaagggtgaacaggagctggcagaggttaaagtagaggcaattccgaattgcaagtccgaggaagagaccagcccacttgtgactcaccaaaaccccgccgggcccgttgcatcagcccctgagctggagtccaaggagagcgttctgtag

SEQ ID NO: 205542 - DNA, 1575 bp, synthetic construct
  misc_feature 1..1575: note = Description of Artificial Sequence: Synthetic coding sequence
  source 1..1575: mol_type = other DNA
atgggcaagcccgcccggaagggctgcgagtggaagcggttcctgaaaaacaactgggtgctcctctccactgtggcagccgtcgtcctaggcatcacgacaggagtgctggtcagagagcactcaaatctgagcacgctggaaaaattttacttcgcatttcccggggagatcctgatgcggatgctgaagctgataattcttcctttaattattagcagcatgattacaggtgtggcggcgctggatagtaatgttagtggtaaaatagggctcagggccgttgtgtattacttctgtaccaccttgatagcggtgatcctcggaatagtgctggtcgtgtccatcaagcccggtgtcacacagaaggttggtgagattgctcgaacaggtagtacacctgaggtgtccactgttgatgccatgctggatctcattcgcaacatgtttccagagaacctggtccaggcctgctttcaacaatacaagacaaaaagagaggaagtgaagccccctagtgatcccgaaatgaatatgacagaggaatctttcacagcagtgatgaccaccgccatctccaagaacaaaactaaagagtacaaaattgtgggcatgtactcagatgggattaatgttctgggcttgatcgtgttttgcctcgtatttggactggtgatcggaaagatgggggaaaagggccaaatccttgtggatttcttcaacgccctgtctgacgcgacaatgaaaatcgtccagatcatcatgtgttacatgcccttgggaatcctgttccttatcgctgggaaaatcatcgaggttgaagactgggaaatctttcgaaagctaggtctgtacatggcaacagtgttaacgggcctcgccatccattcaatcgtgattctccctttaatttacttcatagttgtccgaaagaatccctttcgcttcgctatggggatggcccaggcgctcctcactgcactcatgatatcttcatcatccgcaacattgcccgtgacctttaggtgcgccgaagagaacaaccaggtcgataagaggattacacggtttgtcctccctgtcggtgctaccatcaacatggatggtaccgccctgtacgaagctgtggctgcggtcttcatagcccagttaaacgatctggaccttgggataggccagattatcactatttcaatcactgcgacaagcgctagcattggggctgctggggtgccccaagctggactggtaaccatggtgatcgtcctatcggctgtcggactccctgcagaggatgtgactctcatcatagctgttgattggttgctggacagattcagaacaatggtcaatgtacttggggacgctttcgggactgggatagtcgaaaagctctctaagaaggaacttgaacagatggatgtgagtagtgaggttaacattgtgaatcccttcgccctggaatccacgattctcgacaacgaagacagtgacaccaaaaaaagctacgttaatggagggtttgccgtggacaagtccgacactatctcttttactcagactagccagttttag

SEQ ID NO: 205543 - DNA, 729 bp, synthetic construct
  misc_feature 1..729: note = Description of Artificial Sequence: Synthetic coding sequence
  source 1..729: mol_type = other DNA
tgattcttcaacgccctgagcgacgccaccatgaagatcgtgcagattatcatgtgttacatgccactgggcatcctgttcctgattgctggaaagattattgaagtagaagactgggagatttttcgaaagcttgggttatacatggcgactgtgctcacaggcctcgccatccacagcatcgtgatactgcccttgatctatttcattgtagtgcgcaagaaccccttccggtttgcaatgggcatggcgcaggccctgttgaccgcccttatgatatcttcctcctcagccaccctacctgtgactttccgttgtgctgaggagaataaccaggtagacaaacggataaccaggttcgttctgcccgtgggggcaaccatcaatatggacggaactgcgctgtatgaggccgtggctgccgtgtttattgctcaacttaatgatttggatctcggtatcgggcagatcatcacaattagagatcggtttcggaccatggtcaatgtgctgggggatgcgttcggaaccgggattgtggagaagctttccaaaaaggaacttgaacagatggatgtgtcctctgaagtcaacatcgtgaaccctttcgctctcgagtccacaatcctagacaatgaggattcagacaccaagaaatcatacgttaacggggggttcgctgtggacaagagcgatacaatctcatttactcagacgagccagttttag

SEQ ID NO: 205544 - DNA, 1647 bp, synthetic construct
  misc_feature 1..1647: note = Description of Artificial Sequence: Synthetic coding sequence
  source 1..1647: mol_type = other DNA
gagacccccgtgctgcccatcatggtggccgaccccccccgggactcgaagggcctcgctgctgctgagccaacagcaaatggaggcctggccctcgcatcaattgaagaccaaggcgcagccgctggcgggtactgcggtagtcgagaccaggtgagacgctgcctgcgagcaaatcttcttgtgttgctaaccgtcgtggccgtagtggcgggggttgccctggggctgggcgtgtctggggcgggaggcgcactcgcactgggccccgagcgactgagcgcattcgtctttcccggagagctgttattacgcctgctgcggatgatcatactacccctggtcgtgtgttctctgatcggaggcgcggcttcacttgaccccggggccttgggccgcttaggagcctgggccttgctgttctttctggtgacgactctgctggcttctgccctgggtgtgggtctagctctggctctgcagcccggagctgcgtccgcagccattaacgcctctgtgggcgcggcagggagcgccgagaatgctccaagtaaagaggtgctggattccttcttggacttggctcggaacatttttccttcaaacctggtatctgctgcattccggagctacagcactacctacgaggaacggaatatcacgggaaccagggtgaaggtccccgtcggccaggaagtagaggggatgaacatcctggggctggttgtcttcgccatcgtctttggcgtggccttaaggaaactgggccccgaaggggagctgttaattaggttttttaactctttcaacgaagcgaccatggtcttagtctcctggattatgtggtacgcacccgttggtattatgttcctggttgctggcaaaattgtcgagatggaagacgtgggcctgctgtttgcaaggttggggaaatacattctctgttgtttgctcgggcatgccattcatggtcttctggtgttgcccctcatctatttcttatttacaagaaagaatccctacaggttcttgtgggggatcgttactcctctggctacagcgtttggcacctcaagtagcagcgcgacattgcccctgatgatgaagtgtgtggaggaaaataacggcgtggctaagcatatttcacggttcatcctgccaataggagccactgtaaacatggatggagcggccttgtttcagtgtgtggcggcggtgtttattgcccaactctcacagcagtctctggactttgtgaagatcatcaccatcttagtaactgccacagccagcagtgtgggagctgctggaatccccgccggcggcgtgctaaccttggcgatcattctcgaggccgtgaatctgccagtggaccacatctccctcatccttgctgtggactggcttgtcgacaggtcatgcactgtcctgaatgtcgagggggatgccctcggggctggcctcttgcagaattacgttgaccggaccgagtctaggtcaacagaacccgagcttatccaggtaaaaagcgaactgcccctcgatccactgcccgtcccaacagaggagggcaacccactcttgaagcactatcggggtcccgctggtgatgccacggtggcttcagagaaggagtctgtgatgtag

SEQ ID NO: 205545 - DNA, 942 bp, synthetic construct
  misc_feature 1..942: note = Description of Artificial Sequence: Synthetic coding sequence
  source 1..942: mol_type = other DNA
atgaacatcctgggcctggtggtgttcgccatcgtgttcggcgtggctctgcgcaagctgggcccggagggagaactattgattcgctttttcaatagttttaacgaggcaacaatggtactcgtcagctggattatgtggtatgctccggtcggcatcatgttcttggtggcaggcaaaatcgttgagatggaggatgtgggacttctgttcgccagactgggaaagtatatcctgtgctgtctacttggccatgccatccatggattgcttgtgctgcccctgatatatttcctctttacacgcaagaacccctaccgattcctctggggaattgtgacacccttggcaactgcgtttggtaccagctctagcagcgccaccttgcccttgatgatgaagtgcgtcgaggagaataacggcgtcgccaaacatatcagtcgttttatactacccataggtgcaaccgtgaatatggatggagctgcactatttcagtgtgtagccgctgtgttcattgctcagctgtcccagcaatccctagactttgtcaaaattatcaccatacttgtcacggccactgcttcatccgtgggagcggcgggtattccagcagggggagtgctgacactggcaataatactcgaagccgtgaatctgcccgtggatcatattagcctcatcctggccgtcgactggctcgtggatagatcctgcactgtcctcaatgtcgagggggatgcgttaggcgccggcttattacagaactatgttgaccgaaccgaatcacggtccactgaacccgaattgatccaggtcaagagcgaattaccgttagatcctctgcctgtgccaaccgaggagggaaacccactccttaagcattatcgcgggcccgcaggcgacgctactgtggctagcgaaaaggaaagcgtgatgtag

SEQ ID NO: 205546 - DNA, 1020 bp, synthetic construct
  misc_feature 1..1020: note = Description of Artificial Sequence: Synthetic coding sequence
  source 1..1020: mol_type = other DNA
atgtacagcaccacctacgaggagcggaacatcaccggcacccgggtcaaggtacctgtgggccaggaagtggaaggaatgaatattttggggctggtggtctttgcaatcgtattcggggttgcgctcaggaagcttgggccggagggagaacttttgatcaggtttttcaatagctttaatgaggccacaatggttttagtgtcctggattatgtggtatgccccagtggggattatgttcctggtggccggtaagattgtcgaaatggaggacgtcggccttttgtttgcccgcctgggaaagtacattctctgttgtctgctggggcatgctattcacggactgcttgtgctgcccctgatttacttcctgtttactagaaaaaacccctaccggttcttgtggggcattgtgaccccacttgcaaccgctttcggaacatcatctagttcggccacactgccactgatgatgaaatgcgtggaagaaaataatggtgtcgccaagcacatcagcagattcatacttccaattggggcgaccgttaacatggacggagcagcactgttccagtgtgtggccgccgtattcatcgcccagctctcccagcagagtcttgatttcgtcaagatcatcacgatactggtcaccgctactgcatcttcagttggcgcggcaggaatcccagccgggggagttctcaccctggccattatcctggaggctgttaacctccccgtcgaccatatttctctcatccttgctgtcgattggctggtggaccgctcctgtacagtgctgaacgtggagggagatgctctgggcgcgggtcttctgcagaactacgtggaccgcaccgagtccaggagcaccgagcctgaactgatccaggtcaaatccgagcttccgcttgacccactccccgtgccgactgaagagggaaatccactgctcaagcactaccggggtccagcaggagatgctaccgttgcctcagaaaaagagtctgtaatgtag

SEQ ID NO: 205547 - DNA, 1626 bp, synthetic construct
  misc_feature 1..1626: note = Description of Artificial Sequence: Synthetic coding sequence
  source 1..1626: mol_type = other DNA
atggtggccgaccccccccgggacagcaagggcctggccgccgccgaacccacggccaacggcggacttgctttagcatctatcgaagatcagggagcagccgccggcggttattgcggcagcagagatcaggtgcgccgctgtctgcgggccaacctcttagtgctgttgactgtggtggcggttgtggcaggagtcgctctggggcttggagtctccggggcgggcggagctcttgcactgggccccgagcgcctctctgcctttgtgttccctggggagctcctgctgcggcttctgcgcatgatcatactgccactcgttgtctgtagcctgatcgggggtgcagccagtttagaccctggcgctctcggacggctgggtgcctgggccctactcttctttttggtgaccacactcctggcaagcgccctgggcgtggggcttgcacttgcccttcagcccggggcggcctctgccgccatcaatgcatccgtcggggcagcaggctctgcagagaatgccccatcgaaagaagtgctggacagttttctggaccttgctcggaacattttccccagtaacctggtgagcgccgctttcagaagctactctaccacatacgaagaacgcaacataacaggaactagggtaaaggtgccagtaggccaggaagtcgaaggcatgaatatactggggctagtagtgtttgcgatcgtctttggagttgcactcagaaagctggggcctgaaggggagttgcttatcagattcttcaatagctttaatgaagccactatggtcctggtgagttggatcatgtggtatgcccccgtgggaatcatgttcctggtcgccggcaaaatcgtggaaatggaggatgtgggacttttgtttgcccgcctgggcaagtacatcttgtgttgcctcttaggacatgcaatccacggactgctggtgctccccttaatttacttcctgtttacacggaaaaacccttatcgctttctatggggcatcgtcactcctttggctaccgccttcggaacgagtagcagttctgccaccttgcccctgatgatgaaatgtgtcgaggaaaacaatggagtcgctaagcatattagcagattcattctgccaatcggggctaccgtaaacatggacggagctgccctgtttcagtgcgttgctgccgtgttcatagcacagttgagccagcaaagtctcgactttgtgaagataattactatcttagtgaccgccaccgccagctccgtgggagcagccgggattccagccggcggcgtgctgaccctggccatcattttggaggcagtaaatttaccggttgaccacatttctcttattttagcagtcgactggcttgtggacagatcgtgcaccgtgctcaatgttgagggggatgctctgggcgcaggactgcttcagaactacgtcgaccgcaccgagtcccgcagtactgaacctgaacttatccaagtgaagtctgagcttccattggatccgctgccagtccctacggaagagggtaatccactgttgaaacactaccgggggcccgccggggacgccaccgtggcatcagaaaaggagtccgtaatgtag

SEQ ID NO: 205548 - DNA, 1308 bp, synthetic construct
  misc_feature 1..1308: note = Description of Artificial Sequence: Synthetic coding sequence
  source 1..1308: mol_type = other DNA
atggccgagagcagcagcgagagcgaccacttccggtgccgggaccgcctgtctccatgggccgcacgctcaactcataggggtactcgttccctaccaacagtagaagtgacggaaaaagttaacactattactagcacacttcaggacacctcacggaacttgagacaggtggatcagatgcttggaaggtacagggagtacagcaacggccaggccggcgccatcgagcacctcaaggaaagccttgaacagagcatcgaccagctaagatcccagcggcttttgcgcaactcaggcggccgctccatcagtgtgacttctctctctgctagcgaccttgatggaggaaccggaagcgaacttcaccacttcccaccaaccagccctttaaaggattacggcgatcctcaagggattaaacgaatgagaagccgcaccggcgttcgcttcgttcaggagacagacgacatgacccagctgcatggattccatcagagcctgagggacctgtcctccgagcagatccggctgggagacgatttcaatcgcgagctgtcgaggcggtcaagatcagatgcggaaaccaaaagggccctggaggagctgactgagaaattgaatgaggcacagaagcaggaggtggtatccgaccgcgtggagaggcggttacaggaactggaacgggagatgcggacagagcgggagcttgtggaacggagacaagaccagctggggctgatgagcttgcagctacaggaggctcttaaaaagcaggaggccaaggccgatgagcatgaaggtgcaattaagaataagcttagacagactgagacagaaaagaaccaattggaacaggagctcgagctttctcggagacttctgaaccagagcgagggcagccgcgagacgctgctgcatcaggttgaggagctgaggacccagctcacgaaagccgaaggcgataggaaggggttacagcaccaggttagccaaattagcaagcaacagtccaactatcaagatgagcagggagaggactggcgattcagacggggagtagagcgcgagaaacaggatctggaaaagcagatgtccgatctccgcgtgcagttgaatttcagcgccatggcatcagaacttgaagaggtgaaacggtgtatggaacgcaaggacaaggagaaagcacacctggcctcccaagtggaacacatcaatcggaaatgtctccttaacctcgtacaggatctggattgcaaggataacgagattctgacatactcacttcagagtcccttacacgtgtag

SEQ ID NO: 205549 - DNA, 1047 bp, synthetic construct
  misc_feature 1..1047: note = Description of Artificial Sequence: Synthetic coding sequence
  source 1..1047: mol_type = other DNA
atgaacgaccccaacagctgcgtggacaacgccaccgtgtgcagcggcgcctcctgcgtggttcccgaaagcaatttcaataatattctgtctgtagtgttgtctaccgtcctgactatattgctggctctggtgatgttttccatgggctgcaatgtggagataaagaaattcttgggacacattaagaggccatgggggatctgcgtggggttcctttgccagttcggcattatgcccctgacgggcttcatcctctccgtcgccttcgatattctcccactgcaggcagtggttgttcttattatcggatgctgccccggcggcacagcatccaatatcctggcttactgggtggatggagacatggacttgtccgtgagcatgaccacctgctccacactccttgccttgggcatgatgcctctttgcctgttgatctacaccaaaatgtgggtggattccggttcaatcgtgattccctatgacaacattgggacttctcttgtgtctcttgtggttcccgtctccataggtatgttcgtgaatcacaagtggcctcagaaagcaaaaataattctgaagattggatccatcgccggtgcaatattgatcgttctaattgccgttgtgggagggattctctaccagtccgcctggattattgcccccaagctttggatcattgggaccatcttcccggtcgcgggctactcactgggttttctcctggcgaggattgccggtctcccctggtatcggtgtagaacggtagcttttgaaacaggaatgcagaatacccagctgtgctccaccatagtgcagctgtcctttacaccggaagaactgaacgtggtgttcacattcccccttatctactcaatttttcagttagccttcgctgcaatttttttgggcttctatgtcgcttataagaaatgccatggcaagaataaggcagagattcccgagagtaaggagaacggtactgagcctgagtccagtttttacaaagccaacggaggctttcagcccgatgagaaatag

SEQ ID NO: 205550 - DNA, 1434 bp, synthetic construct
  misc_feature 1..1434: note = Description of Artificial Sequence: Synthetic coding sequence
  source 1..1434: mol_type = other DNA
atggtgctgatgcaggacaagggcagcagccagcagtggcccggcttgggcggagagggcggagggactggaccgcttagcatgctgcgggccgcccttcttctgatcagcctgccatggggagcccagggtacagcatccacctctctgagcaccgctggtggacacactgtgcctcctaccggaggccgttacctgagcattggcgatggcagtgtgatggagtttgaatttccggaggacagcgaaggcattattgtcatatcatctcagtatccgggacaggcaaataggacagcacccggccccatgctgcgagtgacatccctggatactgaggttctcaccatcaagaatgtctctgccatcacttggggagggggtggggggtttgtggtctccatccattccggactggccggtttggcccctctgcacatacaactcgttgacgcccacgaagcccccccgaccttgatcgaggagcgccgggacttttgtatcaaggttagtcctgcagaagacacacccgcgacacttagcgccgatctcgcccatttttctgagaacccaattctatacctccttttaccacttatatttgtgaataagtgctcttttggatgcaaagtggaattagaggtgctcaaaggtctaatgcagagccctcagcctatgttactggggttgctcggtcagttcctcgtaatgccgctatacgctttcctaatggccaaagtttttatgctgcctaaggccctcgcgcttgggctcataatcacatgctccagcccaggtggtgggggctcctacctgttctccttactgctgggcggggacgtgactctggcaatcagcatgacattcctttcgactgtggctgccacaggcttcctgcccttgagcagcgccatctactctaggttgctgagtatccatgagactttgcacgttcccattagcaagattctcgggaccttgctgtttatcgccattcctatcgctgtgggcgtgttgattaagtctaagctgcccaagttttcacagctcctgctgcaggtagtgaaaccgttctctttcgtgttgctcttagggggtctatttcttgcatatcgcatgggcgtcttcatcttagccggcatccggctgcctatcgtccttgtaggaatcacagtgcctttagtgggcctccttgtgggctattgcctcgcgacctgcctaaagttgcccgtcgcgcagagacgaactgtgtcaattgaagtgggggttcagaatagtctactggccttggccatgctgcagctttcactcagacgattacaggccgattatgcctcacaggcgcccttcattgtggccctgtctggtacaagtgagatgctcgcacttgttataggacactttatctattcttcactgtttccagtaccctag

SEQ ID NO: 205551 - DNA, 1347 bp, synthetic construct
  misc_feature 1..1347: note = Description of Artificial Sequence: Synthetic coding sequence
  source 1..1347: mol_type = other DNA
atggtgctgatgcaggacaagggcagcagccagcagtggcccggcttaggcggggagggcggcggcactgggcctctgtccatgttacgcgctgccctgcttctgattagcctcccctggggcgctcaggggactgcaagtacatcgctgagcacggcagggggccataccgttccacctaccggtggacggtacttgtctataggtgacggctccgtcatggaattcgagtttcctgaagacagcgaagggataatcgtgatctcttctcagtatcccggacaggcaaaccggacggcccccgggccaatgctccgagtaacaagtctagataccgaagtgctgaccataaaaaacctggtcgacgcccacgaggctccacctacgctgattgaggagcggcgagacttttgtattaaggtgagtccagctgaggacaccccagccacactttccgctgacctggcacactttagtgagaatccaatcctctatcttttgttgcctctcatcttcgttaacaagtgtagcttcggctgcaaggtcgagctggaagtgctgaagggacttatgcagagcccccaacccatgttgcttggcctgctggggcagtttctggtgatgccactctacgcctttctgatggccaaggtgtttatgctgcccaaagccctggcactggggttgatcattacctgctcgagtcctggaggcgggggttcatatctgttctccctgctgctaggcggagacgtgaccctggcgatctccatgacattcctctcgacagtggccgcaactggctttctccctttatccagcgcaatctatagtcgacttttaagcatccacgagacactgcacgtcccgatttccaaaattctgggcacactgctcttcatcgccataccgatcgccgtcggcgttctgattaagtctaagctacccaagttctcacagctgctactgcaggtggtcaagccatttagtttcgtccttctcctcggaggtctgttcctcgcttacaggatgggagtctttattctggccgggattcgacttccaatcgtgctggttggaatcactgtgcccctcgttggccttctcgtgggatattgccttgctacatgcctgaagctccccgtggcccaaaggcgtaccgtgagcatcgaggtgggcgttcagaatagcctgctcgctttggccatgctccaactctccctgagaaggctccaggccgactatgcctctcaggctccatttatcgtagccctctctggcacctctgagatgctggccctggttattggacatttcatttattcgtcactcttccccgtaccatag

SEQ ID NO: 205552 - DNA, 1599 bp, synthetic construct
  misc_feature 1..1599: note = Description of Artificial Sequence: Synthetic coding sequence
  source 1..1599: mol_type = other DNA
atggccggcccccggccccccggcgacagccccgccatcaaggaggattccactggcctgggccccactcatgagccattttctggtcaaccaaacagtacgagtggcgatgttctgctgtcaagaagaggacctgggcacgccatccgccccccagggagagccatggtgctaatgcaggacaagggatcatctcagcaatggcccggcctcggcggggagggtggagggaccgggcccctcagtatgctaagagccgcccttctgttgatctctcttccctggggcgctcagggcaccgcctccacctcccttagcaccgctggtggacacactgtaccccctactgggggccgctatcttagcatcggagatggaagcgtcatggaattcgagttccccgaagactcagaaggaatcatcgtcatttccagtcagtacccaggacaggctaataggacagcccccgggccgatgctgagagtgacatctttagatacagaggtcctgacaatcaagaacgtgtctgccatcacctggggtggcggcggagggtttgtggtgagcattcatagtggactcgcggggcttgctcctctccatattcaactcgtggatgcccacgaagctcccccaactctgattgaagagcgcagggatttctgtatcaaagtgagtcctgccgaagacacaccagcgacactgagtgccgaccttgcacatttctccgaaaatcctatcctatacctcctgctgccacttatttttgtaaataaatgttcctttggttgcaaggtcgaactagaagtactcaagggcctgatgcaatcacctcagcctatgttgctgggactgctgggccagttcctggttatgcctctctatgcgtttctgatggccaaggttttcatgctgcccaaagccctcgcccttggtctcattatcacatgtagctctccaggtggcggtggaagttacttattctctctgctcttgggcggcgacgtgaccctggctattagcatgacattcctaagtacagtggcagccactggtttcctgcccttgagtagcgcaatctatagcagactgctctctatacatgagaccctccatgtgccaattagcaaaattctcgggaccttactgttcatcgcgattccgatcgctgtgggagtattaatcaagagcaagctgcccaagttctcccagctcctgcttcaggtcgtcaaacctttcagttttgttctccttctcggggggctttttcttgcttacaggatgggcgtcttcatccttgctgggattcgattaccaattgtgctggtgggcataactgttccactcgtaggtctcctagtgggctactgtcttgcgacatgcctcaaactccccgtcgcgcagcggcgaacagtgtccatcgaagtcggagtccagaattcactccttgcgctggcaatgctccaactgagccttcggagactccaggccgattacgcatcacaagcgcctttcattgtcgccctgtccggaacgagcgaaatgttggctctggtcatcggtcacttcatatactcctcgttatttccagtcccctag

SEQ ID NO: 205553 - DNA, 1434 bp, synthetic construct
  misc_feature 1..1434: note = Description of Artificial Sequence: Synthetic coding sequence
  source 1..1434: mol_type = other DNA
atggtgctgatgcaggacaagggcagcagccagcagtggcccggcctgggaggcgaaggaggtggaactggcccccttagcatgctgcgagccgcgctgctgctcatctcattgccctggggggcccagggaacagcgtcaacctctttgtctacagccggtggacacaccgtgccacccacaggtgggcgctatctcagcattggggacggctccgtcatggaattcgagtttcctgaggatagtgaaggcattattgttatttccagccaatatcccggccaagcgaacaggactgcccccggaccaatgttgagagtgacctcgctggatactgaggttctcaccattaagaatgtcagtgctatcacctggggcggcggaggaggcttcgtggttagtatccattccggactagcgggtctggcccctctgcatatccagctcgtggatgctcacgaggctcccccaaccttgattgaggaacgtcgcgatttctgcattaaggtctcccccgccgaggacactcccgcaaccctgtcagccgaccttgctcacttcagcgaaaatcccattctgtatctgctgttgcctttaattttcgtcaataagtgttcatttggctgcaaagtggagctcgaggtcttgaagggccttatgcagagcccacagcccatgttgttgggattgttgggtcagtttttggtgatgcccttgtacgcatttttgatggctaaggtttttatgttacctaaggcattagccttaggtctgatcatcacatgctcttcccccgggggtggcggcagctatcttttttcccttctcctgggcggggacgtcactctggctatttccatgacttttctaagcaccgtggcggcaactggctttctgcccctgagcagtgccatctattcccgcctcttgtctatccacgaaaccctgcacgtaccaatcagcaagattctgggaacacttctgttcatcgccatcccaatagcagtcggggtcttaataaagtcaaaactgccaaagttttcacagctcctgttgcaggtggtcaaacccttctcttttgtgctcttgctcgggggcctttttctggcctacagaatgggggtgttcatactggcaggcatacggttaccgattgtgctggttgggatcaccgtccccctcgtgggcctgctggtgggctactgtctggcaacatgtcttaaactgcctgtcgctcaaaggcgtactgtctcgattgaggttggagtgcaaaattctctactcgctctggccatgctacagctaagcctgcgcagacttcaggctgattatgcctctcaggcacccttcatagtggcacttagcggtacaagtgaaatgctcgccttagtcatcggccacttcatctactcttcgctgttccctgttccatag

SEQ ID NO: 205554 - DNA, 657 bp, synthetic construct
  misc_feature 1..657: note = Description of Artificial Sequence: Synthetic coding sequence
  source 1..657: mol_type = other DNA
atggtgctgatgcaggacaagggcagcagccagcagtggcccggcctgggcggggagggtggcgggactgggccactttctatgcttagagcggccctgctgctcatctcccttccctggggggctcagggaaccgcgtctacatctctctctacagccggggggcatacggtgccacccaccggtggtcggtacttaagcataggcgatggaagtgtaatggaatttgagtttcctgaagacagcgaaggtatcattgtgatcagttctcaataccccgggcaagccaacaggactgcccccgggcccatgctccgtgtgactagtctggataccgaggtactgaccatcaaaaatgtttccgctattacctggggcggagggggtggtttcgtggtgagcatccacagcggcctagctggcttagcgccactccatatccagttggtcgacgcccatgaagcacccccaactttgatcgaggagaggagagatttctgcataaaagtcagccctgccgaggatactcccgccacactgagtgccgacctggcacacttttccgaaaaccccatattgtacctgctattgccgttgatatttgtcaataaatgctcctttggatgcaaggttgagctcgaagtgctcaagggttag

SEQ ID NO: 205555 - DNA, 1314 bp, synthetic construct
  misc_feature 1..1314: note = Description of Artificial Sequence: Synthetic coding sequence
  source 1..1314: mol_type = other DNA
atggacggcaacgacaacgtgaccctgctgttcgcccccctgctgcgcgacaattacacactcgccccgaatgcaagcagcttgggacctgggacagatctggcgttggctccagcaagctccgccggaccaggccccgggttgtccctcggcccgggtccatcgtttgggttttcacccgggccaacacctaccccggaacctaccaccagcggattggctggcggcgctgcctcccacggtccctcccctttcccccgcccgtgggccccgcacgctttacccttttgggacactcctttaaatcacgggttaaacgtcttcgtgggagctgcactgtgtatcaccatgctgggtttgggctgtacagtggatgtcaaccattttggagcccatgtacgccgtcctgtgggcgccctgctagccgccctgtgccagttcggcctcctccctctgttagcgtttctgttagctcttgccttcaaactggacgaagtggcagctgttgcagtgctgctgtgcgggtgctgtccaggcggtaacctatcgaaccttatgtccctgctcgttgacggggatatgaacctatctatcatcatgaccatctcatctacactgctggctcttgtgttaatgcctttgtgcttatggatctatagctgggcctggatcaacacgcctatagtgcaactgctaccattgggaaccgtgaccctgacgttgtgtagtacattgatacctattggcttgggagtgtttatccgttataaatacagcagggtcgctgattatatcgtaaaagtgtccctgtggagcctcctggtgacgctggtagttctgtttattatgaccgggaccatgcttggccccgaactactggcttctatcccagccgctgtttacgtgatagccatattcatgccgctagccggctacgctagtggatacggtctggccaccctgtttcatttgccccctaactgcaagagaacagtttgtcttgagacgggttcccagaacgtgcagctctgtactgccatcttgaaactggctttccccccccagttcatagggagcatgtacatgttccccctcctttacgctttatttcagtccgccgaggccggcatcttcgtgctgatatataagatgtatggctctgaaatgttgcacaaacgggaccccctggacgaggatgaggatactgatatcagctacaagaagctcaaagaagaggagatggccgacactagctacggaactgtgaaggcggagaatatcatcatgatggaaacagctcagacttctctgtag

SEQ ID NO: 205556 - DNA, 1134 bp, synthetic construct
  misc_feature 1..1134: note = Description of Artificial Sequence: Synthetic coding sequence
  source 1..1134: mol_type = other DNA
atgcgggccaactgcagcagcagcagcgcctgccccgccaacagctccgaggaggaactccccgttggactggaggttcatggcaatttggagttggtgttcaccgttgtgagtacggtgatgatggggctgctgatgtttagcctggggtgtagtgtcgagatcaggaagctctggtcccacatccgtagaccatggggcatcgccgtggggctcctttgtcagttcggtttgatgccctttacagcttacctcttagcaatatccttttctttgaagccagtgcaagccatcgcagtgctgataatggggtgttgccctggtggtacaatttcaaacatttttacattctgggttgacggtgatatggacctctcgatctcaatgactacttgttctactgttgccgctctcggcatgatgcccctatgtatttacctttacacctggagctggagcctccaacagaatttgaccattccctaccagaatataggtataacacttgtgtgcctcacaatacccgtggcatttggcgtttatgtcaactatcgctggcccaaacagtcaaagatcatactgaaaattggcgccgtggtcgggggagtacttctgcttgttgtggccgtggcgggagtagtgttggccaagggtagctggaactcagacatcacactgctgactatctcatttatattccctctgatcgggcatgtcacagggttcttactggcattgttcacacaccagagttggcagcggtgtcgcacaatcagtttagagactggagctcaaaatatacagatgtgcatcacgatgctgcagctctcctttactgccgagcacctagtgcaaatgttgagctttccccttgcttatggcttattccagctgatcgatgggttcctcattgtggccgcgtatcagacctacaaacgccggctgaagaacaagcacggaaagaaaaactccggttgcacggaggtttgtcatacacgcaagtctacttcttctcgggagacaaatgcttttctcgaagtgaacgaagaaggagccattacaccaggcccccccggtcctatggactgtcatcgagccctagaacctgtcggtcacatcacatcgtgtgaatag

SEQ ID NO: 205557 - DNA, 2184 bp, synthetic construct
  misc_feature 1..2184: note = Description of Artificial Sequence: Synthetic coding sequence
  source 1..2184: mol_type = other DNA
atgctgcggatccccgtgcggaaggccctggtgggcctgagcaagtcccccaagggatgcgtgcgcacaactgcaacggccgcgtcgaatctgattgaagtctttgtcgatgggcagagcgtgatggtggagcccggaacaaccgtgcttcaggcctgcgagaaggtgggcatgcagatcccacgcttttgttatcatgaacgtctgagcgtcgctggcaattgtaggatgtgtttggtcgagatcgaaaaagcacctaaggtggtggcagcctgcgcgatgccggtaatgaaaggctggaacattctcactaactcagaaaaaagcaaaaaggcgagggagggagtgatggaatttctactcgctaaccaccctctcgattgccctatttgcgaccagggcggcgaatgtgatttgcaggaccagagtatgatgttcgggaacgaccgtagcaggttcttggaggggaagagggccgtggaggacaagaacatcggccccttggttaagacgataatgactcggtgcattcagtgcacaaggtgtatacggttcgccagcgagatcgccggtgtcgacgatctgggtacaacagggcgaggtaatgacatgcaggtcggtacatatatcgagaaaatgttcatgtcagagctttctggtaacatcattgacatttgtccagtgggcgctctcactagtaaaccgtacgcattcaccgcccgaccctgggagacccgcaagacagagagcatcgacgtgatggatgctgtggggagcaatatcgtggtgagtaccaggactggtgaggtgatgcgtatccttccacgcatgcatgaggacataaacgaggaatggatttctgataagactagattcgcctacgatggccttaagcgacagcgcctaacggagccaatggtgaggaacgagaagggactgcttacctatactagctgggaggatgctctgtctagggtcgccggaatgctgcagtcctttcagggcaaggatgtggccgctattgccggtggactggtggacgctgaggcactcgttgccctcaaagacttactcaacagagtggacagcgacaccctatgcaccgaggaagtgttcccaaccgcaggtgcaggtaccgatctgagatccaattacctgctgaacactacgattgccggggtcgaagaggccgacgtcgtattactcgtgggcaccaaccctaggtttgaggctcctctctttaacgcccgaattaggaagtcttggctccataatgacttgaaagtggctctcattggctcgccagtggacctgacctacacatatgatcacctcggggacagccccaaaattctgcaggacattgcatcaggatctcacccattctcgcaggtgttgaaggaagctaaaaaacctatggtggtactgggcagttcagccctgcagaggaacgacggagctgccattctagcggccgtatcttcgatcgcccagaagatcaggatgacctccggagtcaccggcgattggaaagtgatgaatattctgcataggatcgcgagtcaagtggcggcactggacttggggtacaaacctggagttgaggccatcaggaaaaatcctccaaaggttctcttcctactgggggccgacggcggctgtatcactaggcaggacctcccaaaggattgttttataatataccaaggacatcacggggacgtgggagccccaatcgcagatgttatcctacccggagctgcttatactgaaaagagcgcaacctacgtgaacaccgaagggcgagcccagcagactaaagttgccgtgactccccccgggctggcacgggaagattggaagataatacgtgctctgagtgaaattgcaggcatgactttgccctatgacacgttagaccaagtaagaaataggctcgaggaagttagtccaaatctggtgcgctacgacgatattgagggtgcaaattatttccagcaagccaatgaacttagcaaactcgtaaaccagcagctgctcgcagacccgctggttccaccccagctgacaatcaaagacttctacatgactgattcaatttcccgggcatcacaaactatggcaaaatgtgtcaaagcagtgactgaaggcgcccaagccgttgaagagccctccatctgttag

SEQ ID NO: 205558 - DNA, 492 bp, synthetic construct
  misc_feature 1..492: note = Description of Artificial Sequence: Synthetic coding sequence
  source 1..492: mol_type = other DNA
atgaccggcgacaagggcccccagcggctgagcggcagcagctacggctccatcagttcccccactagcccgacttctcccggaccacaacaggctccaccgagggagacatatctatccgaaaaaatccccattcctgacaccaaaccaggtacgttcagtctccgtaaactttgggcgttcacggggccggggttccttatgagtatcgcatttctggacccgggcaacatcgagtcagacttgcaggccggggctgtggcaggattcaagttgctgtgggtgctgttatgggccacagttctcggtctgctctgccaacgattggccgcgcggctgggggtggttacgggaaaggatctgggagaagtctgtcacctgtactatccgaagagcgagtctcggagcgtggctcagagcggtgttcagtggtgtgatgtgtccagtttacagcctttacctccaaggtgtccagccccctccagtgggtag

SEQ ID NO: 205559 - DNA, 1299 bp, synthetic construct
  misc_feature 1..1299: note = Description of Artificial Sequence: Synthetic coding sequence
  source 1..1299: mol_type = other DNA
atggtgcggtgccagctgaccgccaccagcaccagccaggtgcccagaacggttctctggttgaccatagagcttgccatcgttggaagcgatatgcaggaggtcatcggcacggccatcgcctttaatctcctttccgccggacggatacctctgtggggaggggtgctgatcacaattgtagatacatttttcttcctctttttagacaactatggcctgcgcaaactggaagctttctttggcctcttaatcactataatggccctcactttcggttacgaatatgttgtggcccggcccgaacagggagccctgctgcgcgggctgttcttgccaagttgcccaggatgtggacatcccgaattgctgcaggctgtgggcattgttggcgcaattattatgcctcacaatatttacctccatagtgcactggtgaaatctagagagattgaccgggcaaggcgcgctgatatacgcgaagctaacatgtactttctaatcgaggcaactatcgccttaagtgtttcttttattatcaatctcttcgttatggctgtgttcggccaggccttttatcagaaaacaaaccaggcagcctttaacatctgcgcgaacagctctctgcatgattatgcaaagatcttcccgatgaacaatgcaacggtagctgtggatatctaccagggtggggtgattttgggatgtttattcggaccagctgccctgtatatatgggccattggactgctggctgctgggcagtccagcaccatgacgggcacctatgcagggcaattcgttatggagggctttttgagactgcggtggtccagattcgcccgcgtcttactgacacgctcctgcgccatcctgccgacggtgttagtggccgttttccgcgatctgcgggacctcagtggattaaacgacctgctgaacgtgctccagtctttgctgcttcccttcgcagtgctccccattctcacttttacctcaatgcccactctaatgcaggaattcgccaacggattactgaataaggtggtgacctcttccattatggtcctcgtctgcgccatcaatctgtacttcgtggtgtcctacctcccctcattgcctcacccagcctacttcggccttgcagcattgctcgcagcagcatatctgggccttagtacctacttggtttggacttgctgcctggctcacggcgcaacttttctagcccactccagtcaccaccatttcctgtatgggctgctcgaagaggaccagaaaggagagactagcggctag

SEQ ID NO: 205560 - DNA, 3351 bp, synthetic construct
  misc_feature 1..3351: note = Description of Artificial Sequence: Synthetic coding sequence
  source 1..3351: mol_type = other DNA
atgctgaacaacctgaccgactgcgaggacggcgacggcggcgccaacccaggggacggtaatccaaaagagtcctccccctttatcaacagcaccgacactgaaaagggcaaggaatacgatggcaaaaatatggctcttttcgaggaggagatggataccagtcctatggtatcctcactgctgtcaggactggcaaactacaccaaccttcctcaaggctcacgagaacacgaggaggccgagaataatgaggggggtaaaaaaaaacctgtgcaggcgcccaggatgggcacttttatgggagtctacctcccgtgtctgcagaacatcttcggcgtgatcctcttcttacggctgacttgggtcgtgggaatcgcgggtattatggaaagcttttgcatggtgttcatttgttgctcttgcaccatgctcactgctatttcaatgagcgcgattgccactaatggcgtggtgccagcaggcggcagctattacatgataagtagaagcctcggccccgagttcggaggtgccgtcggtctctgtttctatttgggcactaccttcgcgggtgctatgtatatcctgggtactatagagattctgctcgcctaccttttcccagctatggcgatttttaaggctgaagacgcgtcgggcgaagccgcagccatgctgaacaacatgcgtgtctatggaacttgtgtgttgacatgcatggccactgtcgtgttcgtgggagtcaaatacgttaacaagtttgccctcgtgttcctgggctgcgtgattctgtcaattctcgccatatatgctggggtcatcaagagcgcctttgaccctccgaacttcccgatttgcttgctggggaatcggactctgtcacgtcacggatttgatgtgtgtgccaagctcgcctgggaagggaacgagaccgttacaacaaggctctggggactgttttgcagcagccgtttcttaaatgctacctgtgacgagtatttcaccagaaataatgtgaccgagattcaaggaataccaggcgctgcctccggcctcattaaggagaatctgtggagctcataccttaccaaaggggtcattgtagagcggagcggtatgacttctgtagggctagcagatggcacccccatcgatatggaccacccatacgtgttcagtgatatgacatcatacttcacactgctggtgggcatttattttccatctgtgacaggtattatggctggctccaatcgctcaggtgacctccgggatgcccagaaatccatccccactggcacgatacttgctattgcaaccactagtgcagtttacatttcctctgtggtccttttcggcgcctgtatcgaaggagtcgtcctgagagacaagtttggcgaggccgtgaatggcaatctggtggtgggcaccctggcctggcctagcccgtgggtcatcgttattgggtctttcttcagcacctgtggggctggcctgcagtctctgacaggcgccccacgacttctgcaggccataagccgtgacggcattgtcccttttttgcaggtgtttggacacggcaaggcaaatggtgagcctacgtgggccttgctgctgactgcctgcatctgtgagatagggattctcattgcaagtctcgacgaggtcgcacctatccttagcatgttttttttgatgtgctatatgttcgtgaatttagcctgcgccgtccagactctcttaaggacccccaactggcggcccaggtttcggtactatcactggaccctttcatttctcggcatgtcactgtgtcttgccttgatgtttatttgcagctggtactatgcccttgtggcaatgctcatagcaggcttgatctataaatatattgagtatcgcggagcagagaaagaatggggggatggaatccgcggcctgtccctctccgccgcccggtacgccctgctgcgccttgaggaagggccacctcacacaaaaaactggcgccctcaactgttagtgctcgtacgtgtcgaccaagatcagaatgtggtccatccccagcttctgagtttgacctcgcaattgaaagcagggaagggattaacgattgtggggagtgtactcgaaggtactttcctggagaaccatccccaggcccagcgcgcagaggaaagtatccgtaggctaatggaagctgaaaaggtgaaaggattctgtcaggtggtgatcagtagcaatttacgggacggggtatctcatctcattcagtccggaggacttgggggcctgcagcataacacagtgttggtcggttggccaagaaattggagacagaaagaagatcatcagacatggaggaatttcatcgagctcgtgagggagaccacagcggggcatctggccctcctcgtaactaagaacgtcagtatgttcccaggaaaccctgaacgcttctctgagggatcgattgatgtgtggtggatcgttcatgacgggggtatgctcatgctgttgccatttctcctgcgccaccacaaagtgtggagaaagtgcaagatgaggatattcaccgtggcccagatggatgacaatagtatccaaatgaaaaaggacttgactacgtttctctaccatttacgtatcactgccgaggtcgaggtggttgagatgcacgagtcagacattagtgcttacacctacgaaaaaacacttgtgatggaacaacgtagccagatcctgaagcagatgcacctcactaaaaacgaaagagagcgggagattcagtcgattactgacgaaagcaggggaagtatcagacgcaaaaaccctgctaacacccgcctgcgtctgaatgtacccgaagagactgccggagattccgaggagaagcctgaggaagaggtccaattgatccacgaccaatccgcgcctagctgccctagttcctccccctctcctggggaagaaccagagggcgagggggagacggatcctgagaaagttcaccttacttggacaaaggacaagtctgtagcagagaagaacaaaggccccagtcctgtgagctctgagggaataaaagattttttcagtatgaaacccgaatgggaaaatttaaaccaatcaaatgtgagaaggatgcatactgctgtacggctgaacgaggtgatcgtcaagaagtcccgtgatgccaagttggtgctgcttaatatgcctgggcccccacgtaacagaaacggagatgaaaactatatggagttcctggaagttctcaccgagcacctcgatcgggtgatgctggtacgcggcggagggagagaagttattaccatctactcatag

SEQ ID NO: 205561 - DNA, 858 bp, synthetic construct
  misc_feature 1..858: note = Description of Artificial Sequence: Synthetic coding sequence
  source 1..858: mol_type = other DNA
atgctgaacaacctgaccgactgcgaggacggcgacggcggcgccaaccctggcgatggaaatcccaaagaaagttcaccatttatcaattcgacggatactgagaaaggaaaagagtacgacggcaaaaacatggccctgtttgaggaagagatggatacatctcctatggtttccagcttgctgtcaggcttggccaactacactaacctcccccagggcagccgggagcatgaagaagccgagaacaatgagggaggcaaaaaaaagcccgtccaagcacccagaatgggcaccttcatgggggtttacttgccctgcctgcagaatatttttggggtgatcctgtttctgaggttaacatgggtggtcggcatcgctgggatcatggagagcttctgcatggtttttatctgttgctcgtgcactatgttgactgccatctcaatgtccgcaatcgccaccaacggtgtagttccagctggtgggtcgtactacatgatttcccggagcttaggccctgagttcggaggcgcagtcgggttgtgcttttatctaggtacaacctttgccggggccatgtacatccttggcaccatagaaattctcctcgcatacttatttccagccatggcgatattcaaagcagaggacgcaagtggcgaggccgcagcaatgctgaataatatgagagtgtacggcacttgcgttctgacctgcatggcaactgtggtgttcgtcggcgtcaagtacgtgaacaagtttgctctcgtattcttgggatgtgtaattctgagtatcctggccatctatgccggtgtgatcaagtcagccttcgaccctcctaatttcccctag

SEQ ID NO: 205562 - DNA, 3420 bp, synthetic construct
  misc_feature 1..3420: note = Description of Artificial Sequence: Synthetic coding sequence
  source 1..3420: mol_type = other DNA
atgagccggcggttcaccgtgaccagcctgccccccgccggccccgcgaggagccccgatcctgagtccaggcggcactctgttgctgatcctagacatctgccgggtgaggatgttaagggggatggaaacccaaaagagtccagcccctttataaattcaactgatactgagaagggcaaagagtatgacggcaagaatatggctctgtttgaagaagaaatggatacctcacctatggtgtcctccctgcttagcggcctcgctaactatactaatctgccacagggatcccgggagcatgaggaggcggagaacaacgagggaggcaaaaagaagccagtccaagccccacgaatgggtactttcatgggcgtatacctgccgtgtctgcagaatattttcggggtgattctctttctgcgcctgacatgggtcgtgggaatcgctgggattatggaaagcttttgcatggtgttcatttgctgcagttgcactatgctgaccgctatcagcatgtcagccatagccactaatggggtcgtgccagctggggggtcgtactacatgatctctcgatcccttggccctgaattcggtggggctgttgggttatgtttctacctgggaactacctttgccggggcaatgtatatcctcgggaccatcgagatcctgctggcctacttgtttcccgccatggccatcttcaaggccgaggatgcttcgggagaggccgctgccatgttaaataatatgcgcgtttacggaacctgtgtactcacttgtatggctaccgtggtgtttgtgggggttaagtacgtgaacaagttcgccctcgtgttcctgggttgtgtgattctgtctatcctggccatctacgccggggtcattaagagcgcctttgatcctcccaacttccccatatgcttgcttggcaaccgcacactctcacggcatgggttcgacgtttgcgctaaactggcgtgggaggggaacgagacagtcaccacaaggctgtggggtctgttctgctcaagcaggtttttaaacgccacctgtgatgaatactttacacggaacaatgtgacagaaattcaggggattcctggcgcagccagcggcttgatcaaagaaaatctttggtcctcgtacctgacaaaaggcgttattgtggagcggtccggaatgacaagtgtgggactggccgatggcacccccatcgatatggatcatccttacgtgttctccgacatgactagttattttaccctattggtgggcatctatttccctagtgtcacaggcatcatggccggctcaaacaggtcaggagatcttcgggacgctcagaaatctatccccacgggcaccatcctggctatcgctaccacgtccgccgtttacatctcttcggtcgtgctctttggggcctgtatcgaaggggtggtcctcagggacaagtttggggaggccgtcaacgggaacctggtggtggggaccctggcatggccttccccttgggtcattgtgatcggatcctttttctctacgtgcggcgccggtctgcagtccctgaccggggcacctcgccttttgcaggccatttctagggatgggatcgttcccttcctccaggtgtttggccacggcaaagccaatggcgaaccaacatgggccctactgcttaccgcctgcatctgtgaaattggcattctgatagctagtttggacgaagtcgcccccatcttgtccatgttctttttgatgtgttacatgtttgtcaatctagcttgcgcggttcaaaccctcctacggacgccaaactggagaccacggtttagatactaccactggacgctgtcgttcctgggaatgtcactgtgcctcgccctcatgttcatctgctcctggtattatgccctggtggcaatgctcattgccggcctgatttacaagtacatagagtatcgtggggccgaaaaggagtggggtgatggcataagaggcctgtctctatccgcagccagatacgccttactgcgacttgaagaaggcccccctcatactaaaaactggaggccgcaactccttgtgctggtgcgagttgatcaggaccaaaatgtcgtgcatcctcaactgctgtctctcacaagccagctgaaagccggtaagggcctgaccatcgttggcagcgtcctggaagggacattcttggaaaatcaccctcaggcgcagcgtgccgaggagagcatccggaggctcatggaagctgagaaggtgaagggcttctgccaggttgtcatttccagcaacctgagagacggagtttcccatctgatccagtccggtgggttgggcgggctgcagcacaacacagtactggtgggatggcctcgcaactggcgacaaaaggaagatcaccagacttggcgtaattttatcgagctcgtgcgcgaaaccaccgctggccacctggctctcttggtgaccaaaaacgtcagcatgtttccaggaaacccagaaaggtttagcgagggttccatagatgtgtggtggatagtgcacgacggcggaatgctgatgctgctaccattcctgctccggcaccacaaagtttggaggaagtgtaagatgcggatctttactgtggcacagatggacgataactcaatccagatgaaaaaagatttgaccacttttctttaccacctgcgtatcaccgccgaggtggaggtggtggagatgcacgagtcagacatttcagcctatacatacgaaaaaacccttgtcatggagcagcggagccagatcctgaaacaaatgcatctcactaagaatgagagggaacgggagatacagagcatcactgacgaatcccggggcagcatccgcaggaagaatcctgccaatacccgacttagattgaatgtacccgaagaaacagctggcgactctgaggagaagcctgaagaggaggtccaactgattcatgatcagagtgcccctagctgccctagctccagtccatcccctggcgaggaaccggagggggaaggtgagaccgatcctgagaaggtgcatctgacgtggacaaaggacaaaagcgtggcagagaagaataagggccccagcccagtctctagcgaagggattaaagatttcttttcaatgaagccagaatgggaaaaccttaatcaaagtaacgtgcgtcgaatgcataccgctgtgaggctcaatgaggtcatcgtgaaaaagtccagagacgccaaactggttctgctcaacatgcccggaccaccaaggaataggaatggagacgagaattatatggaatttcttgaggtcctgacagagcatctggaccgcgtgatgctggtgcgaggcggcggacgagaggtgattaccatttacagctag

SEQ ID NO: 205563 - DNA, 561 bp, synthetic construct
  misc_feature 1..561: note = Description of Artificial Sequence: Synthetic coding sequence
  source 1..561: mol_type = other DNA
atgctgaacaacctgaccgactgcgaggacggcgacggcggcgccaacccaggggatggcaacccaaaagagagctccccctttatcaacagcacggacactgagaagggtaaagaatacgacggcaaaaatatggcactctttgaggaagagatggatacaagccctatggtgtcaagtcttttgagcggactagcgaactatacaaatttacctcaggggagcagggagcacgaggaggccgagaataatgagggcggaaagaagaagccggtccaagcccctagaatggggacctttatgggagtctatcttccttgccttcagaatattttcggcgtaattttgttcctgagattaacttgggtggtaggtatcgcaggtatcatggagtcgttctgcatggtgtttatttgctgcagctgcacgatgcttaccgcaataagtatgtccgccattgccacaaacggggtggtccccgctggaggaagctattacatgatcagtagaagccttgctatggctaggcctatggagtcaagaccaggaccctgctcttag

SEQ ID NO: 205564 - DNA, 3258 bp, synthetic construct
  misc_feature 1..3258: note = Description of Artificial Sequence: Synthetic coding sequence
  source 1..3258: mol_type = other DNA
atgccccacttcaccgtggtgcccgtggacggcccccggcggggcgattacgacaatctcgaaggacttagttgggtggactacggagaacgggctgagttggatgactcggatggccatggaaatcaccgcgagtcatctcccttcctgagtcctctggaggcttcccggggcattgactattacgatcgtaacctcgcactgtttgaagaagagttggacatccgaccaaaagtgagtagcctgcttggcaaattagtttcttacacaaatctgacccagggagccaaggaacatgaagaggcggaaagcggggagggaactagaaggcgcgctgcggaagcaccaagtatgggcacacttatgggtgtttatctcccttgcctccagaacatattcggagtcattctttttctgcggctcacctggatggtgggcactgccggagtgctccaggccctgctgattgtgctcatttgctgctgctgtactctgttaacagctatctccatgtccgccatagccacgaatggtgtagtgcctgccggcggaagttattttatgatctcacgaagcctaggccccgagttcgggggggccgtcggcctgtgcttttatctgggtacgaccttcgccgccgcaatgtatatcctcggagccatagagatcctgctcacgtacatcgcaccgccggcggctatcttttacccttcgggcgcacatgacacttccaacgccacccttaataatatgagagtctacggaaccatatttcttacttttatgacactggtggtctttgtcggagtcaaatatgtcaacaagttcgcctccctgttcctagcgtgcgtcatcatttccattcttagcatctatgctggcgggatcaagtcaatctttgacccccctgtttttccagtgtgtatgctgggaaacaggaccctctcacgcgatcagttcgacatttgtgcgaaaacagctgtggtggacaacgaaaccgtggcaacccagctgtggtccttcttctgtcattctcccaatctgaccacggacagttgtgacccatactttatgctcaacaatgtgacggagattccaggcatcccaggtgctgctgccggagtgctgcaggagaatctttggtctgcgtacctggaaaaaggagacatagtagagaagcacggactgccaagcgccgatgcaccaagcctcaaagagtccctgccactctacgtagtggccgatatcgcaacctccttcactgttcttgtggggatttttttccctagcgtgactgggattatggccggctcgaataggagcggcgacctgcgggacgctcagaaatccatcccggtgggcacaatcctcgccatcatcacaacatctctggtgtatttctcctccgtggtacttttcggtgcctgcatcgaaggcgtggtgctgagggataagtacggcgatggagtctcacgtaacctcgtggtcggaacactggcttggcctagtccatgggttattgttatcggtagttttttctccacctgcggagctggcctgcagtctcttacaggagcccccagactactccaggcgattgcaaaggataacatcatccccttcttgagggttttcggacacggaaaagttaacggcgagcccacatgggcactcttgctcactgcgctgatcgctgagctgggcatcctgattgcttctctggatatggttgcaccaattctttccatgttctttcttatgtgttatctgttcgtgaaccttgcttgtgctgtccagacattgctgagaactcccaactggaggcctagatttaagtattatcactgggctttgtcatttctcggcatgagcctctgcctggctctcatgttcgtaagcagttggtattatgctctggtcgccatgctcattgccggcatgatctataagtacatagaataccaaggcgccgagaaagagtggggcgacggaattagaggattaagtctctctgcagcaaggtacgcccttctcagactggaggagggaccaccacacaccaagaattggaggccacagctcttggtgctgctgaagcttgacgaggacctgcacgtcaagtacccacggctgctgaccttcgcaagccagctaaaggccggtaaaggcttgaccattgtcgggtcagttatccaagggtcatttctggagtcctatggcgaggcacaagccgccgagcagacaattaagaacatgatggaaattgagaaagtcaaagggttctgtcaagtggtggtggctagcaaagttagagaaggattagcacacctaattcagagctgcgggctcggagggatgaggcataacagcgtggtgctgggatggccctatgggtggagacagtcagaagacccccgggcttggaagacatttattgacacagttaggtgtacaactgctgcacacctcgctctgctagttcccaaaaatatcgcattctatccttcgaatcatgaacggtatttagagggccatatcgacgtatggtggattgtccacgacggcggcatgttaatgttgctgccctttcttctccggcagcataaagtgtggcgcaagtgtcggatgagaatctttactgtggcacagatggatgataattctattcagatgaagaaggatcttgctgtgttcctctatcacctgcggctggaagcagaggtggaagtcgtggagatgcacaacagtgacatatccgcgtacacttacgaacgaaccctgatgatggaacagcgttcacagatgctcaggcagatgcggctgacaaagacagagagggagcgtgaggcacagcttgtgaaggaccgccatagtgcattgaggctggaatccctgtactccgatgaagaagacgaatctgcggtcggagcagataagattcaaatgacctggacaagagataaatatatgacagaaacatgggacccctcacacgcccctgacaatttccgcgaactggtgcacatcaaacccgaccaaagcaacgttaggcggatgcatacagccgtgaaactgaatgaagttattgtgactcgctcccatgatgccagattggtcctgcttaatatgccggggccccccaggaacagcgagggtgatgagaattatatggagttcctcgaggttctgactgaggggctagaaagggtgttgctagttcggggggggggccgcgaggtcatcacgatatacagttag

SEQ ID NO: 205565 - DNA, 2343 bp, synthetic construct
  misc_feature 1..2343: note = Description of Artificial Sequence: Synthetic coding sequence
  source 1..2343: mol_type = other DNA
atgccccacttcaccgtggtgcccgtggacggcccccggcggggcgattacgataatctggaaggcctgtcttgggtagattatggagaacgagcagagttggatgatagtgacgggcatgggaaccatcgggagagttctccttttttgagcccactggaagcctcacgcggaatcgattactatgatagaaacctggcactgttcgaggaggagttagacatccgccccaaagtgtcctccctgttgggaaagctagtgtcctatacgaacttgacccagggtgccaaggagcacgaggaagccgagtcgggagaggggacccgccggagagcggctgaggctccaagtatgggaacgcttatgggcgtgtatctcccttgcctgcagaatattttcggagtgattttgtttctgcgtcttacatggatggtcggtaccgcaggcgtgcttcaggcgctgttgatcgtgttaatatgctgttgctgcacgctccttacggctataagcatgtccgctatcgcaacgaatggtgtggtacccgccggcggatcctatttcatgatttctaggagcctggggccggagttcggaggagcagtgggcctgtgtttctacctaggcaccaccttcgctgccgcaatgtatatcttgggagccatcgagatcttactgacctacattgcgccaccagcagccatcttttatccgtcaggcgcacatgataccagcaacgctacgctgaacaacatgcgggtgtatggcaccatcttcctgacattcatgaccctggttgtgttcgtgggtgtgaaatatgtgaataaattcgctagcctattcctggcctgcgtgatcatctctatcctgtccatttacgccggggggatcaagtctatattcgatccccccgtcttcccagtgtgtatgctcggaaatagaactttgtccagagaccaattcgatatttgcgcaaagactgctgtggtggataacgaaacagtcgcaacccagttatggtcttttttctgccacagccccaatcttactacggacagttgcgacccttattttatgctaaataacgtaacagagattcccggcattccaggggccgccgccggagttctgcaggagaatttgtggagcgcttatctggaaaagggagacattgtcgagaagcacggattgcctagcgctgacgctccctcgttgaaagagagtctgcccctgtacgtggttgccgacattgcgacaagctttaccgtgctggtgggaattttctttcccagcgtgacgggaatcatggctggaagcaatcgttccggcgacctgagagatgcccagaagtccatcccggtaggcactatcctggctatcattaccacgagtcttgtgtacttttcctcagtggttttgttcggggcatgcattgaaggcgttgttctaagggacaaatacggggatggagtgtctagaaacctggtggtggggactctcgcatggccctctccctgggtgatcgtgatcggatctttttttagtacttgtggtgccggactccaaagtctgaccggggccccaaggttattgcaggccattgctaaggataatattatccccttcttgcgcgtgttcgggcacggaaaagtcaatggagagcccacatgggccttgctgctcacagccctgattgcagaactcggtatattgatcgctagtctggacatggtggcaccgatcctgagcatgttttttcttatgtgctatttattcgtgaatcttgcctgtgccgtgcagaccctgttgcgaacaccaaattggagaccaagattcaaatactaccactgggccttgtcctttctgggtatgagcctttgcctggctctgatgtttgtgtctagttggtactatgcgctcgtcgccatgcttattgctggcatgatttataagtacattgaatatcaaggtgctgaaaaagagtggggagatggcattcggggccttagccttagcgccgccagatacgctctgcttcggttggaggagggccccccccacacaaaaaactggaggccacagctcttggttctcctgaagctcgacgaggacctccacgtcaaatacccccggctgcttacattcgcctcccaactaaaagccgggaaaggtctcaccatagttggttccgtcatccagggctccttcctggagtcctatggtgaagctcaggctgccgagcagacgccttgcgctgctttgagactgcccacttggccgtgctcatgccccagaacatctccgtctactccagcaaccacctccgccacctggcgagcgacctag

SEQ ID NO: 205566 - DNA, 3264 bp, synthetic construct
  misc_feature 1..3264: note = Description of Artificial Sequence: Synthetic coding sequence
  source 1..3264: mol_type = other DNA
atgcgggccggcggcgcctgccggcccggcgccgccggcaccgccgctgggactgctgctggcggatgggacggcggctgtggcggcgctgagcccgccagatgtttgaccagcccctggtgccagtggactgggcgcggcgcggccacaatgactaccagccgcggcagcgtgggctggacgaccgggagcgcaccttcctggatgactcggacagaagagttagatattcgccccaaagtttccagtctgctgggcaagcttgtctcttatacaaatctgactcagggtgcaaaggagcacgaggaagccgaatcgggcgaggggacacgtcgccgtgcagccgaggctcctagcatgggcacgctcatgggggtgtaccttccgtgtctccagaatatcttcggcgtgatcctgttcctgagactgacgtggatggtgggtacggccggtgtgctgcaggccctgctgattgtcctgatctgttgctgttgtaccctactgaccgccatttcaatgtctgcaatagccactaatggcgtggtcccggccggcggctcctatttcatgatcagtcgtagcctgggtcccgaatttgggggtgccgtaggtctgtgcttctatctcggcaccactttcgctgcggcaatgtacattctgggggccattgagatactcctgacctatatcgctcccccagctgctatcttctatccttccggggcccacgacactagtaacgctacactcaataatatgagggtatacggcaccatcttcctcacattcatgaccctggtggtgtttgtcggcgtcaaatatgtaaacaaatttgcaagtctcttcctggcctgtgtcatcatctctatcctcagcatctatgccggaggcattaaaagtatcttcgacccgcccgttttcccggtgtgtatgttaggaaacaggaccttgtctagggatcagttcgatatctgcgcaaaaacggccgtcgtagataatgaaacggtcgccacacagctgtggagtttcttttgccactccccaaacttgactaccgacagttgtgacccctattttatgctgaataatgtgacggagataccaggtattccaggggccgccgccggcgttcttcaggaaaatctttggtccgcctacctcgaaaagggtgacatcgtggagaagcacggcctgcccagtgctgacgccccatcgctaaaggagagcctccctctgtatgttgtagctgacatagctacgtcatttaccgttctagtcggcatcttctttccgtccgtgaccggaataatggcgggaagcaacagatccggcgatctcagggacgcccagaagagcattcctgtggggactatactggctatcattacaaccagcctggtttatttctctagcgtggtcctcttcggagcttgcatagaaggtgtagttttgagagacaaatacggcgatggagtcagtagaaatctggtcgttggcacccttgcttggccttccccctgggttattgttatcggcagctttttcagtacttgcggagccggcctgcaatctctgaccggagctcctcgcctactgcaggctattgcaaaggacaacattatccctttccttcgcgtgtttgggcatggaaaagtgaatggcgagcccacttgggcactgcttctaaccgcacttatcgctgaattgggcatactgatcgcttcactggacatggtcgcccctatactgagcatgttctttctcatgtgctacctgtttgttaatctcgcttgcgcagttcagactctgcttcggactccaaattggaggccccgttttaaatactatcactgggcgctttcattcttgggtatgagtctttgcttggctctgatgtttgtgtctagttggtattacgccctagtggctatgcttattgcaggaatgatctacaaatacatcgagtaccagggggccgagaaagaatggggtgacgggatcaggggtctgtccttgtccgccgccagatatgctctcctccggctcgaggagggtccaccacacacaaagaactggcgcccccagctgcttgttcttctgaaactggatgaagacctgcatgtcaagtatcctagactacttacatttgcctcccagctgaaggctggcaaaggacttaccattgttggtagtgtgatacaaggctcatttctggaaagttacggcgaggctcaggccgccgaacagacaattaaaaacatgatggagattgaaaaggtgaaagggttttgccaggtggtggtggcttcgaaggtgcgcgaaggtctagcccacctgatccagtcctgtggactgggagggatgcgccataactcagtggtgcttggctggccatatgggtggcgacagtctgaagatccacgtgcatggaagacctttatcgacacagtgagatgcaccaccgctgcccacctggcacttctggtacccaagaacattgcattttacccaagcaaccatgagcgatacctggaaggtcacatcgatgtgtggtggatcgtgcacgatggcggtatgcttatgctgctgccatttttacttagacagcacaaggtgtggcggaaatgcagaatgcgcattttcactgttgcacagatggacgacaattccattcagatgaaaaaagaccttgccgtgtttttataccatctcaggctggaagccgaagtcgaggtggtcgagatgcataattccgacatttctgcttatacctacgagcgcaccctgatgatggaacaacgctcccagatgttgagacaaatgagattaaccaaaaccgagagggaaagagaggcccagcttgtgaaggaccgccattcggccctgagactggagtctctgtactccgacgaggaggatgagtccgccgtcggagcagacaaaatacagatgacgtggactagggacaagtacatgacagagacctgggatcccagtcacgccccagacaattttagggagctggttcacatcaagccagaccagtccaacgtaaggcgaatgcataccgccgtgaagctaaacgaggtgattgtgaccagatctcatgacgcacggctggtgcttctgaacatgcccggacctccacggaacagtgaaggcgacgagaattacatggaattcctggaagtcctgacagaaggacttgagcgggtgctgctggtacgagggggtgggcgcgaggtaatcactatttactcatag

SEQ ID NO: 205567 - DNA, 3240 bp, synthetic construct
  misc_feature 1..3240: note = Description of Artificial Sequence: Synthetic coding sequence
  source 1..3240: mol_type = other DNA
atggccgccgagggcgccgtgtgcggcttcgtgtacctggagggcacggcatgggccgtgccggaagacaccgagccgttggcttcctgtaccttagggcacggcaatcatcgggagtctagccccttcctgagccccctcgaggccagtagaggtattgattactacgacagaaatctggccctgtttgaggaagagctcgacatccgccccaaagtgagctctctgctcggcaagctcgtgagttacaccaatctgactcagggagcaaaggaacatgaggaagccgagtctggcgagggcacccggaggcgggctgccgaagcccccagtatggggacactcatgggtgtgtacctcccctgtctccagaatatctttggcgtgatcctttttctccgccttacatggatggttggcactgccggggtccttcaggctctgcttatcgtgctcatttgttgttgctgcactctgctgacagcgatctccatgtcagccatcgcaaccaatggtgttgtcccggccggcggctcatattttatgatctctcgcagcttggggccggagtttgggggcgcggtggggctctgtttctacctggggacgaccttcgccgcagccatgtacattctcggcgccatcgaaatcctgttgacatatattgcaccacctgcggctatcttttacccctccggtgctcacgacacctccaatgctaccctgaataacatgagagtctacggtacaattttcctcaccttcatgaccctagtcgtgttcgtgggtgtgaagtacgtaaacaagttcgcctccctgttcctcgcctgtgttatcatttctattttatctatttatgccggagggataaagagcatctttgacccgccagtcttccccgtttgtatgctcggaaacaggaccctgtcaagagaccagttcgatatttgcgctaagactgcggtggtggacaacgagacggtggccacacaattatggtcattcttttgtcacagcccaaacttgactactgatagctgtgatccttattttatgctgaataatgtcactgaaattccgggaatccccggagcagccgccggagtgctccaagagaatttgtggagcgcttacctggaaaagggcgatattgtggaaaagcacggtctgcctagtgccgatgctccctccttgaaagagtctctgccactgtatgttgtggccgacattgcaacatcattcacagtgctggttggaatattcttcccttccgtgacgggcatcatggccggttccaatagatctggcgatctgcgcgatgcacagaagtcgatccccgtggggaccatcttggctatcattacaacgtccctagtgtacttttcttcagtggtcctgtttggtgcctgcattgagggcgtggtgttgagggataaatatggggatggagtgagtaggaatctggtggtcggcacactggcatggcccagtccttgggttattgtgatcggttctttcttttcaacctgtggggccgggctccagagcttgaccggtgctccccggttgctgcaggctatcgcaaaagacaatattatccccttcctgagggtttttggtcatggaaaagtgaacggggagcccacctgggcactcctgttaaccgccctcattgctgagctcggaatattaatcgcctcattggatatggtggcccccatcttgtccatgttctttctgatgtgctacctctttgtgaaccttgcctgcgccgtccagactcttctgagaactcctaattggaggcccagattcaaatattaccactgggctctgtctttcctgggtatgtcactgtgtctcgccttgatgttcgtttcgtcctggtattatgccctcgttgccatgctgatcgccgggatgatttacaagtatatcgagtaccagggcgcagagaaggagtggggcgacggcatccggggcctctctctctctgccgcccggtatgcccttctgcggttggaagaggggcctccccataccaagaattggaggcctcaacttctggtcttactgaagttagatgaggaccttcacgtgaagtaccctcggctcttgacttttgcatctcaactcaaggcaggcaaggggttgaccattgtgggctccgttatccagggctcttttctagaaagctacggtgaggcccaggccgctgaacagaccatcaagaacatgatggagattgagaaagtaaaagggttttgccaagttgtggttgccagtaaggttagggaaggcctcgcccatctgattcagagctgcggcctcggtggcatgcggcataatagcgtagtgctgggatggccttatggctggcgccaatctgaggatccacgcgcctggaagacatttatcgatacagtcaggtgcaccaccgccgctcatctcgccctgttagttccaaagaacatagctttttatccctccaaccacgaaaggtatctagagggacacatcgacgtgtggtggatcgtgcatgacggcggcatgctcatgctgctgccgttcctgctccgtcagcataaggtttggagaaaatgtcggatgcgtatcttcactgtcgcccagatggatgataattcaattcaaatgaaaaaggaccttgccgtcttcttgtatcatctgagattggaggctgaggtggaagtggtggaaatgcataatagcgacatatcagcctatacgtacgaaagaacgctcatgatggagcagagaagccagatgttacgacagatgcggctcacaaagacggagagagagagggaagcccagctcgtcaaggacagacactcggcactgcggctggaatctctatatagtgacgaggaggatgagagcgcagtgggcgcagacaaaattcagatgacttggacacgggacaagtacatgacggagacctgggatccctcacacgccccagataattttagagagctggtgcacataaagcccgaccagtctaatgtgcggaggatgcataccgctgtgaagctgaacgaagtgattgtgactagaagccatgacgccaggctagtgcttctgaacatgccaggcccacctcggaattcagagggcgatgaaaattatatggaattcctggaagtcctgactgaagggttagagcgcgtcctgctggtgcgcggaggcgggcgcgaagtgataacgatttatagctag

SEQ ID NO: 205568 - DNA, 3165 bp, synthetic construct
  misc_feature 1..3165: note = Description of Artificial Sequence: Synthetic coding sequence
  source 1..3165: mol_type = other DNA
atgggcgacaccctgagccccggccacggcaaccaccgggagagctcaccctttttaagcccacttgaggcgtcacgagggattgattactacgaccgaaaccttgccctatttgaggaggaattagatatccgccccaaggtgagtagcttgctggggaagctggtgagttatactaatttgacgcagggcgctaaggaacacgaggaggcggagagtggtgagggcactcggcgacgcgccgctgaggctccatccatgggaacattgatgggagtttaccttccgtgcctccagaacatttttggtgtaatcttattcctgcgcttgacctggatggtcggtaccgctggtgtgcttcaggcactcctgattgtgctcatttgctgttgctgtacactgctgactgccataagtatgagtgcaatcgccacaaatggcgttgttccagccggaggcagctacttcatgatatctcgatcactggggccggagttcggaggagccgtaggactgtgtttctatttagggacaacattcgccgccgccatgtatatactgggggcaatcgaaatcctgctgacatacatagcccctcccgctgctatcttctaccctagcggggctcatgacaccagcaacgccaccctgaataatatgcgagtgtatggtacaattttcctgacctttatgactttagtcgtgttcgtaggcgtgaagtacgtgaacaagttcgcgagtctgttcttagcgtgcgtcataattagtatcctgagtatatatgccggggggatcaagagcattttcgatcccccagtatttcccgtgtgtatgcttggtaacagaaccttaagccgggatcagtttgacatttgtgccaagaccgccgtcgtggacaacgagacggtggccacccagttatggagttttttttgccattcacccaatctgacaaccgactcttgtgatccttatttcatgctgaataatgtgacggagatccccggtattccgggagccgccgcaggagttctgcaagagaacctgtggtcagcttacctagaaaaaggcgatatcgtcgagaaacacgggctgccctccgccgacgccccatcactgaaagagtcattgccactctatgtggtggctgacattgccacaagcttcactgtgctagtgggcatatttttcccctcggtgaccggcatcatggctggcagcaatcgcagcggagatcttcgcgacgcccagaagtccatccccgtgggtaccattttggcaattatcacgaccagtctggtatacttttctagcgtggttctattcggagcatgtattgaaggcgtggtgctgcgggataaatatggagatggcgtgtcacgcaatctggtggtgggcactttggcctggccatcaccgtgggtgatagtgataggaagtttcttctccacttgtggcgctggactgcagagccttacaggagccccccgtctgctgcaggccatagctaaggacaatatcattcctttcctgcgcgtgttcggtcacggaaaagtgaacggagagcctacttgggccttgctgttgactgctttgatcgccgaattaggcatcttaatagctagtctggacatggtggctccaatcctgtcgatgtttttcttgatgtgctacctgtttgtgaacctggcttgcgcagtccagacactcctcagaaccccaaattggagaccccgttttaagtactaccactgggctttgtccttccttggcatgtccctgtgtttggccctcatgtttgtcagttcctggtattacgccctcgtggccatgctgatcgcaggcatgatttacaaatacatagaatatcagggcgcagagaaggagtggggtgacggaatcaggggactgagcctatcagctgcccgctatgctctgctgaggctagaggagggacccccacacactaagaactggaggccccaactcctggtgctgctgaaactggacgaagacttacacgtgaaatatccccggctcctgacatttgcatcacagctgaaagctggcaaggggcttaccatcgttgggagtgtgattcagggatcgtttcttgagtcgtacggagaagcacaggccgcggaacagacgataaaaaatatgatggagattgaaaaggttaaggggttctgtcaggtcgtggtagcatcaaaagtgagggaagggcttgcccacctgattcagtcctgtggtctgggcgggatgcggcacaattccgtggtcctggggtggccttacggttggaggcagtctgaggatccccgcgcctggaaaacgttcatcgacaccgtaaggtgtaccaccgcagcgcatcttgcccttctggtgccaaaaaatatcgccttctacccttcgaaccacgaacggtatctggaaggacatattgatgtgtggtggattgtgcatgatggaggcatgctcatgttgctccctttccttttgcggcagcacaaggtctggcgcaagtgcaggatgagaattttcacggttgctcaaatggatgacaacagtatacagatgaaaaaagatttagcagtatttctgtaccatcttaggctagaggctgaggtggaggttgtggaaatgcacaattccgacatctcggcttacacctacgagagaaccctaatgatggagcaaaggtctcagatgttaagacagatgaggttgacgaaaacggaacgagaacgcgaggcccaactcgtgaaggaccggcactctgctctcaggttggagtctctatattctgacgaggaggatgagagcgcggtgggtgcagataagatccagatgacctggacgcgcgataagtacatgactgaaacatgggacccctctcacgctcccgataattttagagaactggtccatattaaacccgaccaaagcaatgttaggcgcatgcatactgctgtgaagctgaatgaggtgattgtgaccaggtcccacgatgctaggcttgttcttctgaacatgccggggccaccgcgcaattccgaaggagatgagaattacatggaatttctcgaggttctgactgagggccttgaaagggtgcttctcgtgaggggaggcggcagagaggttattaccatctattcctag

SEQ ID NO: 205569 - DNA, 3300 bp, synthetic construct
  misc_feature 1..3300: note = Description of Artificial Sequence: Synthetic coding sequence
  source 1..3300: mol_type = other DNA
atgccccacttcaccgtgaccaaggtggaggaccccgaggagggcgcagccgcttcaatttctcaggagcccagcctagccgacatcaaggcacggattcaagatagcgacgaacctgatctcagccagaacagtatcacaggcgaacatagtcaattacttgatgacgggcacaagaaagctcgcaacgcctacttaaacaacagcaattatgaagaaggtgatgaatacttcgacaagaatctggccctgtttgaggaggagatggacacacggccaaaggtatcttctctgctgaatcggatggccaattatactaatctgacccagggcgccaaggaacacgaggaggctgagaatataactgagggcaagaaaaaaccaaccaaaaccccacaaatgggtacatttatgggagtgtacctcccttgtttacaaaacatttttggcgtgatcctgtttctcagactgacttgggtggtaggaacagcgggcgtgctgcaggcgtttgctatcgtgctcatctgctgctgttgtacaatgctcaccgccatctctatgtctgctattgccactaacggcgttgtgccagccgggggctcatacttcatgatctcccgggctttgggcccagaatttggcggtgcggtaggactgtgtttctacctgggcactacattcgccgctgcaatgtacattctgggagctatcgagattttcctagtgtacatagtgccaagagcagcaatcttccatagtgacgacgccctcaaagagagcgctgccatgctgaataatatgagagtttacggcaccgcattcctggtactaatggttctggtagtcttcataggggtacgctatgtgaacaagtttgctagtctttttttagcttgtgtgatagtgtctatcctggcgatttacgccggggccattaaaagcagtttcgcaccaccccacttcccagtctgtatgctaggaaatagaactctgtcctctcgacatatagacgtatgttcaaaaaccaaagagattaacaatatgacggtgccctccaagctgtggggctttttttgcaactcctcgcagttcttcaacgcaacctgcgacgagtacttcgtccacaataacgtgacctccattcagggtatcccgggtttagcaagcggcatcattaccgagaatctatggtcgaattatctgccaaagggcgagataatagaaaagccatcagccaaaagttccgacgtgttaggtagtctgaatcacgaatacgtgctagtggacatcacaacaagcttcaccctactggtcggcatcttctttcccagtgtgaccgggataatggctggatcaaacagaagtggggacctgaaagatgctcagaagtctattccaatcgggacgattctggcaatcctcacaacctcattcgtgtatctgtccaatgtcgtgctgttcggggcttgtattgagggagtcgtgcttagagataaatttggggatgccgttaaggggaatcttgtggtaggaaccctatcctggccctcaccctgggtgatcgtcattgggagtttcttttccacttgtggggcggggctgcagtctctgacaggcgccccaagactgcttcaagctattgcgaaagacaatattatcccattcctccgcgtgttcggccatagcaaagcaaacggcgaacccacctgggcgctgctgctcactgctgccatagcagagctaggaatattgattgcatccctggacctcgtcgcccctattttatccatgttcttcctgatgtgttacttgtttgtcaatctggcctgcgcactccaaaccctcctgcgaactcctaactggcgaccccgcttccgttactatcattgggcccttagcttcatggggatgagtatctgtctggctctgatgtttatctcttcctggtactacgccatcgtcgccatggtcattgccgggatgatctacaagtacattgagtatcagggagccgagaaggagtggggtgatggaattcggggcctctcactgagcgctgctagatttgctctcttgaggctcgaggaaggtcccccacacactaaaaattggcgcccccagctgctagtcctgctgaagctggacgaggacctccacgtgaagcatccgcgcctcttgacttttgcttcacagctgaaagctggcaaaggactgaccatagtagggtcagtaattgtgggaaacttcctcgagaattacggagaagccctcgcagccgagcagacaataaaacatttgatggaagcagagaaggtcaaaggcttttgccaactggtagtcgcggccaaactcagggagggaatcagccatcttatacagtcttgtggacttggcgggatgaagcacaataccgtcgttatgggatggcctaatggctggaggcagtctgaggatgcacgggcttggaagacctttattggtactgtgagggtcaccactgcagcacacctggccctcctggtagctaaaaatatttcattcttcccaagtaatgtggaacaatttagcgagggaaatatcgatgtttggtggattgttcacgacggcggcatgctcatgttgttaccctttctcctgaagcagcataaagtgtggcgcaagtgctcaatccgtatctttacagtagcacagttagaggacaactcaattcagatgaagaaagatctagctacattcttatatcatctgagaattgaagccgaggtggaagttgtggagatgcacgactcagacatttccgcctatacctacgagcggacccttatgatggagcagcgctctcaaatgctccggcacatgaggttaagtaagactgaacgagatcgggaagctcaactggtcaaggatcggaactcaatgttgcgccttacttctattggatctgacgaggatgaggagaccgaaacttaccaggaaaaggttcacatgacgtggactaaagacaagtacatggcatctagaggacagaaggccaaatctatggaggggttccaagaccttctcaatatgcgcccggaccagagtaacgtcaggaggatgcatacggccgtgaaactgaatgaggtgatcgtcaacaaatctcatgaggcaaagctggtgctgctcaacatgcccggcccccctcggaacccagaaggcgacgagaattacatggaatttctggaggtgctcacagagggccttgaacgcgttttgcttgttcggggcggcggatcggaggttattacaatttactcttag

SEQ ID NO: 205570 - DNA, 3453 bp, synthetic construct
  misc_feature 1..3453: note = Description of Artificial Sequence: Synthetic coding sequence
  source 1..3453: mol_type = other DNA
atgcacccccccgagaccaccaccaagatggccagcgtgcggttcatggttacgccgactaagatcgatgacattcctggattatcagacacatccccagacctgtcaagccggtcatcgtcacgcgtcaggttctcctcccgggaaagtgtaccggagacttcccgtagcgaacctatgtcagagatgtctggggccaccacatcgcttgctactgtagctctcgatcctccaagtgatcgaaccagtcaccctcaggacgtgatagaggacctgtctcagaatagcatcactggggaacactcgcaattgctcgacgacggtcacaagaaggctaggaatgcatacctaaataatagtaactatgaggagggcgatgagtattttgacaagaatctagctctgttcgaggaggagatggacacaaggcccaaagtgtcctccctcctaaaccgtatggcgaattatacgaacctaacgcagggcgccaaggagcatgaagaagctgaaaacatcaccgaggggaaaaaaaagccaaccaaaacaccccaaatgggcacgttcatgggtgtgtatctcccatgccttcagaatatcttcggagtcattttgttcttgcgcctcacctgggtggtgggaactgcgggtgtactgcaggcctttgcaattgtgttaatatgctgttgttgcactatgttgactgccatttcgatgagcgcgattgccaccaatggggttgtcccagccggagggtcctactttatgattagcagggctctgggaccagaatttggaggagcagttggcctttgcttctatcttggaaccactttcgctgctgccatgtatatactcggagccatagagatatttctggtctacatcgtcccccgggctgcaattttccactccgatgacgctttaaaagagtcagcagccatgttgaataacatgagggtctacggcacagctttcctggtcttgatggtgcttgtggtgttcattggtgtgcgctacgtgaacaagtttgcctccttattcctggcctgcgtgatcgtctctatcttggccatttatgcaggggccatcaagagcagtttcgcaccacctcacttccccgtgtgtatgttgggaaaccgtacactatcttcccggcatatagacgtgtgctccaagaccaaggaaattaacaatatgactgtaccatccaagctgtggggcttcttctgcaactcctcacaattcttcaacgcaacttgtgatgagtactttgttcacaacaatgtcacctctattcagggcatccctggactcgcgtctggcattatcaccgaaaatttatggtctaactaccttcctaagggcgagatcatcgagaagccttctgcgaaaagttcagacgtgctggggtcacttaatcatgagtacgtgctggtggacattacgacttcctttaccctcctcgtgggaatatttttcccctctgtgacgggcattatggcgggctcaaatagaagtggagatctcaaagacgcgcagaagagtatcccgattgggaccatccttgctattctgactacttcatttgtgtatctgagcaacgtcgtgctgttcggagcctgcattgagggggtggtcttgcgggacaagtttggggatgctgttaaaggcaacttagtggttggcaccctgtcatggccttctccttgggtgatcgtgatcggtagcttctttagcacctgtggcgcaggcctccaatctctgactggggccccgcggctgctgcaggctatcgctaaggacaatatcattccattcctgcgggtctttgggcacagtaaggcaaacggagaacccacatgggcgttgttactgaccgccgcaattgccgagttagggatcctcattgcaagtcttgacttggttgcaccaatattatctatgttttttttgatgtgctatctgttcgttaatctggcctgcgcactccagacattactgcgtacccctaattggagacctaggttccgctactatcactgggctctgagctttatggggatgtctatctgcttggccctcatgttcatcagctcctggtactacgccatcgtagctatggttatagccggaatgatttacaagtatatcgagtaccagggagccgagaaggaatggggggacggcatacggggtctctccctgtcagctgcgagattcgccttgttacggcttgaggaaggccccccacacaccaagaattggagaccccaactccttgtgttattgaaactggatgaggacctccacgtcaagcatccccgcttactaacttttgctagccagctcaaagctgggaagggattgaccatcgtgggcagtgtaatcgtgggtaacttcctagagaactacggcgaggcgctggctgccgaacaaaccatcaagcatctcatggaagctgagaaggtgaagggcttttgccagctggtggtggccgccaaattacgagaaggaatatcccacctcatacagtcatgcggcctgggaggaatgaagcacaacacagtagtgatggggtggcccaatggctggcgacaatccgaggatgcgcgggcgtggaagactttcataggcactgtaagagtgaccaccgccgcacatttggcccttttagtcgccaaaaacatttcattcttcccctcgaatgtagagcaatttagcgaaggtaatatagacgtttggtggattgtccatgacgggggaatgctgatgcttctgccttttctcctcaagcagcataaggtctggcgaaaatgctcaatacggatttttactgtggcccagctggaggacaacagtatacaaatgaagaaggacctcgccaccttcttgtatcacctgcggatcgaggcggaagtggaagtggtggagatgcacgatagtgacattagtgcgtacacatatgaacgaaccctcatgatggagcagcgatctcagatgctcagacacatgcgactctcaaagacagaaagggaccgcgaggcgcagctggtaaaggaccgcaactcaatgctgcgactgacttccattggcagcgatgaggacgaagaaactgagacataccaggagaaggtacacatgacatggaccaaggacaagtatatggcctctcggggccagaaagcaaagagtatggagggatttcaagatctgctgaatatgcgtcctgatcaatctaatgtgcggcggatgcacacggcagttaaattgaatgaagtcattgtgaacaaaagccacgaagccaaacttgttctgctgaacatgccagggccaccaaggaacccagagggcgacgagaattacatggagttcctggaggtgctcaccgaggggctggaacgagtcctcctggttaggggtggcggcagcgaggtcatcaccatctactcgtag

SEQ ID NO: 205571 - DNA, 3276 bp, synthetic construct
  misc_feature 1..3276: note = Description of Artificial Sequence: Synthetic coding sequence
  source 1..3276: mol_type = other DNA
atgagcgagatgagcggcgccaccaccagcctggccaccgtggccttggatccgccttccgaccgtacttcccaccctcaggatgtcatcgaagacctaagccagaattcgatcactggcgaacacagccagttgctggacgatgggcacaaaaaagcaaggaatgcttaccttaataactctaactacgaagaaggggatgaatatttcgacaagaacctcgccttattcgaggaggaaatggatacccgaccgaaagtttcctcgttgctgaatcgtatggctaattatactaatctaacgcagggggccaaagaacacgaggaagcagaaaacattacagaaggcaagaaaaagcctaccaagacaccacagatgggtaccttcatgggcgtgtacctgccttgtctgcagaacatcttcggcgtaatattgttcctcagattgacctgggttgtgggcactgccggggtcctccaagcttttgcaatcgtgcttatctgctgttgctgtaccatgttgacagccatcagtatgtccgccatagcaaccaatggagtggtccccgcggggggatcctacttcatgatctccagagcgctgggccccgaatttggcggggccgtaggactctgtttctatctgggcaccacttttgccgccgccatgtatatcctcggcgcgattgagatttttttggtttacatagtgcctagggcagccatcttccactctgacgatgctctgaaggagtcagctgcaatgctcaacaatatgagagtatacggaaccgctttcctcgtgctcatggtccttgtggtctttataggggtccggtatgtaaacaagtttgcttctctgtttctcgcctgcgtaatagtatctattctggctatctacgctggcgccataaaaagtagttttgcccctccccattttcccgtttgcatgcttggaaacagaacccttagctcacgacacatcgatgtctgttccaaaacgaaagagataaacaacatgaccgttcctagcaagttatgggggtttttctgcaattcttcccagtttttcaatgcaacgtgtgatgaatacttcgtgcacaacaacgtgacctctatccagggcatccctgggttagcctctggcatcataactgaaaatctatggagtaactacttgcccaaaggtgaaattatcgaaaaaccctccgcaaaatcctccgatgtcttaggatcactgaaccacgaatatgtactggtggacattacaacctcattcacactgctcgtgggcattttctttccgtcagtgacggggatcatggcaggatctaatcggagcggagatttgaaggatgctcagaaatcaatccccattggaacgatcttagcaattctgacaacctcctttgtgtacttgagtaatgtggtcctgtttggagcctgcattgagggggtggtcctccgggacaaattcggggatgctgtaaaggggaacctcgtggtgggcaccctgagttggccgtccccttgggtcatcgttattggatctttcttctctacatgcggagcaggcctccagtctctaacaggtgcgcctcgcttgctgcaagcaatcgcaaaagataatatcattccctttctgcgcgtctttggccattctaaagcaaacggcgaacccacatgggctctgctgctgacagctgcaatcgcggagttaggcatcttgattgcgagcttggacctggtcgccccaatcctgtctatgttcttcttgatgtgctatctgttcgtcaacttggcctgtgccctgcagaccttactccgcactccaaattggcgccctcgatttcggtattatcattgggctctcagcttcatggggatgtctatctgtctggccctgatgttcatatcaagttggtattacgccatagtggctatggtcattgcgggcatgatctataagtatattgagtatcagggtgcggagaaagagtggggcgacgggatcagaggacttagtctgagcgcagcccgcttcgctctgctgcgactggaggagggacctcctcatactaagaattggcggcctcagctgttggttctactcaagctggatgaggacctccatgtgaagcaccccaggctccttacgttcgccagccagttgaaggccggcaagggactgaccattgtggggtctgttattgtgggaaatttccttgagaattatggtgaagctcttgcggcggaacagaccataaaacatttgatggaggccgagaaggtgaagggcttctgtcagctagtcgtcgcagccaaactccgcgaaggaatttcccatctgatacagagttgtggactgggtgggatgaagcacaatactgtggtgatgggatggcctaacggttggaggcaatctgaagacgcgagagcctggaagacatttatcggcactgtgcgcgtgacaaccgccgcccatctcgctctgctggttgccaaaaatatcagctttttcccgagcaatgttgagcagttttcagaaggcaatatcgatgtctggtggattgttcacgatggcgggatgctaatgttgctccccttcctgctaaagcaacacaaggtttggaggaaatgctccatccgtatcttcactgtggcacagctggaggataacagcatacagatgaagaaagatctcgccaccttcttatatcacctgcggatcgaggcagaagtagaagttgtggaaatgcatgattctgatatcagcgcttacacttatgaaaggactcttatgatggagcagcgaagtcagatgctcagacatatgcggctgtcgaagaccgagagggaccgggaagcacagctggttaaggacaggaattccatgctccgcttaacatcaattggctcagacgaagacgaggagactgaaacctatcaggagaaggtgcacatgacttggacaaaagacaaatacatggcctcccggggccagaaggcgaagtcaatggaaggcttccaggacctgctgaacatgcggccggaccagtctaacgtgagacgaatgcacacagcagttaagcttaatgaggtgatcgttaataaatcacatgaagccaaactcgttctgctgaatatgccgggcccaccacgtaacccagagggggacgaaaactacatggagttcttggaagtcctgacagaaggtctcgaacgggtgttactggtgcgaggcggcggcagcgaagttatcactatttacagctag

SEQ ID NO: 205572 - DNA, 3408 bp, synthetic construct
  misc_feature 1..3408: note = Description of Artificial Sequence: Synthetic coding sequence
  source 1..3408: mol_type = other DNA
atgcacccccccgagaccaccaccaagatggccagcgtgcggttcatggtgacacctacgaaaattgacgacatcccgggtttgagcgacacatccccagatctgagcagccgctcatcatctcgggtgcgcttctcttcgcgggagtcagtgcccgagacatccaggtcggagcccatgtctgagatgagtggcgcaactacctccttagcaaccgttgctttagaccccccaagcgaccgcacaagccacccacaagatgtgatcgaagacgatggacataagaaagctcgcaatgcctacctgaacaactctaattacgaagaaggcgacgagtactttgataagaatttggccctgtttgaggaggaaatggacacacggcctaaagttagcagcctgttgaaccgtatggctaactacactaatctgacccagggagcaaaggagcatgaagaagccgagaacatcactgaaggcaagaagaagccgacgaaaacaccacaaatggggacttttatgggcgtgtacttgccctgccttcagaatatctttggagttatcttgtttcttaggctaacctgggtcgttgggactgccggcgtgctgcaggccttcgccattgttctcatctgctgttgttgcacaatgctaactgcaatttccatgtctgccattgctactaatggagtagtgccagctggaggatcgtatttcatgatctcccgtgctcttggaccagaatttggtggggccgtgggattgtgcttttatctgggaaccacctttgcagcggctatgtacatcctcggcgcaatcgagattttccttgtttacatagttccccgcgcggctattttccactctgacgacgccttgaaggagtccgcagctatgctgaacaacatgcgggtctatgggactgccttcctagtactgatggtgctggtcgtatttatcggcgtgcggtatgtgaataagtttgcatcgttgtttctggcttgtgtaattgtgtcaattctcgcaatctatgcgggagccataaagtcatcattcgctcccccccattttccagtgtgcatgttgggtaataggacgcttagctccagacacatcgatgtgtgcagtaagacaaaggaaatcaataatatgacggtgccatcgaagctctggggattcttttgcaatagctcccaattcttcaacgccacatgtgatgaatactttgtccacaataatgtcacttctatccagggtattcccgggctggcgtctggaattattacagagaatttatggagtaactacttgccaaagggagaaatcatcgagaaaccgtctgctaaatctagtgacgtcctcggctcacttaatcatgaatatgttctagtcgacatcaccacctcgttcactcttttggtgggtatcttcttcccgtcagtcaccggtattatggctgggagcaacagaagcggagacctgaaggatgcccagaagagcatacccatagggacgatattagccattttaaccaccagtttcgtttatctctctaacgtggtgttgttcggcgcttgcattgaaggcgtggtcctacgggacaaattcggagatgctgttaaaggaaatctcgtggtcggaacactttcatggccatccccttgggtcatcgtgattggtagctttttcagcacgtgcggcgcgggtctgcagagtctcaccggtgcaccaaggcttctacaagccattgccaaggataacattattcccttcctgcgcgtgttcggacactctaaagctaatggggagcccacatgggccctcctgcttacagctgccattgccgaactcggcatccttattgccagtctcgatttggtggctccaatactcagcatgtttttcctgatgtgttaccttttcgtaaatctcgcttgcgctctccagactctcctgaggactcccaattggcgacccaggttccggtattaccattgggccctgagctttatgggtatgagcatttgtctggccttaatgtttataagctcgtggtactacgcaatcgtcgccatggttattgccggtatgatttataagtatatcgaataccaaggggccgagaaagagtggggcgacgggatcaggggtcttagtctgagcgccgccagattcgcactcctgaggctcgaagagggacctccccacaccaagaactggcgcccccagctgctggtcctgctcaagctggacgaggacttgcacgtgaagcacccacgcttacttaccttcgccagtcagctgaaagctgggaaaggtctcacaatcgtcgggtcagtgattgtcggtaatttcctggagaattacggtgaagcactcgccgccgagcagaccattaagcaccttatggaagctgaaaaggtgaaagggttctgccaactggtggtggctgccaagctgcgagagggtatctcacacttaatccagtcttgtggactcggaggcatgaagcacaatactgtagtgatgggctggcctaacggatggcgccaatctgaggatgctagagcttggaagactttcataggaacagtgagagttaccactgcggctcacctggcactgctggtcgccaagaatatctcttttttccctagcaacgtggagcagttctcagagggcaatatcgacgtctggtggattgtgcacgacggagggatgttaatgttgctccccttcctgctgaagcaacataaggtttggcgaaagtgcagcatcaggatctttaccgtggcgcaactcgaggataacagcatccaaatgaaaaaagacctggctacattcttataccatctccgcatcgaggctgaagtcgaagtggtcgagatgcacgactccgatatcagtgcttatacatatgaacgtaccctgatgatggaacagcgatcgcagatgcttaggcacatgagattaagtaaaacggaacgggatagggaagcccagctcgtcaaggaccgtaatagcatgcttagactaacatctatcgggtcagacgaggatgaggagacagaaacatatcaggagaaagttcacatgacctggactaaggacaagtatatggcaagccgaggccagaaggctaagtccatggagggttttcaggacctgcttaacatgagacccgaccaaagcaatgtgagacgcatgcacaccgccgtgaagctgaacgaggtgatcgttaacaagagccatgaggctaagctggtgctcctgaatatgcccgggcctcccagaaaccccgaaggcgacgaaaactacatggaattcctagaggtattgaccgagggcctggaaagggttctgctggtgagaggcggcggctcagaggtaatcacgatctactcatag

SEQ ID NO: 205573 - DNA, 2889 bp, synthetic construct
  misc_feature 1..2889: note = Description of Artificial Sequence: Synthetic coding sequence
  source 1..2889: mol_type = other DNA
atggacacccggcccaaggtgagcagcctgctgaaccggatggccaactacactaatctgactcagggggccaaggaacacgaggaggccgagaatataaccgaaggcaaaaagaagccaaccaagaccatgctcactgccatcagcatgtctgctatcgctacaaatggagttgttcccgcggggggaagctatttcatgattagtagagctctgggacccgaattcggtggagcagtgggactgtgtttctatcttggaactaccttcgcggccgcaatgtacattctgggggctatcgaaatctttctggtgtacattgtgccccgtgccgcaatctttcattcagatgacgccctgaaagagtccgctgctatgctgaacaacatgagagtttacgggaccgctttcctcgtattgatggtgctagtcgtgttcataggagtgagatacgtgaataagttcgcatcactgttcttggcatgcgtgattgtgtcgattctggcaatctatgccggcgcgattaagagcagtttcgccccacctcatttccccgtgtgcatgctggggaaccggaccctcagcagtaggcacatcgacgtatgctcaaaaactaaagaaattaacaacatgaccgttccttcaaagctgtggggttttttttgtaattcttctcagttcttcaacgccacatgtgatgaatacttcgtacataataatgtgactagtattcagggcattccaggcctcgcgtccggaatcataactgaaaatttatggagcaactacttgcccaagggggaaatcatcgaaaaaccttcagccaagtcttccgacgtactgggatccctcaaccatgaatacgtgttagtggatatcaccacatcctttacccttcttgtaggcatattcttccctagcgtgactggaattatggctggatctaataggtccggagatctgaaggacgcccaaaagagcatcccgatcggcacaatcttggccattctgaccaccagcttcgtctacctctccaatgtggttctctttggagcctgcattgaaggagtggtccttcgggacaaattcggtgacgccgtgaagggcaacctcgtggtcggtacactgagttggccttcaccttgggtgatcgtaatagggtccttcttcagcacctgcggcgcggggttacagtctctgaccggagcaccgcgcctcctgcaggctatcgccaaggataacattatcccgttcctgagggtattcggccattcgaaagctaacggcgagccgacatgggccctgctgctgacagccgcgattgccgagctgggcatcctcattgcaagtctggacctggttgctccaattctgagcatgttcttcctgatgtgctacctgttcgttaacttggcatgtgccctccagacattgttacgcactcccaattggagaccacgtttccgatactatcattgggcactgagcttcatgggcatgtctatttgtctagcattaatgttcatcagcagctggtactacgccatcgttgcaatggtcattgccggtatgatttacaagtatatcgaatatcaaggagctgaaaaggaatggggagatggcattaggggcctgagcctctctgccgccagatttgctttacttagattggaggaggggcctccgcatacaaaaaattggaggccgcaactccttgttctcctgaagctggatgaagacctccacgtcaagcatccccggttactgacgtttgccagccagctgaaggctggaaagggcctgactatcgtgggtagcgtcatagtaggtaacttccttgaaaattatggggaggcactagcggcggaacaaacaatcaagcatctgatggaggcagagaaggtgaaaggcttttgccagttggtggttgccgcaaaactgcgcgagggcatttcacatctgattcaatcttgcgggcttggcgggatgaaacacaatacagtggtgatgggatggcccaacggctggagacaaagcgaggacgccagagcttggaagacattcataggcacagtgcgcgtgaccaccgctgctcatctcgcactgctcgtcgccaagaatatctcctttttcccatcaaatgtggaacagtttagcgagggcaatattgatgtgtggtggatcgttcatgacggagggatgctcatgctgctgccatttctgctgaagcagcacaaagtgtggcgtaaatgctctattaggatctttaccgtggcccagctcgaggataatagcattcagatgaaaaaagatctagccactttcctttatcatctgcgcatcgaagccgaggtcgaggtagttgagatgcacgactctgacatcagcgcttatacttacgaacgcaccctgatgatggaacagcgatcccagatgctgaggcacatgcgcctcagtaagacagagcgtgatcgagaggcccagcttgtgaaagaccgcaattctatgcttaggttgacatcaattggtagcgacgaagatgaggagaccgagacatatcaggaaaaagttcacatgacatggaccaaagacaagtacatggcgagtcgaggacagaaagctaagagcatggagggattccaagaccttctgaatatgcgcccagaccaatcaaatgtgagacgcatgcacacggctgttaaactgaacgaggtcatcgttaacaagtctcacgaggccaaactggtactcctgaacatgccgggaccgcctaggaaccccgagggggacgagaactatatggaattcctggaggtgttgactgaaggactggagcgcgttttgctcgtgagggggggtggctccgaggtgataacaatatactcttag

SEQ ID NO: 205574 - DNA, 3276 bp, synthetic construct
  misc_feature 1..3276: note = Description of Artificial Sequence: Synthetic coding sequence
  source 1..3276: mol_type = other DNA
atgagcgagatgagcggcgccaccaccagcctggccaccgtggcccttgatcccccttctgatcgaacttcacatccgcaggatgtgattgaggatctctcgcagaactccataacgggcgaacacagccagctgctcgacgacggtcacaaaaaggcgcgcaacgcttacctgaacaattcaaattatgaggagggggatgagtacttcgacaaaaacttggctcttttcgaggaggaaatggatacccgcccaaaggtttcctcacttctcaacagaatggcaaattatactaacctgactcagggtgcgaaggaacacgaggaggctgaaaacatcaccgagggaaaaaagaaaccaactaagacacctcagatgggcacttttatgggagtctatctgccttgtctccaaaatatattcggtgtgatcttatttttaaggttaacgtgggttgtgggcaccgctggggttctacaggcttttgccatcgtgctgatctgctgttgctgcaccatgctgaccgccatctcaatgagtgccatcgcaacaaacggagttgtccctgctggggggtcttacttcatgatctctagggctctggggcctgagtttggaggggctgttggcctatgcttctatctgggtaccacttttgctgctgccatgtacattctgggtgctatcgagattttcttagtgtatatcgtgcctcgggctgcaatcttccacagcgacgacgctctcaaagagagcgccgctatgctcaataacatgcgcgtatatgggacagcctttctcgtgttgatggtgcttgtcgtctttatcggagtgaggtatgtgaacaagttcgcctcgctcttcctggcctgcgttatcgtctcgatccttgccatttacgctggggctatcaagtccagtttcgcaccaccacattttcccgtctgtatgctgggcaaccggacattatcttcccggcacattgatgtttgctctaaaaccaaagagataaataatatgaccgttccatcgaagctatggggcttcttttgtaattctagccagttcttcaatgcgacttgcgatgagtatttcgtgcacaataacgtgacctctatccaggggatcccagggctggcaagcgggatcataactgagaatctttggtctaattatctgcccaaaggagaaatcatcgagaagccctcagccaaaagctccgacgtgctcggctccctcaaccacgaatacgtactcgttgatataacaacctcctttaccttgctggtcggtatattctttccctcggtcacaggaattatggcaggctccaaccgttccggcgacctcaaagacgcccaaaagtccatccccattgggaccattctggcaatcctcaccacctcatttgtctatctgtccaatgtggtcctgttcggggcctgtatcgagggggtggttctccgcgacaaattcggtgatgccgtgaagggcaacctagttgttggtaccttgtcttggccttcaccctgggtaattgtgattggatctttcttttcaacctgtggtgcaggattacaatctttaacgggggccccaaggctgctccaggcaattgccaaggacaacataatccctttccttagggtgtttggacacagcaaggccaacggggagccgacttgggccctgttgttaaccgccgcgattgcggaactcgggatcctcattgcatccctagacctcgttgcacctatactcagcatgttcttcctaatgtgttacctgttcgtcaatctcgcttgtgccttgcagacactgttacgcacccccaattggcgcccccgatttaggtattaccactgggcgttatccttcatgggcatgagcatctgtttggccttgatgtttatctcgagctggtactatgctatcgttgcaatggtcattgccggtatgatttacaagtacatcgagtatcaaggggccgagaaagagtggggcgacggtatccgggggctctctttgagcgcagcacgcttcgctctactgcggctcgaggaggggccaccccatacaaagaactggaggccacagctgctggtgctgctgaaactcgatgaggatctgcacgttaagcatcctaggctgttgaccttcgcgtcacaactaaaagcgggcaagggtctgaccatcgtcggtagtgtaatcgtcggtaactttctcgagaactatggcgaagcactcgcggccgagcagacaatcaagcacctgatggaagccgagaaggtgaagggcttctgtcagttagtcgtagctgctaaacttcgcgagggcatttcgcacttgatccagtcatgtgggctaggtggaatgaaacataacaccgtcgttatgggctggcccaacggctggcgccaaagcgaggatgcaagggcgtggaagaccttcataggtaccgtgcgcgtcaccactgctgctcacctggcactgttggttgccaaaaatatttcattcttccccagtaacgtggagcaattttctgagggaaacattgatgtgtggtggattgtgcacgacgggggtatgctcatgctcttgccttttttattgaagcaacacaaggtgtggagaaaatgctccattagaatttttacagtcgcccagctggaagataacagcatccagatgaagaaggaccttgctacctttctgtatcacctcaggatcgaggctgaggtggaggtggtcgagatgcacgattcggatatttccgcctacacgtacgaacgaacattgatgatggagcagcgtagccagatgttacggcacatgaggttaagcaagaccgaacgcgacagggaggcgcaactggtgaaagatcgcaatagcatgttgcgccttactagcattgggtccgacgaagatgaggaaacggagacctatcaggagaaggtgcacatgacctggacaaaggacaaatatatggcttcgagaggacagaaggccaagtcaatggaagggttccaggaccttctgaatatgcggccagaccaaagtaatgttcggagaatgcataccgcagtgaagctgaacgaggttatcgttaataaatcccatgaagccaaattagtcctgctgaacatgccaggccctccacgaaatcccgaaggcgacgagaattatatggaatttcttgaagtgttgacggagggactagagagggttttactggttcgcggggggggttccgaagtgatcacaatatactcctag

SEQ ID NO: 205575 - DNA, 3426 bp, synthetic construct
  misc_feature 1..3426: note = Description of Artificial Sequence: Synthetic coding sequence
  source 1..3426: mol_type = other DNA
atggccagcgtgcggttcatggtgacccccaccaagatcgacgacatccctggtttgagcgatacctcaccagatctgagctctagatctagcagccgtgttaggttcagttcacgagaaagcgtgcccgaaacatcaagaagcgagcctatgagcgagatgagtggtgccacaacgtcgctagcaacagtcgcgctggaccctccgtctgacagaaccagtcaccctcaggacgtgatcgaggatctgtcgcagaactccattaccggggagcactcacaactactcgacgacggccataaaaaagccagaaatgcttacctcaataactctaactacgaagagggagacgaatacttcgataaaaatctcgcactcttcgaggaggaaatggataccaggccaaaagtgtcatcgctgctgaacagaatggccaactacaccaatttaacacagggagccaaagagcacgaagaggcggagaatattacagagggtaaaaaaaagcctacgaagactccacaaatgggaacgttcatgggcgtgtatcttccgtgcctccagaatatatttggtgtgatcttgtttctgaggttaacatgggtcgtcggaactgcaggagttttacaggcattcgcgattgtcctgatttgctgctgttgtacaatgctcacagctatatctatgagcgcaatcgcaaccaatggagtcgtacctgcgggcggcagctacttcatgatcagcagggctcttggccccgagttcggcggcgcggtcgggctttgcttttacttaggcaccacgtttgccgccgcaatgtatatattaggggctatagagatcttcctggtatacatcgtgccccgagccgctatttttcatagtgacgatgcccttaaggagtccgcggcaatgctgaacaatatgagagtgtacgggaccgcttttcttgtcctgatggtcttggtggtttttattggcgtgcgatatgtgaacaagtttgcaagcctgttccttgcctgtgtgatcgttagcattctggcgatctacgccggagctattaagagctccttcgcccctccccactttccagtttgcatgctgggcaaccggacactgtcctctcgccatatagatgtgtgctcaaaaacgaaggaaattaacaacatgactgtgccatctaagctgtggggatttttttgcaactcgtcacagtttttcaatgccacctgcgacgaatatttcgtccacaacaatgtgacgtcgatccagggaatcccgggcctcgcttccgggattattactgagaatttgtggtcaaattacctgccaaaaggtgagataatcgagaaaccatcagcaaagagcagcgacgtattgggcagccttaaccatgagtatgtgcttgtagacatcactacttcctttactcttctagtagggattttcttccctagcgttacaggcatcatggcgggtagcaaccgctccggggatttgaaggacgctcaaaagagcataccgatagggaccatcctagctatactgaccacaagcttcgtgtatctcagcaatgttgtcctgtttggggcatgcatagaaggggttgtcctgcgtgataagttcggggatgccgtaaagggcaatctggttgttggcaccctgagctggccatccccctgggtgatcgttatcggttctttctttagcacatgcggagccggtcttcagagtctgacaggagctccaagactgctccaagctatcgccaaggataacatcataccatttctaagggtatttgggcacagtaaggccaacggggaacctacctgggccctattgctgaccgccgctattgccgagttgggcatcctgatcgcctctttggatttggtcgcacctatactctctatgttttttttgatgtgctatctgttcgtgaatctggcctgcgccctgcagacactcctgaggactcctaactggcggcccagatttcgctactaccattgggccctttctttcatgggcatgagcatttgcttggcgcttatgttcatttcaagttggtattatgccattgttgccatggtcatcgctggaatgatatacaagtatattgagtatcagggcgccgaaaaggaatggggagacggcatccgcggcctgagcttgagtgccgcccgcttcgcactgttgagactggaagaaggccctccacacacaaaaaattggcgcccgcagcttctggtcctcctcaagctcgacgaggatctacatgttaaacacccaagactcctcacttttgcctcccagctgaaagccggtaaaggattgacaattgtggggagcgtgattgtgggcaattttctcgaaaactacggagaggccctagcggctgaacagaccatcaaacacctaatggaagctgagaaggtgaagggcttttgccagctggttgtggcagcaaagcttcgcgaggggatctcccacctcatccagagctgcggattgggtggcatgaagcacaacaccgtggtgatgggctggcccaacggctggcgacaatctgaagacgcccgcgcctggaagactttcataggtaccgtcagggttaccaccgccgcccacctcgccctcttggtggctaagaatatctcgttctttccatctaatgtcgaacagttctctgagggcaatatcgacgtttggtggattgttcatgacggaggtatgctcatgctgctgccattcctattgaaacaacataaggtgtggcgtaaatgtagcattagaatttttactgtagcacaacttgaagacaatagcatacagatgaaaaaggatctggcaacgtttctgtaccatcttcggatagaggcagaggtggaggtggtcgagatgcatgattccgatatatcagcatacacatatgagcgtactcttatgatggagcagcggagtcagatgctgcggcacatgcggttgtctaagacagagagggatcgcgaggcacagctggttaaggacaggaattccatgctgagactaacaagcatcggtagcgacgaagatgaggagacggaaacctatcaagagaaggttcacatgacctggacaaaggataagtacatggccagccggggacagaaggctaagtccatggaagggtttcaggatctgctgaatatgcgccctgatcagtctaatgttcgcagaatgcatacagcagtgaagctcaatgaggtaatagtcaacaagtcccatgaggccaagctggttctcctcaacatgccagggccaccacgaaacccagaaggggatgagaattatatggaattcctagaggtgttgactgagggactggaacgcgtgctgctggtcagggggggcgggagtgaagtcatcacaatctactcatag

SEQ ID NO: 205576 - DNA, 3453 bp, synthetic construct
  misc_feature 1..3453: note = Description of Artificial Sequence: Synthetic coding sequence
  source 1..3453: mol_type = other DNA
atgcacccccccgagaccaccaccaagatggccagcgtgcggttcatggtaacgcccacaaaaatcgacgatattcccggactttccgacacatcacctgacctcagctctcggtccagctcccgggtccggttcagtagcagagaatcagtgcctgagacctcccggagtgagcccatgagcgagatgtctggggcgaccacctcccttgctactgtcgcactggatccacccagcgatagaacatctcacccgcaggacgtcatcgaggatctgagccagaattctattacaggagaacactcgcagttgcttgatgacgggcataagaaagcaaggaatgcatatctcaataatagcaactacgaggagggcgacgaatattttgataaaaacctggcactgtttgaagaggagatggacacccgccctaaagtgagctcccttctgaaccgcatggccaattataccaatctaacacagggcgccaaagagcatgaagaggcagaaaacatcactgaaggcaaaaagaagcccacaaaaacgccccaaatgggaaccttcatgggggtgtatttgccctgtctgcaaaacatttttggtgtcatcctgtttttgaggttgacctgggtggttggaaccgcaggagttttgcaggcgtttgcaatcgtgttgatttgttgttgttgcacgatgctgactgcaatatcaatgtcagccattgcaacaaacggcgtggttccagcgggcggttcctactttatgatttctagagcactgggcccggagtttggcggcgccgtgggcttatgcttttatctcggcacaacatttgcagcagctatgtacatcttaggagctatcgaaatatttctggtttacattgtgccgcgggccgccatctttcactctgatgatgctctgaaggagtctgctgcgatgcttaataatatgagggtgtacggaaccgccttcctcgtcctcatggtgctggtcgtcttcatcggcgttagatatgtgaataaattcgcaagcctcttcctcgcctgcgttattgtaagcatcctggcaatatacgccggcgctatcaagtcctcatttgctcctccacattttcccgtgtgtatgctgggaaataggaccctctctagtcgccatatcgacgtgtgttccaagaccaaagaaatcaataatatgactgtcccttctaagctgtgggggtttttttgtaatagcagccaattttttaacgccacttgcgacgagtatttcgtccataacaatgtaacttcaattcaaggaattcccggactggctagtgggatcatcactgagaacctgtggtcgaattatctacctaaaggagaaatcatcgagaaaccttctgcaaagtcgtccgacgtactggggtccctgaatcacgagtacgttctggtggacatcaccaccagttttactcttctagtggggatcttttttccttcagtgaccgggataatggccgggagcaatcgcagcggggacctgaaagacgcgcagaagtccataccaatcggtacaattctagctattctgacaacgagctttgtttacctgtctaacgtggtgttgtttggtgcctgcattgagggcgtcgtgctgcgagacaaatttggggacgccgtcaaaggcaacttggtggtgggaacactctcatggccatccccttgggtgatagtcattggtagtttcttctccacttgtggagcaggcctgcagagcttgactggcgcccctcgcctgctccaagctattgcaaaggataacattattccttttctgcgagtgttcggccatagtaaagcgaatggagagcctacttgggccctgctgttgactgctgctatcgctgagctgggtatcctcatcgccagtctggatttagtggccccaattttatctatgttttttcttatgtgctacctgttcgtcaatctagcctgtgcccttcagacactgcttaggaccccgaactggcgaccaaggttccggtactaccattgggccttatcattcatggggatgtccatctgccttgctctcatgttcatttcatcctggtattatgccatcgtggcaatggttatcgccggcatgatctacaagtacatcgagtaccagggcgccgaaaaggagtggggggatggaatccgagggctctcgctgagcgccgcgcggttcgccctcctgcgcctagaggagggccccccccacacaaaaaactggaggcctcagctgcttgtgttgttgaagttagatgaagacctgcatgtcaagcatcctcgcctgctcacctttgcaagccagcttaaagcaggcaagggactgaccatcgtaggaagtgtcattgtgggcaattttttggagaattatggcgaagcactcgccgctgaacaaacaatcaagcatctgatggaggccgagaaggtgaagggcttttgtcagctggttgtagcggcaaagctccgagaaggaatcagtcaccttatccaaagttgtggactcggggggatgaagcataacactgttgtaatgggctggccaaacggctggagacaaagtgaagatgcgcgtgcctggaaaacattcatcggaacagtgcgcgtgacgacagcagcccatcttgccctgctcgttgctaagaatattagctttttcccatctaatgtggagcagttctcagaggggaatatagacgtctggtggatcgtgcatgatggcggaatgctgatgctcctcccgttcctgctcaagcagcataaggtctggagaaaatgcagcataaggatatttaccgtagcccagttggaggataatagcatccagatgaaaaaggacttagccactttcttataccacttgaggatcgaagccgaggtggaagtggttgagatgcacgatagcgacatcagcgcttatacctatgaaaggacgcttatgatggagcagagatctcagatgctgagacacatgcgcctgtccaagaccgagagagacagggaagctcagctcgtgaaggatagaaattccatgctgcgactaacctccattggtagtgacgaagacgaggagaccgaaacctatcaagagaaagtccacatgacatggacgaaagacaaatatatggccagcagaggccagaaggctaaaagcatggagggctttcaggatttgttaaacatgcgccctgaccagtccaatgtgagacgcatgcatacagcagttaaactcaacgaggtgattgttaacaagtcccacgaagcaaaactggtcctcttaaacatgccagggccccccagaaaccctgagggcgatgaaaattatatggaatttctggaagtgctgacagagggtctggagagggttttgttagtacggggcggcggatcagaggttatcacgatatactcctag

SEQ ID NO: 205577 - DNA, 186 bp, synthetic construct
  misc_feature 1..186: note = Description of Artificial Sequence: Synthetic coding sequence
  source 1..186: mol_type = other DNA
atgagcgagatgagcggcgccaccaccagcctggccaccgtggccctggacccccctagtgatagaacctcacatccacaggatgttattgaggacctgagccagaattcaattacaggggaacatagtcagctgctcgatgatggtcataagaaagccaggaacgcttacctaaacaactcctag

SEQ ID NO: 205578 - DNA, 2889 bp, synthetic construct
  misc_feature 1..2889: note = Description of Artificial Sequence: Synthetic coding sequence
  source 1..2889: mol_type = other DNA
atggacacccggcccaaggtgagcagcctgctgaaccggatggccaattacactaatcttacacagggcgccaaggagcatgaggaggctgagaatatcaccgagggaaagaaaaaaccaactaagacgatgcttaccgcaattagcatgagcgccattgcgaccaatggggttgtgccagccggcggttcttactttatgatttcccgggcccttggcccagagtttgggggtgcagttggtctctgtttctacctggggaccacttttgcagctgctatgtatattctgggcgcgattgaaattttcttagtgtacatcgtacctagagcagccatcttccactctgatgatgctctgaaggaatcagcagccatgttaaacaacatgagggtgtatggtacagcctttctggttctaatggttctcgtggtgttcatcggggtgcgatatgtgaacaaattcgcatctcttttcttagcatgcgtgatagtgagtatcctcgctatttacgcaggtgccataaaaagctcctttgctcctccccatttccccgtgtgtatgctggggaatcggaccttaagctcccgccacatcgatgtgtgctcaaaaacaaaagagatcaataatatgaccgtgccctccaaattgtggggatttttttgtaactccagccaattcttcaacgctacatgtgacgaatactttgtacataacaacgtgacatcaatccaaggaatccctggactcgcatccgggatcatcacagaaaacctctggtccaactatcttccaaagggcgagattatcgaaaagccttctgcaaagtcatccgacgtgttgggctccctgaatcatgagtacgtgctcgtggatattacgacttccttcacactgctggtgggtatattttttcctagcgttactggaattatggcgggatcgaacagaagcggtgatctgaaggatgctcagaaaagcattcccatagggaccattctggccatccttaccaccagtttcgtgtacctctctaacgtcgtgctgttcggcgcctgtatagaaggtgtcgtcttacgagacaagtttggcgatgcagtcaagggcaaccttgtagtgggtactttaagctggcccagtccctgggtcattgtcatcggatctttcttctctacctgcggcgccgggctgcagtcactcaccggagctcccaggctgctacaggcaatcgccaaggacaatattatcccatttctccgggtctttggacactccaaagcaaatggcgaaccaacgtgggcactgctcttgaccgcagctatcgccgagcttggcattctgatcgcttccctggacctcgtcgcacctattctgagcatgttcttccttatgtgctacctgtttgtgaacctggcctgcgcactgcaaacccttttaagaacaccaaactggcgccccagattccgatactatcactgggcccttagcttcatgggcatgagtatatgcctggcccttatgtttatttcttcttggtactacgccatcgtcgcaatggtgattgctggtatgatttacaaatacatagaatatcaaggggccgagaaggaatggggggacggtattagaggcctgagcctgtccgcggcccgattcgccctccttagactggaggagggcccgccgcacacaaagaattggaggccccagctccttgtgcttctcaagttggacgaagatctacacgtcaagcatcctcgccttctgacctttgcaagccagctcaaggccggaaaagggttgaccatagtgggctccgtgatcgtgggtaatttcttggagaactacggagaagcactggccgctgagcagacaattaagcaccttatggaagccgagaaggtaaagggtttttgtcagctggtcgtggcggcaaagctgagggaggggatttcccatctgatccagtcatgtggacttggtggtatgaagcataatacagtggtgatgggatggcctaatggatggcgtcagtccgaagacgctagagcctggaagacgttcatcggcaccgtgagagtcacaaccgctgcccatttagccctccttgtggccaaaaacatctcttttttcccttcgaacgtggaacagttttccgaggggaatatagacgtgtggtggatagttcacgacgggggcatgctgatgcttctgccatttcttttgaagcagcacaaagtttggaggaagtgctccatccggattttcactgtcgcacaattagaggataacagcatccagatgaaaaaagatttggcaactttcctgtatcatctgcggatcgaagccgaggttgaggtcgtcgaaatgcacgacagcgatatttccgcgtatacctatgaacgaaccctaatgatggagcagcgatcgcaaatgttgcgccacatgcgtctgagcaaaaccgaaagagacagagaagcacagttggtcaaggaccgcaattcaatgctccggctgacctctataggaagtgacgaggatgaggagacagaaacgtatcaagagaaggttcatatgacatggacaaaggacaaatacatggccagcagaggccagaaagccaagtcaatggagggcttccaagatctgctcaatatgcgacctgatcagagcaatgtgcggcgaatgcacacagctgtgaagctaaatgaggtcattgtaaataaatcccatgaggcaaagctggtgttattaaatatgcctggacccccacgcaatcccgaaggggacgaaaattacatggaattcctggaagtactgaccgagggtttagagcgtgtgctcctcgtgcgcggaggcggatcagaggtgataacaatttactcttag

SEQ ID NO: 205579 - DNA, 3453 bp, synthetic construct
  misc_feature 1..3453: note = Description of Artificial Sequence: Synthetic coding sequence
  source 1..3453: mol_type = other DNA
atgcacccccccgagaccaccaccaagatggccagcgtgcggttcatggtgacccctacgaagatcgatgatattcccggactgagtgacacatcccccgatctcagttctcggtcctcctcacgagttagattttcctcccgagaaagcgtgccagaaacatctcgcagtgagccaatgagtgagatgtcgggcgccactacctcccttgcgacagtagccctagacccaccttccgaccgcacaagccacccgcaggacgtcattgaggatctgtctcagaactctatcacaggggagcactctcagttgctagatgatgggcacaagaaggctcgtaacgcctacctaaacaattctaattacgaggagggcgacgagtacttcgataagaatctcgctctcttcgaagaggagatggacaccagacccaaggtgtcatctttgctgaatcgcatggctaattataccaatcttactcagggcgctaaagaacacgaggaagcagaaaatataacagaaggaaagaagaagcccacaaagacaccccagatgggaacgttcatgggagtgtatttaccatgtctccaaaacatttttggcgtgattctttttctgagactcacctgggttgtggggacggcgggcgtgcttcaagcctttgccattgtgctcatttgctgctgttgcactatgctaacggcaatatccatgtcagccatagctacaaatggcgtagtgcctgcagggggttcttactttatgatttccagagctctggggcccgaattcggcggtgccgtcggtttgtgcttctacttgggaacaacatttgccgccgctatgtacattttgggcgcgatcgagattttcctggtgtatatagtgccgcgcgccgcaatatttcattctgacgatgccctgaaggagtccgcggccatgctgaacaatatgagagtttacgggactgcgttcctcgtgttgatggtgttagttgtttttattggtgtacggtacgtgaataaattcgcgtccctcttcctcgcctgtgtgatagtttcgatcctggctatctatgctggcgccattaagtcaagcttcgccccccctcattttcctgtgtgcatgcttgggaacaggactctttcgtcacgccatattgatgtctgcagtaagaccaaggaaatcaacaatatgaccgtcccctccaaactgtgggggttcttttgcaattcaagccaattttttaatgcaacgtgtgatgaatattttgtgcataataacgtcacatcaattcagggcattccgggcctggcaagcgggatcattaccgagaatctatggagcaattatctcccgaaaggagagattattgaaaaaccgtccgcaaagagctctgacgtcctgggaagtctcaaccatgagtatgtgctagttgacatcaccacgtcttttactctattagtcggcatcttcttccctagcgttactggaataatggctgggagcaacaggagcggggatctaaaggatgctcagaaatctatcccaatcggtacgattcttgctattctgaccacatcttttgtttacctcagcaatgttgtcctcttcggcgcttgtatagaaggtgtggtgctgcgggacaaatttggcgacgccgtcaagggaaatcttgtggttggtaccctgtcctggccgagtccatgggttattgttataggatccttttttagcacgtgcggagcagggctgcaaagtttaaccggcgctccacggctgttacaggcgattgccaaagataatatcattccattcctgcgcgtgtttgggcacagtaaagcaaacggtgagccaacctgggctctgctacttactgcagcgatcgctgagttaggaattttgatcgcttccctggaccttgtagcccccatcctgtccatgttttttcttatgtgttacctttttgtaaacctcgcctgcgcactccagaccttgctccgcactcctaattggcggcctcgcttccgctattatcactgggcactgagcttcatgggaatgtctatttgcctggcactcatgttcatctcctcctggtattacgcaatagtggctatggtgatagccggaatgatatataaatatatagagtatcagggtgcagaaaaagagtggggcgatgggatccgcggacttagcttgagcgccgctcggttcgccttgctgcgcttggaggagggccctccccataccaaaaactggaggccacagctgttggtactcctcaagcttgatgaggaccttcacgtcaaacacccacgcctgctgacatttgcctcacaattaaaggctgggaagggactgaccattgtcggcagcgtgattgtgggcaattttctcgaaaattatggggaagcgcttgcagctgaacagacaatcaagcatctcatggaggccgaaaaggtgaaaggattctgtcagttggtcgtggccgccaaactaagggaaggtatcagccatctgattcaaagctgtggcctgggggggatgaagcataataccgtcgtaatgggctggccaaatgggtggaggcagagcgaagacgctcgggcttggaaaacattcattgggaccgtacgagtgaccaccgcggctcatttagcccttctggtggcgaagaacattagcttcttcccctccaacgtagagcagttctcggagggcaatatcgatgtgtggtggatcgtgcatgacggcgggatgctgatgctgctcccctttctccttaaacagcataaagtctggagaaagtgctccattcgtatcttcacggtggcccagctggaggataactccattcagatgaagaaggacctggccacatttctctatcacttgcgcatcgaagccgaagtggaagtggtggagatgcacgatagcgacatctcggcatacacatatgagagaacacttatgatggaacagcggagccagatgcttcggcacatgaggttgagtaaaacagaacgagatagggaagcacaattggtgaaggacagaaacagtatgctaagattgaccagcatcggctctgatgaggacgaagagactgagacttaccaggagaaggttcatatgacctggacaaaggataagtacatggcgtcgaggggtcagaaagccaaaagtatggaaggctttcaggacctcttgaacatgcgtccggaccagtccaatgtacggagaatgcacaccgccgttaaactgaatgaagtgattgtaaacaaaagccatgaggcaaaactcgtgctcctgaacatgcctggcccccctcgaaaccccgaaggtgatgagaattatatggaatttctggaagttctgaccgaagggctagagagggtgctcttggtaagaggaggggggtccgaagtgatcaccatctattcatag

SEQ ID NO: 205580 - DNA, 459 bp, synthetic construct
  misc_feature 1..459: note = Description of Artificial Sequence: Synthetic coding sequence
  source 1..459: mol_type = other DNA
atggccagcgtgcggttcatggtgacccccaccaagatcgacgacataccaggcttgtctgatacaagccccgatctgagctcccgttcctcctctcgtgtgcggtttagctctcgggagagcgtccccgagactagtcgaagcgagcctatgtctgaaatgtctggggcaactacatcacttgccactgtagcactcgacccccccagtgaccggacctctcatccacaggatgtgatagaggatctgtctcagaactcgatcacgggagagcattcgcaacttctggatgatggacataagaaggcccggaatgcctaccttaataattctaactacgaagagggcgacgaatacttcgataagaacctggccctatttgaggaggagatggataccaggcccaaggttagtagcctgttaaaccggatggcaaactacaccaatttgactcagtag

SEQ ID NO: 205581 - DNA, 3252 bp, synthetic construct
  misc_feature 1..3252: note = Description of Artificial Sequence: Synthetic coding sequence
  source 1..3252: mol_type = other DNA
atgcccaccaacttcaccgtggtgcccgtggaggcccacgccgacggcggtggcgacgaaacagcggaaagaactgaggcaccaggcactcccgaaggacctgagcccgagcgaccgagccccggcgatgggaatccgagggagaatagccctttcctcaacaacgtggaggtggagcaggagtcgttcttcgaaggcaaaaatatggccctcttcgaggaggagatggacagcaatcccatggtgagctcgttgttgaacaagctcgcaaactacacgaacttgtcccaaggagttgtcgagcatgaggaagatgaagagtcccggaggcgcgaagccaaggccccgcggatggggacattcatcggtgtctacttgccctgcctgcaaaacattctgggcgttatcctcttccttagactgacatggattgtgggagtggccggtgtgttagaaagcttcctgattgttgccatgtgttgcacgtgcaccatgctcactgcaatctctatgtcagcaattgcgaccaacggagtggtgcctgccggcggcagttattatatgataagtaggtctcttggcccagagtttggcggtgccgtaggtctatgtttttacctcgggacaacctttgcgggggcaatgtacattctcggcactattgagatctttctgacttacatctctccgggggctgcaatctttcaagctgaagccgccggaggcgaggcagccgccatgctccacaatatgcgcgtgtacgggacttgcaccttggtgctcatggccctcgtggtgttcgtaggggtcaaatatgttaataagctggcccttgtttttctggcttgcgttgtgttgagcatcctggccatctatgctggggtgattaaaagcgccttcgatcctcccgacatccccgtttgcttgctgggcaacagaactttatcaaggcgctctttcgatgcttgcgtcaaggcttatgggatccacaataattccgcaacaagtgccctctggggcctgttttgtaacgggtcgcagcctagcgccgcctgtgacgagtatttcattcaaaacaatgtcaccgagatacagggaatacctggagctgccagtggagtcttcttagaaaatctttggagcacatacgcccacgccggcgcctttgtggaaaaaaaaggtgtgcctagtgtccctgtcgctgaagaatcccgggcgtccgcactcccatatgtgctaaccgacatagccgcttccttcacactgcttgtaggcatctacttcccttctgtaaccgggataatggccgggagtaatcgcagcggtgatctgaaggatgcccagaagtcaatccctacaggcacaatactggccatcgtgaccacatccttcatctatttgagctgtatcgtcctgttcggcgcctgcatcgagggggttgtattgcgcgataagttcggcgaggccctgcaaggtaacctcgtcatcggcatgctggcctggccttccccatgggttattgtaattggcagttttttctcaacttgtggcgcaggtcttcagtccctcactggcgctccccggttgctccaggcaatagcccgcgacgggattgtgccatttttgcaagtgttcggtcatggaaaagccaacggggagcccacatgggcactgctgttaactgtgctgatctgtgagaccggcatcctaattgcaagcctcgactccgtggcacccatactcagcatgttctttctcatgtgctatctgttcgtgaacctcgcttgcgcagtacagaccctgctgaggactcctaattggaggccgcgttttaagttctatcactggaccctgagcttccttgggatgtcactgtgcctagccttaatgttcatctgctcttggtactatgccctgtcagcaatgctgattgccgggtgcatatataagtacatcgaatataggggagccgagaaggaatggggggacggaattcgcggactgtccttaaacgcagcccgctatgcactgttaagagtcgagcacggaccacctcatactaaaaattggagaccacaggtgttagtcatgcttaatctcgatgcggagcaagctgtgaagcacccacgcctactgagttttacaagtcaattgaaggccggaaaaggccttactatagtagggagcgttttagaggggacctatcttgataagcacatggaggcccagcgagcagaggagaatatccgaagcctgatgagcacggagaagaccaagggcttttgtcagttggtagtgtcatcatctctgagagatggaatgagccacctcatacagagcgctggactgggcgggttgaagcataacacagtgctaatggcctggccagcctcctggaagcaagaggataatccctttagttggaagaattttgtagacacggtgagggacactaccgccgcccaccaggcgctcctcgtggctaagaatgtcgactcctttccgcaaaaccaggagcgatttggcggaggccatatcgacgtatggtggattgttcacgatggaggcatgcttatgctgttgcccttcctgctgcggcagcataaggtatggcgcaagtgccggatgaggatcttcactgtagcacaggtcgacgacaactccatccaaatgaaaaaggatctccagatgttcttgtaccaccttagaatttctgctgaggttgaagtagtggaaatggtggagaacgatattagtgcattcacctacgagagaactttaatgatggaacagagatcacagatgttaaaacagatgcagctaagtaaaaatgagcaggagcgggaagcgcagctgattcatgaccgtaacacagccagtcatacggccgccgcggctagaactcaggcccctccaacaccagataaggttcaaatgacatggactagagaaaaactcatcgcagagaaatacaggtcacgggacacttccctgtcaggcttcaaggatttgttctcaatgaagcccgatcagtccaacgtccggaggatgcacactgccgtcaagctgaacggggtggtacttaacaaatcgcaggatgcccaattagtccttcttaacatgcctggaccacctaagaacagacagggtgatgagaattacatggaattccttgaagtgcttactgaaggtctgaaccgggttctgctggtacggggcgggggacgggaggtgattaccatttactcctag

SEQ ID NO: 205582 - DNA, 801 bp, synthetic construct
  misc_feature 1..801: note = Description of Artificial Sequence: Synthetic coding sequence
  source 1..801: mol_type = other DNA
atgcccaccaacttcaccgtggtgcccgtggaggcccacgccgacggtggtggagatgaaactgcagagcgaacagaggcccctggtacaccggaaggtcctgaacccgagaggccgtcccccggtgatgggaacccacgcgagaactcgcccttcctgaataacgttgaggtcgagcaggaatcttttttcgagggcaagaatatggctttgtttgaagaggagatggattcaaatcccatggtgtcatctctcctcaacaagctggcaaactatacgaacctctcccaaggagtggtggagcatgaagaggatgaagagagcaggagacgcgaggccaaagcaccacggatgggtacatttatcggggtgtatttgccctgcctgcagaatattctaggtgtgatcttgttcctccgattaacttggatcgtgggagtggcgggggtcctggaaagcttcttgattgtggccatgtgctgcacgtgcacgatgttaaccgccatttctatgagcgccatcgccacaaatggagttgttcccgccggtggatcctattatatgataagtagaagtctagggccggagttcggcggcgcggtgggtttgtgtttttacctagggacaacatttgctggggcaatgtatatccttgggactattgagatttttcttactggaaccgaagacggcgtggggtcactgggtctaggcctggcccaaggtaaccggagacagacccacctttccccctccgacgcagcacaggccgcccatggcgcctcatacggctcgttctag

SEQ ID NO: 205583 - DNA, 3066 bp, synthetic construct
  misc_feature 1..3066: note = Description of Artificial Sequence: Synthetic coding sequence
  source 1..3066: mol_type = other DNA
atggccgagctgcccaccaccgagacccccggcgacgccaccctgtgtagcggtcgctttactattagcactctgctctcatctgatgagcctagcccacctgctgcctacgattccagccacccgagccatctgacacactcttcgacattttgcatgcgaacttttggctataacaccattgacgtagtaccgacctatgaacattacgcaaatagtactcaacccggcgagccaaggaaagtaaggcctacattggccgatctgcattcttttttgaaacaggaggggaggcatctgcatgccctggcttttgatagccggccctctcatgaaatgaccgacggcctggtagaaggcgaagctggcactagtagtgagaagaatcccgaagagcctgtacgatttgggtgggtgaaaggcgtgatgatccgctgcatgctgaacatctggggcgtgatactttacctcagactgccctggatcactgctcaggcaggaatcgtgctgacatggatcataatcctccttagcgttactgtaacctctataaccggcctgtctatttctgctataagcacgaacggaaaggtaaagagcggggggacatattttctgatttcacgatccctggggccagaactaggtggaagtattggattgatttttgcctttgctaatgcggtcggcgtggctatgcatacggtaggctttgcagaaaccgtgcgagacctgttgcaagagtatggcgcacccatagttgaccccataaatgatattcgcattatcgctgtcgtgagcgtaactgtgctcctggcaatctccctggccggcatggaatgggagagtaaagcccaggtattattttttcttgttataatggtgtccttcgccaattacctggtaggcactttgattcctccttccgaagacaaggcttccaaggggttcttctcctaccgcgcagatatcttcgtgcagaacctggttcccgactggagaggacccgatgggactttttttggcatgttcagtatctttttccctagtgctactgggatactcgctggcgctaatatatccggcgaccttaaagatcccgctatcgcgatcccaaaggggaccctgatggccatcttttggactaccattagctatctggccatctccgcaaccatcggttcctgcgtcgttagggatgcctcaggggtcctgaacgacaccgtgacaccagggtggggcgcttgcgaggggctggcctgctcgtacggatggaacttcaccgagtgtactcaacaacattcatgccattatgggcttataaattactatcagactatgtccatggtgtcggggttcgcacccttgattaccgctggaatcttcggagccacactgagctcagccctggcctgcctggtgtctgccgcaaaagtgtttcaatgtctctgtgaagatcaactgtatcccttaatcgggttctttggcaaggggtacggcaaaaacaaggagccagtccggggatatctgttggcatatgctatcgctgtggcttttataattatcgccgaactgaataccattgcacccattataagtaacttctttctctgtagctacgccctgataaatttttcttgcttccacgctagtattaccaattccccaggatggagaccatccttccagtattataataaatgggccgccttgtttggtgccattatttctgtggtgattatgttccttctgacatggtgggccgccctgatcgcgataggggttgtgcttttcctgctgttgtacgttatttacaaaaaaccagaagtgaattggggtagcagcgtgcaggccggcagttacaatttggctctcagctactcagtgggtctgaacgaagtggaagatcacatcaaaaattatcgcccccagtgtttggtgctcacaggaccccctaattttaggcccgccctggtggattttgttggcaccttcactcgaaatcttagcttgatgatctgcggacacgtgcttatcggtccgcataaacagcggatgccagaactccagctgattgcaaacggacacaccaagtggctaaacaagagaaaaataaaggccttctacagcgatgtgatagccgaggacctgcgccgaggcgttcaaatcctcatgcaagctgctgggctgggacggatgaagcccaatattctcgtggtcggtttcaaaaaaaattggcagagcgcccaccccgccaccgtggaagactatatcgggatccttcacgacgccttcgacttcaactacggggtttgtgtgatgcgcatgcgggagggccttaacgtgtccaaaatgatgcaggcacacataaacccagtcttcgaccctgccgaggacggcaaggaagcctctgcccgggtggaccctaaagcactagtcaaggaggaacaggccactacaattttccagagcgaacagggcaaaaaaaccatcgatatttactggctattcgatgacggtggactcacacttctgatcccctacctgctaggacgcaagagacggtggtccaagtgcaaaatcagggtattcgttggtgggcagatcaacaggatggatcaagagaggaaggcaattatatctttgctaagcaagttccggttaggctttcacgaggttcacattctgcctgacatcaatcagaaccccagagctgaacatactaagaggttcgaggacatgatcgctcctttcaggctcaatgacggctttaaagatgaagccacggtcaatgaaatgaggcgggattgcccctggaaaatatccgacgaggagattaccaagaatagagtcaagagcctgcgacaagtccgtctgaacgagattgtgctcgattacagtcgggatgcggcgctcatcgtcattacgcttcccatcgggcgcaagggtaaatgccctagttcactgtacatggcatggctggaaaccctctctcaggatctgaggccccctgttatcctaatccggggaaaccaggaaaatgttcttacgttttattgtcagtag

SEQ ID NO: 205584 - DNA, 3090 bp, synthetic construct
  misc_feature 1..3090: note = Description of Artificial Sequence: Synthetic coding sequence
  source 1..3090: mol_type = other DNA
atggccgagctgcccaccaccgagacccccggcgacgccaccctgtgcagcgggagatttacaatctcaaccctgctgagtagcgacgagccgtctcccccagccgcctatgattctagtcaccctagccacttgacccacagcagtaccttttgcatgcgtacctttggatacaatacaatagatgtcgtgcccacttatgaacactacgccaattccacccagcccggggagcctcgcaaggtgcgtcctaccctcgccgatctgcattcttttctcaaggaaggcaggcacctgcatgccctggcatttgactcgaggccctcccacgaaatgactgacggtctggttgagggtgaggccggcacttcttcagagaaaaatccggaagagcccgtcaggttcggctgggtcaagggggttatgatcaggtgcatgctcaatatctggggcgttatcctgtatctgcggttgccgtggatcaccgcccaggctggtattgttctgacttggattattatcctcctcagtgttaccgttactagcataaccgggttaagtatctcggccatatccaccaacggcaaggtgaagtctggtggtacctattttctgatctctcgcagcctcgggccagaactgggcggctcgattggactgatatttgcctttgccaatgccgtaggggtggctatgcacacagttggtttcgccgagaccgtcagggacctcctgcaagagtatggtgctccgatcgtcgatcctattaacgacattaggatcatcgcagttgttagcgttaccgtcctgctggcgatttctctggcaggcatggaatgggagtccaaggcccaagtgctgttttttctcgtgatcatggtatctttcgctaactatctcgtgggcaccctcatccctcccagtgaagacaaggcaagtaaaggattcttttcttatagagccgacatttttgtgcaaaatctagtgcccgactggcgcggccccgatgggacctttttcggcatgttcagcatcttctttccatccgccaccggcattctggcgggtgcaaatattagtggcgatctgaaggaccctgccatcgccatcccaaaagggactctcatggctatattttggacaaccattagctatttggcgatctccgccacaataggttcgtgcgtagtcagagatgccagtggggtgctgaatgacacggttactccagggtggggggcatgcgagggtctggcctgctcctacggctggaatttcacagagtgcacgcagcagcactcgtgtcactatggcctcattaactattatcagacaatgtcaatggtgtccggatttgccccgttgatcactgcaggcattttcggtgcgacgctctcgtccgcccttgcatgcctggtctcggccgctaaggtgttccagtgtctgtgtgaggaccagctttaccctctcatcggcttcttcgggaagggctatgggaagaataaagagcccgttaggggttatctcctggcctatgcaattgccgtggcgtttattatcattgctgagctgaatacaatcgctccaatcatatccaatttctttctctgcagttatgctctgattaatttttcttgtttccacgcatcgatcacgaatagccccggctggaggccatccttccaatattacaacaaatgggctgctctgtttggagccatcatctccgtggtcatcatgtttcttttgacgtggtgggccgctctcattgccatcggcgtcgtgctatttcttctcctgtacgtcatctataaaaagcccgaagttaattggggctccagcgtacaagcaggcagttataatttagcgttgagttattctgtcggactcaacgaagtcgaggatcacatcaagaactaccgtcctcagtgtctggttctcacaggacccccaaacttcagacctgctctcgttgatttcgtgggaacgttcaccaggaacctttcccttatgatctgcggtcacgtactgattggaccacataaacagcggatgcccgagctccaactgattgctaatggacataccaagtggcttaacaaaagaaaaattaaagctttttacagcgatgtgatcgccgaagatctgcgcaggggcgttcagatccttatgcaggccgccggcctcggccgcatgaaaccaaacatactcgtggtcgggttcaagaagaactggcagtccgcgcaccctgccacggtggaggattacatcggaatcctacacgacgcctttgatttcaattatggcgtgtgtgtaatgcgcatgcgcgagggcttgaacgtctcaaagatgatgcaggcgcacatcaacccagtttttgacccggctgaagacgggaaggaggcaagcgcacgaggcgccaggcccagcgtttcgggcgccctggacccaaaggcactcgtgaaggaggaacaggccaccacaatttttcagagcgagcagggaaagaaaacaatagacatctattggctcttcgacgatggaggccttacgctgctgattccttacctcctgggccgcaagcggcgatggagcaaatgtaaaatcagggtgttcgtgggagggcagataaatcgtatggatcaggagaggaaagctatcatttcgctgctgagcaaattccggctgggcttccacgaggtgcatatcttgcctgatatcaaccagaatcctcgagccgagcatactaagaggtttgaggacatgatagctccattcagactcaatgacggcttcaaagatgaggcaacggtgaatgagatgcggagagattgtccttggaagatctcagacgaggaaatcacgaagaatcgggttaagtccttaaggcaggtaagactgaatgaaatagtgcttgactatagtcgagacgctgccctaattgtgataactctgccaattggaaggaagggcaaatgtccatcttctctgtatatggcttggttggagacactgagccaggacttgaggccaccagtgattctcattcgcgggaatcaggagaatgtgctgactttctactgtcagtag

SEQ ID NO: 205585 - DNA, 3093 bp, synthetic construct
  misc_feature 1..3093: note = Description of Artificial Sequence: Synthetic coding sequence
  source 1..3093: mol_type = other DNA
atggccgagctgcccaccaccgagacccccggcgacgccaccctgtgctccggccgctttacaatatcgacactgctatcctcagatgaaccaagcccgcctgccgcatatgatagttctcatcccagtcaccttacgcactccagcaccttctgtatgaggacgttcggatacaataccatagatgtggtgccaacctacgagcactatgccaactccactcagcccggagagccccggaaggtgcgtcccacactcgccgatttgcattcgttcctcaaacaagaggggcgccatctgcacgcactcgcctttgatagcagaccttctcatgaaatgactgacgggctcgtcgagggcgaagccgggaccagctccgagaaaaacccagaagaacctgtcagatttggatgggtaaagggcgttatgatcaggtgcatgttgaatatctggggggtgatcctgtatttacgactgccgtggataacagcccaggccggaattgtgctcacatggataatcatactgttatccgtgaccgtcacatccatcacgggcctgtccatatctgcaatatcaacaaacggcaaggtgaagtccggcgggacatactttctcatcagtcggagtctcggccccgagttggggggctctattggcttgatcttcgcgtttgccaatgctgttggcgttgccatgcacaccgtcggttttgccgaaactgtaagagacctactccaagagtatggagcccctatcgtggaccctattaacgatatacgcatcattgccgtagtctcggtaacagtgctgttggccatcagcttggcaggcatggagtgggaaagcaaggcacaggtgctcttcttcctggtgattatggtgtcctttgcgaattacctggtaggcacattaattccgccaagcgaagacaaagcctccaagggcttctttagctatcgggctgatatctttgtccagaacttagtccccgattggcgtggacccgacggcacatttttcgggatgtttagcattttctttccttccgccactggaattctggccggtgccaacatttctggtgacttaaaggacccagctatcgccatccctaaaggaaccttgatggcaatcttttggaccacaatatcctacctggccatatcagcgactatcgggtcctgtgtagtgagggatgcaagcggagtgctgaacgatactgtgacccctggatggggcgcttgcgaaggcctggcgtgtagctatggctggaatttcaccgaatgcacccagcagcattcctgtcactatgggctcatcaactactaccagactatgagtatggtgtctggctttgcccctttgattactgcaggcatttttggagctactctgtcctccgcactggcgtgcttagtatccgcggctaaggtctttcagtgtctatgtgaagaccagctctatccactgatcggtttttttggaaaaggatatggcaagaataaagagcctgtgaggggctatctgttggcctacgctatagcggtagcctttatcattattgccgagctgaatactatcgcaccaataatctcaaatttttttctctgtagctatgccctgattaacttttcttgtttccacgcttcgataactaacagccctggctggcgccccagcttccagtattataacaaatgggccgcgctcttcggcgctatcatctctgtggtgattatgttcctgttaacatggtgggctgccctgatcgccatcggagtcgtcctctttttactgctgtacgttatctataaaaagcccgaagtgaattgggggtccagcgttcaggccggatcctataacctcgcgctgagttattctgtgggccttaatgaagtggaagaccacataaagaattataggccccagtgccttgtgcttaccggtcccccaaactttaggcctgccctcgtggattttgtggggacattcacgagaaatctgagcctcatgatttgcggccatgtgctcatcggaccccataagcaacgtatgcctgagcttcagctgatcgctaacggtcataccaagtggcttaacaaaaggaaaatcaaagcgttttactccgatgtgatcgcagaagatttgcgacggggggtgcagatcttgatgcaagccgccggcctcgggcgcatgaagcctaacatcttagtagtcgggttcaaaaagaactggcagagcgcccaccccgctacggtcgaggactacatcgggatactgcatgatgccttcgactttaattacggggtgtgtgtgatgcgtatgagggaggggttgaatgtgagtaaaatgatgcaggcacacatcaaccctgttttcgatccagccgaagatggtaaggaggctagcgccagaggcgccagaccaagtgtttctggggctctcgaccctaaggcactggtgaaagaggaacaagctaccacaatctttcagagcgaacagggcaaaaaaaccattgacatttactggctgttcgacgatggcgggctgacactgctcatcccttacctattggggcgcaaacgcaggtggagtaaatgcaagatcagagtgttcgtcgggggtcaaattaatcggatggaccaggaacggaaggctattatcagtctcttgtctaaattccgtctcgggttccacgaagttcacatattgcccgacatcaatcagaaccctcgagcagagcacacgaagagatttgaagacatgattgctccatttcggctgaacgacgggtttaaggatgaggccactgttaacgaaatgagaagagattgcccttggaagatcagtgatgaggagattacgaagaaccgcgttaagtccctaagacaggtgcgacttaacgagatcgtattagactactctagagacgccgctctcatcgtgataacccttcctatcggtaggaagggcaagtgccccagctctctgtacatggcttggctcgaaacgctgtcacaggatctgcgcccacccgtcattctaataaggggaaaccaggagaatgtcctgaccttttactgtcagtag

SEQ ID NO: 205586 - DNA, 3090 bp, synthetic construct
  misc_feature 1..3090: note = Description of Artificial Sequence: Synthetic coding sequence
  source 1..3090: mol_type = other DNA
atggccgagctgcccaccaccgagacccccggcgacgccaccctgtgctcagggcgatttaccatatccaccctcctgtctagtgacgagccgagccctcccgctgcctacgactcttcccacccgtctcacctcacacacagctctacattttgcatgcggacattcggatacaacacaattgacgtggtccctacctacgagcattacgccaactcaacacagccaggcgaaccaaggaaggtcaggccgacgctggctgatctccactcatttttaaaagagggtcgacatcttcacgcgctggcgttcgactcgagaccaagtcatgagatgacggacggactggtcgagggggaagccgggacaagcagcgaaaaaaatcccgaggagcccgtgagatttggatgggtaaaaggtgtgatgattcggtgtatgctgaacatctggggtgtcatattataccttaggctaccctggatcaccgcccaggcaggtatagtcttgacttggatcataatcttactctcggtaactgtaacgagcattactggactttctatttccgcgatatctaccaacggaaaagtcaaaagcggtggaacctactttctgataagccgatcactcgggccagagctgggtggtagtataggactcatcttcgctttcgctaatgcagttggagtcgcaatgcataccgtcggcttcgccgaaacagtccgggacttgttgcaggagtatggcgccccgatcgtcgaccccattaatgatattcgcattattgccgtggttagtgtaacggtcctgttagccattagtctcgcaggaatggaatgggaaagcaaagctcaagtgttgtttttcttggtgatcatggtatccttcgcaaactaccttgtaggaaccctcatacccccaagcgaggacaaagcctcaaagggtttttttagttatcgcgctgacatctttgtgcagaatcttgtgccggactggagaggacccgatggaaccttctttggaatgttcagtatcttttttccatcagctacaggaatcctggccggggcaaacatctccggtgacctgaaggatcctgcaatcgccattccaaaaggcacgctgatggcaatcttttggacgactatttcctacttggctatttctgcaacgatcggatcatgtgttgtgagagacgcctccggcgttctcaacgatactgttacgcccggttggggcgcctgcgaagggctcgcctgttcatacggctggaatttcactgagtgcacccagcaacacagctgccactacggtcttataaactattatcagaccatgagtatggtgtcgggttttgcccccctcatcaccgcaggaatcttcggggccaccctgagctccgccctggcatgtctggtgagcgccgccaaagtgttccagtgcctgtgcgaagaccagctctacccactgattgggtttttcggcaaagggtacgggaagaataaagagcctgttcgaggatacctactcgcatatgctattgccgtagcatttatcattattgccgaactcaatactattgctcctattatctccaatttcttcctttgcagctatgcccttatcaacttttcctgcttccatgctagcatcacaaattctcctggatggcgcccatccttccagtattataataaatgggcggcactgtttggggccatcattagcgtggtcatcatgtttctgctcacctggtgggcagcgcttattgcaataggggttgtgctgttcctccttttgtatgtcatttacaagaagcctgaagttaattgggggtctagtgtgcaggccggcagctataacttagctcttagttactccgtgggcttgaatgaggtcgaggaccacattaaaaactaccgccctcaatgtcttgtactaacggggccacctaacttcaggccggcgctcgtagatttcgtgggcaccttcacgcgtaacctctctctcatgatctgtgggcacgtcttaattgggccgcataaacagaggatgcctgagctccagctgatcgctaacggccataccaagtggctgaataagcgtaagatcaaggctttttactccgatgttatagccgaggatttaaggagaggcgttcagattctgatgcaagccgcaggcctgggccgaatgaaacctaacattctggtggtcgggtttaagaagaactggcaatccgctcaccccgccactgtggaagattacatcggcatcctccacgacgccttcgatttcaactatggcgtctgtgtcatgcggatgcgggagggactaaacgtgtcgaaaatgatgcaagcacatattaacccagtgttcgatcccgccgaggacgggaaggaggctagtgccaggggcgcacgcccttctgtgagcggagccctggaccccaaggcccttgtgaaagaagagcaggccacgaccatattccagtctgaacagggaaaaaagacaatcgacatttattggctctttgacgatggaggcctcaccctcttgatcccctatcttctcggtaggaaaagacgttggagcaaatgtaaaatccgcgtcttcgttggagggcaaatcaaccggatggaccaggagcgcaaggccatcatctctttgctatcaaaattccggctggggttccatgaagtgcacattctgcctgatattaatcaaaacccgcgcgcagagcatacgaaaaggttcgaggacatgatagccccatttagactcaatgatgggtttaaagacgaggccaccgttaacgaaatgcggagggattgcccctggaaaataagcgacgaagaaattaccaaaaacagggtaaagtccttgcgacaggtcagattaaatgagattgtgcttgattacagcagagatgctgccctgatcgtgatcaccttgccgatcggcaggaaagggaaatgtccatctagcctgtacatggcctggcttgagacactgtcacaggatcttaggccacccgtgattctaatccgggggaatcaggaaaatgtcctgacattctactgccagtag

SEQ ID NO: 205587 - DNA, 1293 bp, synthetic construct
  misc_feature 1..1293: note = Description of Artificial Sequence: Synthetic coding sequence
  source 1..1293: mol_type = other DNA
atgagcctgaacaacagcagcaacgtgttcctggacagcgtgccctctaacactaataggtttcaggtgtcggttatcaacgagaatcatgaaagtagcgccgctgctgacgataacaccgaccccccacattacgaggaaacaagtttcggagatgaggcccagaagcggcttcgtatctcattcagacccggcaaccaggaatgctacgacaattttctacagtccggcgagaccgccaaaacagacgcctcatttcatgcctatgactcccatacaaatacatattacctacagacatttggacataatacgatggatgccgtgccgaagattgagtactatcggaatacagggagtatcagcggcccgaaggtgaacagaccttccctgctggaaattcacgagcagctggccaagaatgtggccgtgacaccatctagtgctgaccgtgtggccaatggcgatggcatcccgggggacgaacaggccgaaaacaaagaggacgatcaggccggcgttgtgaagttcgggtgggtgaaaggcgtacttgtgcggtgtatgctcaacatttggggcgtgatgttgtttattcgtctcagctggatcgtcggggaggctggaattggtctgggagtcctcataattctgctgtccaccatggtcactagcataacagggctaagtacttctgcaatcgcgactaatgggttcgtcaggggcggcggagcatattaccttatttcaagatcattgggacccgaattcggcggcagcattggcttgatctttgctttcgccaatgctgtcgcagtcgctatgtacgtggtcgggtttgccgagaccgtggtggatcttcttaaagagtccgacagcatgatggttgaccccaccaacgacatccgcattataggcagcataaccgtggtgatcttactgggcatctccgtcgctgggatggagtgggaagcgaaggctcaggtcatcctgctggtgattttgctgatcgcaattgcaaatttttttatcgggacggtgattcccagcaacaatgagaaaaaatccagaggtttctttaattatcaagcatccatcttcgctgaaaatttcggcccgaggtttacaaagggcgagggttttttttcagtcttcgcaatcttttttcccgcagctacagggattctggccggggcgaatatttccggggatcttgaggcgttgagaaaacagggagcttcacccctgcctcagggagcccagtcaagacgcagacgccagacctcccttatctag

SEQ ID NO: 205588 - DNA, 3300 bp, synthetic construct
  misc_feature 1..3300: note = Description of Artificial Sequence: Synthetic coding sequence
  source 1..3300: mol_type = other DNA
atgagcctgaacaacagcagcaacgtgttcctggacagcgtgccctctaatactaaccgcttccaggtcagcgtgatcaatgaaaaccacgaaagtagcgcggccgctgacgacaacacagaccctccccattacgaggagacctctttcggagatgaggcccagaaaaggctgagaatatcttttagacctggcaaccaggagtgctatgacaactttctgcaatcaggggaaacagccaaaactgatgcctcttttcatgcctacgattcccatacgaatacatattacctgcagacttttggtcacaataccatggatgccgttcccaaaatcgaatattatagaaatactgggagcatctccgggcccaaggtaaaccggcccagcctgctggaaattcacgaacaactcgctaaaaatgtggctgtaaccccctcttccgccgaccgagtggcaaatggggatgggatacctggtgacgaacaggccgagaacaaggaggatgatcaggcaggcgtggtaaagtttggctgggtgaaaggagtccttgtccggtgcatgctaaacatctggggcgtgatgctgtttattagattgtcatggatcgttggcgaggctggtatcggattaggtgtgcttatcatcttacttagcacaatggtgacctctatcacaggcttgagcactagtgctattgccacaaacggcttcgtgcgcggaggcggagcctattatcttatcagcaggagtttagggcccgagtttggcggatcaatcggattgattttcgcctttgcaaatgccgtagccgtcgcaatgtatgttgttgggttcgctgagacagttgtcgacttactgaaagagtctgactctatgatggtcgaccccacaaacgacatccgaatcataggtagtattaccgtcgtgatcttgctgggaattagcgtggccgggatggaatgggaagctaaagcccaggtgatactgctagtgatccttctgatagctatcgccaacttcttcattggaaccgtgatcccctctaataatgagaaaaagtcgagaggcttctttaattaccaggctagtatattcgctgaaaactttggtccaaggttcaccaagggagaggggttcttcagtgtatttgctatcttttttccagcagccactggaatcctcgctggcgcgaacatcagcggggatttagaagacccgcaagatgccatccctcggggtacaatgttggccatctttataacaaccgtggcctatctgggtgtcgctatttgcgtgggggcctgcgtggttagagacgccacaggaaatatgaatgatactatcatctcaggcatgaattgtaatggttcagcagcctgcggtttgggctacgatttttctaggtgcaggcatgaaccctgccagtacggacttatgaataactttcaagttatgagcatggtttccggattcggcccccttattacagccgggatcttctccgccaccttgtcgtccgctttagctagtctcgtcagcgcccccaaagtgtttcaggccctatgcaaagataacatttacaaggccctgcaattttttgctaaagggtatggaaagaacaatgagcccctgagaggatatatcttaacctttttgatcgccatggccttcatactcatcgctgaacttaatactatagcaccaatcatttctaactttttcctggcatcatacgcgctcataaatttttcatgtttccatgccagttatgcaaagagtcccggctggaggcctgcatacgggatatataatatgtgggtgtcattgtttggcgccgttctatgttgcgctgtaatgtttgtgatcaactggtgggcggctgtcattacatacgtgatagagttctttctgtacgtctatgtgacttgtaagaagcctgatgtgaactggggctccagtacacaggccctcagttacgtctctgccctggataacgccctggagctgacaaccgtggaggatcacgtaaagaactttcgcccccagtgtatcgtactaaccggtggaccaatgactcggcccgccctcctcgatatcactcacgcctttaccaaaaatagtgggctctgtatttgttgcgaggttttcgtagggccacgtaagctgtgcgtaaaagagatgaatagcggcatggctaaaaagcaggcctggctgattaaaaataagataaaggcgttctacgccgcagtggctgccgattgcttccgcgacggggttcggagcctgcttcaggctagtggcctaggcaggatgaagcccaataccctggtgatcggctacaaaaagaattggcgcaaagcgccactgactgagattgaaaactacgtcggcattatacacgatgccttcgatttcgagataggcgtggtgatcgtgagaataagccaaggcttcgacataagccaggtgctccaggtgcaagaggagctggagagattggaacaagagaggttagcgctggaggccaccattaaagataatgagtgtgaggaagaaagcggtggtatacgcgggcttttcaaaaaagctggcaaacttaacatcaccaaaactactcctaagaaggatggttctattaatacgagccagtccatgcatgttggcgagttcaaccagaagctggtcgaggcgtctactcagtttaagaagaagcaggagaaagggacaatcgatgtctggtggctattcgacgacggcgggctcactctcctgattccctacatcctaaccctgcgcaagaagtggaaagactgtaagcttcgtatttacgttggtgggaagattaatcggatcgaggaagagaaaatcgttatggcctctctgctgtcgaagtttcgcattaagttcgctgatattcatattatcggtgacataaacattaggccaaacaaggagagctggaaggtgttcgaagagatgattgaaccctatcgactgcacgaaagctgcaaggacttgactaccgcagaaaagctaaagagagagacgccctggaagataacagacgccgaactggaggcggtgaaggaaaagagctatcgccaggttcggcttaatgagctgctgcaggagcacagccgcgcagccaacctcatcgtgctgagcctgccagttgcacgcaaaggaagcatctctgatttgctgtatatggcttggctagagattctcaccaagaatttgcctccagtgctgctcgtgagaggcaaccataagaacgtcctcactttctactcctag

SEQ ID NO: 205589 - DNA, 3300 bp, synthetic construct
  misc_feature 1..3300: note = Description of Artificial Sequence: Synthetic coding sequence
  source 1..3300: mol_type = other DNA
atgagcctgaacaacagcagcaacgtgttcctggacagcgtgcccagcaacaccaataggttccaggtcagtgtaattaatgaaaatcatgagtcttcggccgccgctgacgacaatacagatcctccgcactacgaggaaaccagctttggagatgaggcccaaaagcggttgcgtattagctttaggcctggcaaccaggagtgctacgataattttctgcagtctggggagaccgcaaaaacagatgctagctttcatgcctacgactctcacacaaacacgtactacctgcagacttttggacataacaccatggacgcagtgccaaaaattgaatattatagaaacacaggctcaatctcaggtcctaaggtcaatagaccgtcccttctggaaattcacgagcaactggcaaagaacgtggcagtcactccctcttccgcagaccgtgtggccaacggggatggcattcccggagatgagcaggcagaaaacaaggaggatgatcaggctggggtcgtgaagttcggttgggtcaaaggtgtcctagttcgctgtatgctcaacatctggggggttatgctcttcattcggctttcgtggatcgtgggcgaggccggaataggtctgggggtgattataattggactgtccgtggtggtgaccacactcaccgggatcagtatgtctgccatctgcacaaacggagttgttagggggggtggtgcctattaccttatatcacgatctctaggccccgaattcggcggttccatagggttgattttcgcgttcgctaacgccgttgccgtagctatgtatgtggtcgggttcgctgaaactgtcgtcgatttgctgaaggaatcggattccatgatggtagatcccacaaacgacatcagaatcattggttcaatcacagtggtcatccttctcggaatctcagtggccggcatggagtgggaggccaaggcacaggttatcctgttagtgatcctcctaatcgctatcgctaacttctttattgggacggttataccaagcaacaatgagaagaagagcagaggtttcttcaactaccaagccagtattttcgccgaaaacttcggtcctcgctttaccaagggagaagggtttttttctgtttttgccatattctttccagctgcgacaggcatcctggctggcgctaatatcagtggcgaccttgaagatccccaagacgccattccaagaggtactatgctggctatcttcattaccaccgtggcctacctgggcgtagccatttgcgtgggtgcatgtgtggtgagagacgctactgggaatatgaatgacactattatcagcgggatgaattgtaatggatctgccgcctgtggcctagggtatgatttttcaagatgccggcatgagccttgtcaatatggtctgatgaacaactttcaggtcatgtcaatggtatccggcttcgggcctttgattactgccggtatcttcagcgctactctgtctagcgctctagcctccctcgtgagcgcacccaaggtatttcaggccctgtgtaaggataatatttataaagcccttcaattcttcgccaaagggtatgggaaaaacaatgaacctcttcgtggatacatacttaccttcctaatcgcgatggctttcatcctgatcgccgaattaaacactatcgctccaatcatttctaatttttttctggcctcctacgccctcattaatttttcctgtttccatgcctcttacgccaagtcacccggatggagaccagcttacggcatttataatatgtgggtcagtcttttcggcgcagttctttgttgtgccgtcatgtttgtgatcaactggtgggcagctgtgatcacttacgtcattgaattttttctgtatgtctatgtcacatgcaagaaacctgatgtgaattgggggagtagcacacaagccctaagttatgtgagcgctctcgacaatgccctcgagctgactacagtagaagaccacgtgaaaaatttccggccacagtgcatcgtgctcactggcggacctatgacgagaccggcactactggatattacccacgcatttacgaagaatagcgggctatgtatctgttgtgaagtctttgtcggcccgcgaaaattatgtgtgaaagagatgaattccggcatggcaaaaaagcaagcttggctcatcaaaaacaaaatcaaggctttctacgccgctgttgcagccgattgttttcgcgacggcgttcggtcactgctgcaggcaagcggattggggcgtatgaagcccaacacactggtcatcggatacaagaaaaattggaggaaggccccgctgactgagatagaaaattacgtggggatcatccacgatgcatttgactttgaaataggggtggtaatcgtcaggatatcccaagggtttgatatttcccaggttctgcaagtgcaggaagaattggagagactggaacaggaacgcctggcgctggaggcaaccattaaggataatgagtgcgaagaggagtctggcggaattcggggtcttttcaagaaagccggaaagctgaacataaccaaaacaaccccaaaaaaggatggatccatcaacacaagtcagtcgatgcacgtcggcgaattcaaccagaaactggttgaagcttccacacagttcaaaaagaagcaggaaaaaggcacaatcgatgtctggtggctatttgatgatggcggtctcacacttttgattccctacatcctgaccctgcggaagaagtggaaagattgcaagcttcggatttacgtcggcgggaagatcaaccggattgaagaggagaagatagtgatggcaagcctcttaagtaaattccgtattaagttcgcagacattcacattattggggatattaacattcgccccaacaaggaatcgtggaaagtcttcgaggagatgatagaaccgtatcgcctccacgagtcgtgtaaggatttgaccactgctgagaagctcaaaagggaaactccctggaaaattacagacgccgagctggaggctgtgaaggagaagtcctacaggcaggttagactgaatgagctgttgcaagaacactcccgcgcagctaatctcatcgtgctttctctacctgtggctcggaagggttccatctctgacctgctgtatatggcatggctcgagatactcactaaaaacttgcctccagtcctactagtgcgtggtaaccataagaacgttctgaccttttattcttag

SEQ ID NO: 205590 - DNA, 1782 bp, synthetic construct
  misc_feature 1..1782: note = Description of Artificial Sequence: Synthetic coding sequence
  source 1..1782: mol_type = other DNA
atgctgaacatctggggcgtgatgctgttcatccggctgagctggattgtaggggaggctggcattggactaggggtgttgattatccttctctcgacaatggtcacctctattaccggactgtccacctccgcaattgccaccaatggtttcgtgcgcggtggaggcgcctattacttaatctctagatctctcggcccggagttcggcgggtctattggactgattttcgcgtttgctaacgctgttgcggttgccatgtacgtagtgggattcgcagaaactgtagtcgatctcctgaaggaaagtgattctatgatggtggatccaactaatgatattcgtatcattgggagtatcaccgtggtgatcctactgggtattagcgtcgccggcatggagtgggaagctaaggcgcaggtgatactcctggtcatccttctcattgccattgccaacttctttattggcaccgtcatcccctctaataatgaaaaaaaatctcgcggcttctttaactaccaggctagcatatttgccgagaactttggacccaggttcaccaaaggggagggcttctttagcgtctttgctatcttctttcccgctgcaactggcatcctggccggggcaaacataagcggagacctggaggaccctcaggatgccataccacgcggtaccatgcttgctatcttcataaccactgttgcttacctgggagttgcgatttgtgttggagcatgcgtggtcagggatgcgactggaaatatgaacgacaccatcatctcaggaatgaattgtaatgggtctgcagcttgcggtttggggtatgatttcagcagatgcagacacgagccttgccaatacgggttgatgaacaactttcaagtcatgagcatggtttcaggatttggtcccttgatcactgcgggtatcttctcggcgaccctgagcagtgccctggctagcctggtgtcagcccctaaggtatttcaggccttgtgcaaggataacatctacaaggcccttcagttttttgctaagggatacggaaagaacaacgaacccctccgaggctatatcttgacgtttctcattgcaatggctttcatcctaatcgccgaactgaacacaatcgcaccgataatctcgaatttctttctggcttcatatgccttgataaactttagctgctttcacgctagctacgccaaatcccctggttggcggccagcctatggcatctacaatatgtgggtcagcctgttcggcgcggtgctttgctgcgccgtgatgtttgtgataaactggtgggccgccgtgatcacctatgttatagaattttttctctatgtgtatgtgacttgtaaaaaacctgatgtgaattgggggagttccacacaggccctgagttacgtttcagcactcgataatgctctcgagttaacaacagtagaggaccacgtaaagaacttccggccacaatgcatcgttctgaccgggggccccatgacgcgaccagcccttttagatataactcacgcatttactaaaaattcagggttatgtatctgttgcgaggttttcgtgggcccgaggaaactgtgtgtcaaggaaatgaatagtggtatggccaaaaccggtctggcatataaagagcagaatcagggtttcctgtgctgtagtggtgggcgcctgttccagggctggtgccctaaatctagctccggcctgcggctcagaaaaaacgagaccaagcatagcggcgattggatctag

SEQ ID NO: 205591 - DNA, 540 bp, synthetic construct
  misc_feature 1..540: note = Description of Artificial Sequence: Synthetic coding sequence
  source 1..540: mol_type = other DNA
atgcggaccatgcgggccgtgcagctgcagatgaccatcctgacccatcatattatgaaaaagcccctgcttggcatgaaactgcggaaggatagcgagagtgcactgggtctggggattcgttctgctatgaccattagcagcaagcaggccctgtcgtatgtgtctgcattagacaatgctttagagcttacaacggttgaggatcacgttaagaatttccgcccacaatgcatagtccttacgggtggacccatgacaaggcccgctctgttagatatcactcacgctttcacaaagaactcaggtctgtgcatctgctgtgaagtgtttgtggggccacggaagctttgtgtcaaagagatgaactcagggatggcgaagaagcaggcatggctaattaagaataaaatcaaagctttttacgctgcagtcgcagccgattgctttcgtgacggcgtgcgcagtctcctgcaggcctccggtttaggaagaatgaagccaaacaccctcgtgatcggttataaaaaaaattggtag

SEQ ID NO: 205592 - DNA, 3300 bp, synthetic construct
  misc_feature 1..3300: note = Description of Artificial Sequence: Synthetic coding sequence
  source 1..3300: mol_type = other DNA
atgagcctgaacaacagcagcaacgtgttcctggacagcgtgcccagtaacacaaacaggtttcaggtgagcgtgattaatgaaaaccacgagtcctccgctgctgccgatgacaataccgatcctccccactacgaggagacttcttttggcgacgaagcgcagaagagactgcgcataagttttaggccggggaatcaggagtgctacgacaactttttgcagtccggagagactgccaaaaccgatgcttcttttcacgcctacgactcccatactaacacctactatctgcaaacgttcggtcacaatacaatggatgccgtacctaaaatagaatactacagaaacactggaagcatctctggacccaaagtcaaccgcccctctctcctcgagatccatgagcagttggccaagaacgtggcggtcaccccatctagtgccgatagagtggccaatggagacggcattcctggggatgaacaggccgagaataaagaagatgatcaggcaggtgtagtgaaattcggatgggtgaagggcgtgcttgttaggtgtatgctgaacatctggggagtgatgttattcatccgcctgtcctggattgtgggagaagctgggattggcctcggagtcctgatcatactactttcgacaatggtcacttcaattaccggtctgtccacctctgcaattgccaccaatggctttgtgagagggggcggggcctattatctgatttctcgcagtttagggcccgaatttggcggttctattggccttattttcgccttcgccaacgcggtcgccgttgcaatgtacgtggttgggtttgccgaaacagtagttgatcttttgaaggaaagcgatagcatgatggtcgaccccaccaacgacattcgaattatcggtagtattacggttgttattttactcggtatctctgtggccggcatggagtgggaagccaaggcccaggtcatcttacttgttatactcctcattgcaatagccaacttcttcatcggcaccgtcatcccttctaataacgagaaaaaatctagaggcttcttcaattatcaggcatcgatcttcgctgagaactttgggccccgatttactaaaggcgaggggttctttagtgtcttcgcaatcttctttcctgctgcaaccggcatcctggccggagcaaatatttctggggacctggaagaccctcaggatgccattcctcgggggaccatgcttgccatatttattacgaccgtggcttacttgggggtggccatctgtgtgggagcctgcgtggttcgtgatgccactggtaacatgaacgatacaatcataagcggcatgaattgtaatggttccgccgcatgcggcttagggtatgacttctccagatgtcgccacgaaccttgtcagtacgggttgatgaataattttcaagtgatgtctatggtaagcggcttcggccctctcattacagcaggcatcttctccgctacgctgagtagcgcactcgccagtttggtctccgctccaaaggtgttccaggcactttgcaaggacaacatttacaaggccctccaatttttcgccaaagggtacggtaagaataacgagccgctgcgcggatacatccttacattcctgatagccatggccttcatcttgatcgccgagctgaacacaatcgctccaatcatttccaattttttcctggcaagctacgctctgatcaactttagctgctttcatgcgtcttatgccaagtccccgggatggagacccgcatacggaatctataacatgtgggtaagcctattcggggccgtgctatgctgtgccgtgatgttcgtcattaactggtgggcggctgtaattacctatgtcattgaattttttctatatgtctatgtaacctgcaaaaaacccgacgtaaattggggaagctctactcaggcactgtcatatgttagcgccctggataacgcgctcgaactgaccactgtggaagatcatgtcaaaaactttcgcccacagtgtattgttctcactggaggtccaatgaccagaccagccttactagatattacacatgcatttaccaaaaacagcggtctttgtatctgctgtgaggtgtttgtgggaccacgaaagctgtgtgtgaaggaaatgaattccggtatggccaagaagcaggcctggctcattaaaaacaaaattaaagcattctacgccgcagtcgccgccgattgttttagagacggagtccggtcactcctgcaggcaagcgggctgggccggatgaagccaaatacactagtcatcggctacaagaagaactggcgaaaggctccccttaccgagatcgagaactacgtggggatcatccacgacgcgtttgattttgaaattggagtagttatcgtccggattagccaaggtttcgacatctctcaggtgctccaggttcaggaggagcttgagaggttggagcaggagcggttggctctggaggctactatcaaggacaatgaatgtgaagaggagtccggtgggatacgcgggttattcaaaaaagctggcaagctcaatatcactaagaccacaccaaaaaaagatggttctataaatacgagccagtccatgcacgtcggtgagtttaaccagaaattggtggaggccagtactcagttcaagaaaaagcaagaaaaaggcacaattgatgtttggtggctgtttgatgatggagggttgaccctgctgataccatacatacttaccctgcgcaagaagtggaaagactgtaagctgcgcatttatgttggcggaaaaataaaccgaatcgaagaagagaagatcgtgatggcgagcctgcttagcaaattccgaatcaagttcgctgacattcacattattggagatatcaacattcgcccgaacaaggaatcatggaaggtctttgaggagatgatcgaaccttatcgcctgcatgagtcatgcaaggatctgactaccgccgaaaaactgaagcgcgaaacgccttggaagataacagacgcggaactggaggcggtcaaagaaaaaagttaccgccaggtgcgtctcaatgagttattgcaggagcactcccgcgcagcaaacctgatcgtgctgtcattacccgtcgcacgcaagggaagcatcagtgacctgctgtacatggcgtggcttgagatcttgactaagaacctcccgccagttctcctggttagaggaaaccataaaaacgtgcttactttttactcatag

SEQ ID NO: 205593 - DNA, 1947 bp, synthetic construct
  misc_feature 1..1947: note = Description of Artificial Sequence: Synthetic coding sequence
  source 1..1947: mol_type = other DNA
atgctgaacatctggggcgtgatgctgttcatccggctgagctggattgttggcgaagcagggattggtctcggcgtgttgataattttgctcagtaccatggtgacttcaatcactggtctctctactagcgcaatcgccacaaacggatttgtgcgcggggggggggcctactaccttattagtagatccctgggaccggagtttggaggatccataggtctgattttcgcgttcgccaatgcagttgccgtggccatgtatgttgtgggctttgcagaaactgtggtggatctgctaaaggaatccgacagcatgatggtggaccctacaaatgacatacgcatcatcggcagcattacagtggtgatcctattaggcatcagcgttgccggtatggagtgggaggcaaaggcccaagttattctcctggtcattcttctcattgctatcgccaatttttttataggtacagtgataccaagtaacaatgaaaaaaagagccgcggattttttaattaccaggcatcgattttcgcggaaaacttcggcccccgattcactaaaggggaaggcttcttttccgtgttcgcaattttctttcctgccgcgactggcatcctcgcaggcgccaatatctccggtgatctggaagacccccaggatgctatccctcggggaaccatgcttgctatctttatcaccaccgttgcatatttaggcgtcgccatctgtgttggggcgtgtgtggtccgagatgctactggtaacatgaatgacaccatcatttccggaatgaattgcaatggttcggcagcgtgtgggctaggctatgatttcagtaggtgccgtcatgagccatgtcagtacggactgatgaacaatttccaggtgatgtcaatggtgagcggttttggacccctcattactgcaggtatcttctctgccactctgtcatctgctctggcctcccttgtatccgctccaaaagtgttccaggcgctctgcaaagacaacatttacaaagccctccagttttttgcaaaaggatatgggaaaaataacgaaccgttacggggttatatacttaccttcctgattgctatggcatttattctcattgccgagttgaatactattgcccctatcatcagtaacttcttcctggcctcatatgcgctgattaatttctcttgctttcatgcttcttatgcaaagtcacccggttggagacctgcttatggcatttacaacatgtgggtatcgctgttcggtgctgttctgtgctgcgccgtgatgttcgtgattaactggtgggccgcggtgatcacttatgtgattgaattcttcctttacgtatatgtgacttgtaaaaaacctgatgtaaattggggatcaagcacccaggccctgtcctatgtttcagctctggataacgccctcgagctgaccacagtcgaagatcatgtcaagaattttagaccgcagtgtatagttttaacgggtggtccgatgacccgacccgctcttctggacatcacccacgcttttaccaagaacagcggactgtgtatctgttgtgaggtttttgtcgggccgcgcaaactgtgcgtcaaggaaatgaactccggaatggctaagaagcaggcctggctgataaagaacaaaattaaagcgttctatgccgcagtggccgccgactgttttagagacggcgtgaggtcactgttgcaggcttcgggactaggtcgtatgaagccaaatacactcgttatcggctataaaaagaactggaggaaggcaccactgaccgaaatcgagaattacgtcggtatcattcatgacgctttcgatttcgagataggcgtcgttatcgtgcgaatcagccagggttttgacattagccaggtattgcaagtgcaggaagagttagaacgcttggagtag

SEQ ID NO: 205594 - DNA, 3639 bp, synthetic construct
  misc_feature 1..3639: note = Description of Artificial Sequence: Synthetic coding sequence
  source 1..3639: mol_type = other DNA
atggagccccggcccaccgcccccagcagcggcgcccccggcctggcaggggtaggggagacaccatccgccgccgcactggctgccgctagggtggagcttccaggaaccgctgtcccctctgtgccggaagatgcggcccccgcctctcgcgatggaggcggggtacgggatgagggtcccgctgcggcaggggatggactgggtagaccattgggccccacgccttctcaatcaaggttccaagtggacctcgtgtccgagaatgctggtagggccgcggcggccgctgctgcagccgctgccgctgcagcagctgccggagctggtgcaggcgccaagcagacacctgcagacggagaagcctctggggaaagcgaaccagctaagggatcagaggaggctaagggaaggttccgagttaattttgtggaccccgctgcctcgagttctgcagaggactcgcttagtgatgccgctggagtgggggtggatggtcctaatgtgagttttcagaatggtggtgatactgtgctcagtgagggttctagcctgcatagcggtggcggaggagggagtggtcatcatcaacactattactacgacacacataccaatacctactacttacggacattcggacacaatacaatggatgccgtaccccgaattgatcactaccgccatacagccgcacagctcggcgaaaagttgctaagaccctctctagcagagttacacgacgagttagagaaggagccttttgaggatggctttgctaatggagaggagtccacaccaacgagggatgctgttgtgacatataccgccgagagcaaaggggtcgtgaagtttgggtggattaaaggcgttctggtgagatgcatgctcaatatttggggcgtcatgctcttcatcagactgagttggatcgtcggccaggcagggataggtctaagcgttctcgtaattatgatggcaaccgtagtcaccacaattactggcctgtctacctcagcaattgccacaaacggtttcgtacgcgggggaggggcatactatttgatctcccggtcactaggtcctgagtttgggggcgctatcgggctgatctttgccttcgctaacgccgtggcggtggccatgtacgttgtgggcttcgctgaaactgtggtggaactcctcaaagagcattctattctcatgatcgatgagataaacgacatccgcatcataggggccatcacagtggtgatcctgctggggatctcagttgccggtatggagtgggaagccaaggcccagatagtccttctcgttattctgctgttggccatcggtgactttgtgatcggtacatttatcccactggagtctaagaaaccaaagggctttttcgggtataagtcagaaatcttcaacgaaaactttgggcccgactttcgtgaggaagagacctttttttctgtatttgctatctttttcccggcagccacaggcatcctggcgggcgcaaacattagcggcgatctagctgacccacagtccgccatcccgaaaggaaccctgctggccattctaataacaacattggtgtatgtgggtattgcagtttcggtaggcagttgtgtggtcagagatgcaactggaaacgtgaacgacacaatcgttactgaactgacaaattgcacatcagcagcttgtaagctcaacttcgacttttcttcttgcgaaagctcaccctgttcttacggactgatgaacaatttccaagttatgagcatggttagcggctttacgcctttaatctcggcggggattttcagcgctacgctgtcctctgctctggcctcgctggtttcggcccccaaaattttccaggcactttgcaaagataatatctatcctgccttccaaatgttcgctaagggttacggaaagaataacgaacctttaagaggttatatcctgactttcctgattgctctggggtttatcctcattgcagaattgaatgtcatagcccccattatttccaacttctttctggcctcctacgctcttatcaattttagcgtcttccacgcatcactcgccaagtcccccgggtggagaccagctttcaagtactataacatgtggatcagtctgctcggagctattctctgctgcatagtcatgttcgtcattaattggtgggctgccctactgacatatgtaatcgtattggggctgtatatctatgtgacttacaaaaaacccgatgtgaattgggggtcttccacccaggcactaacctacctaaacgcgctgcagcattctatcaggcttagtggggtggaggatcatgtgaagaatttcaggccgcagtgcctcgtcatgacaggggctcctaacagcagacccgcccttctgcatcttgtgcacgacttcactaaaaatgttgggcttatgatctgtggacacgtacacatgggccctaggagacaggcaatgaaggaaatgtcaatcgatcaagccaaataccagcggtggcttattaagaacaagatgaaggctttctacgcccctgtgcacgccgacgacctccgcgagggggcacagtaccttatgcaggccgccggcctggggcggatgaagcccaacaccctggtgctggggttcaaaaaggactggttacaggccgatatgagagacgtggacatgtacattaacctattccatgatgcctttgacatccagtacggcgtcgttgtgatccgcctgaaggagggactcgacatcagtcatctgcagggacaggaagaactgctgagttctcaggaaaagtccccgggtacgaaagatgtggttgtttcagtagagtatagcaagaaatctgatctggacactagcaaaccactcagcgagaagccaattacacataaagtggaggaagaggatggaaaaaccgcaacccagcccttgttgaaaaaagaatcaaaggggcccatcgtccctctgaatgtagcagaccagaaactcctggaagcctccactcagtttcagaagaaacaggggaaaaatacaattgatgtttggtggctatttgacgatggtggtctaacgctgctgattccctacctgctgacaaccaaaaaaaaatggaaagactgcaagattcgcgtcttcatcggcggcaaaatcaatagaatcgaccacgaccggagagcaatggccacacttctgtctaagttcaggatcgattttagcgacataatggttctcggtgacattaatactaaacccaaaaaggagaatataatcgcatttgaagagatcattgagccatatcgacttcacgaggatgacaaggagcaggacattgccgataaaatgaaggaggacgagccatggcgcatcaccgacaatgaactggagctgtacaaaaccaagacataccgacagattcgccttaacgaactgctcaaggagcacagcagcacggcaaatatcatcgtgatgtctctccccgtggcaagaaagggagcagtctcatccgccctgtatatggcatggttggaggctctgtcgaaggacctcccacccattctcttagtacgcggtaatcatcaatcggtcttgacattctacagttag

SEQ ID NO: 205595 - DNA, 3591 bp, synthetic construct
  misc_feature 1..3591: note = Description of Artificial Sequence: Synthetic coding sequence
  source 1..3591: mol_type = other DNA
atggagccccggcccaccgcccccagcagcggcgcccccggcctggctggggtcggtgaaacaccatccgctgctgccttagcggccgccagagtggaactgccgggcactgctgtgccctccgttcccgaagacgcggctcccgctagccgcgatggaggcggcgttagagatgaaggcccagctgctgccggggatggactggggcgtcctttaggaccaacaccatctcagagccggtttcaggtggacctggtctcagaaaacgccggtagggctgcggccgctgctgcggcagccgccgccgccgctgccgccgccggtgctggggcgggtgccaaacagacccctgccgatggggaggcttctggggagtccgagcctgccaagggaagcgaggaggctaaagggagattcagggtgaacttcgtggatccagccgcaagctcctccgccgaagactctttatccgacgccgccggcgtaggcgtcgatggccccaatgtaagtttccagaacggtggtgacacagtcctctccgagggttcgtcactgcactccggcgggggaggcgggtctgggcaccatcagcactattattacgatactcatacaaacacctattacctgagaacctttggccacaacactatggatgccgtgcctcggatcgatcactataggcatacggccgcccagctcggcgaaaagttgttgcggccgtctctggctgagctacatgacgagctcgaaaaggaaccattcgaagacgggtttgccaacggggaggaatcaactcccactcgcgatgctgtggttacttacacagcggagagtaagggcgttgtcaagtttggatggatcaagggtgtcctcgtccgctgtatgttgaacatttggggcgtgatgctcttcatcagactgtcctggattgttggccaggccggaatcggactctctgtgttggtaatcatgatggccacggtggttactaccattactggattgtccacctcggccattgctacaaatggcttcgtgagaggcgggggtgcttactatctgatatctcgctcgctggggccggagttcggaggggctatcgggcttatctttgcattcgcaaatgctgtggccgtggccatgtatgtcgttggatttgcagaaactgtggtggaactgttgaaggaacactctatcctgatgattgatgagatcaacgatatacgcatcatcggcgccatcactgtggtgattctgctagggataagcgtggccggcatggagtgggaagcaaaggcccagattgtgctactggttattctgctgttagccataggcgatttcgtgatcggtacttttatcccgctggagtctaaaaaacctaagggtttcttcggctataaaagtgaaatttttaatgagaacttcggcccagactttcgggaagaagaaactttcttctctgtcttcgctattttcttcccggcagcgacaggaatcctggcaggtgctaatattagcggggacctggctgatcctcagtccgccatccctaaaggcacattgttggcaattctgatcacaaccctggtctatgtcggaatcgccgtgtcagttggctcctgcgtggtacgggacgctacaggcaatgtcaatgacacaatcgttactgagctgaccaactgtacgagtgccgcttgcaagttgaactttgatttcagctcatgtgagagtagtccttgctcctacggactgatgaataacttccaggtgatgagtatggtaagcggtttcaccccgcttatctcggctggaatcttcagtgccacacttagttccgccttagcaagtcttgtatctgcacctaagattttccaggcactctgcaaagataatatttatcccgctttccagatgttcgctaaaggctatggaaaaaataacgaacctctcagagggtacattctgacgtttctgatcgccctaggctttattctgatcgccgaactgaacgtgattgcccctatcatttccaatttcttcctcgccagctacgcgctaatcaacttctcagtctttcacgcatccctggctaaatccccggggtggcggcctgcgtttaaatattacaatatgtggattagtctgttgggcgcgattctgtgttgcatagttatgtttgtgattaattggtgggcggccttgctgacttacgttattgtcctcgggctgtacatctacgtgacttacaaaaaaccagatgtaaattggggaagctctacacaggcgctgacctatttaaacgccctgcaacatagcattagactgtccggcgtagaggaccatgttaaaaacttcaggcctcagtgtttagtaatgaccggcgctcctaattcccggcccgccctccttcacctcgtgcacgacttcactaagaatgtagggctgatgatctgtggtcacgtgcatatgggacccagaaggcaggcaatgaaagaaatgtcaattgatcaggctaagtatcaaagatggcttattaaaaataagatgaaagcattctatgctcccgtgcacgcagatgacctccgggaaggagcccagtacctgatgcaggccgcaggcctgggccggatgaagcctaatacactggtgcttgggttcaagaaggattggttacaagccgatatgagggatgtggatatgtacattaacctgttccacgacgctttcgatatccagtacggagttgtcgtaatacggcttaaggagggactggatatctcccacctgcagggccaagaagaattactgtcctcacaggaaaaatcgcctgggacgaaggacgtggtggtcagtgtagagtactccaagaaaagcgacctggatacaagcaaaccactgtctgaaaaacctatcacacacaaagagtcaaagggccccattgtgccgctgaacgtcgctgatcagaagttactggaagccagtactcagttccagaagaaacagggcaaaaacacaatagacgtgtggtggttgttcgatgatggtggactgacgctgctgataccttacttgctgaccacaaaaaagaagtggaaggattgtaagatacgggtcttcatcgggggaaaaattaatagaatcgatcacgatcgaagagccatggctactttgctgtccaaatttcgcatcgattttagcgatatcatggttttaggggacatcaatactaaaccaaagaaggagaacattatagcctttgaagagataatcgagccctacaggttacatgaggatgataaggaacaggacatcgcagacaagatgaaggaggacgaaccctggagaatcacggataatgaactggagctgtacaaaacaaagacatataggcagattcgcttaaacgagctcctgaaagaacatagctctacagccaacataattgtgatgtctctcccggttgcaaggaaaggtgcggtctcctcagcactgtatatggcatggctcgaagctctctctaaggacttaccacctatcctgttggtacgcgggaatcatcagtccgtcctcacattctatagctag

SEQ ID NO: 205596 - DNA, 1788 bp, synthetic construct
  misc_feature 1..1788: note = Description of Artificial Sequence: Synthetic coding sequence
  source 1..1788: mol_type = other DNA
atgaagttcttcagctacatcctggtgtaccggcggttcctgttcgtggtctttacagtgctggtccttctgccgctccctatagtgctacatacaaaggaagcagagtgcgcttatacgctctttgtggtcgctacattctggctgacggaggcactgcctctgagcgtcactgcactcctccccagcctgatgcttcccatgttcggaatcatgccgagtaagaaggtggcatccgcatacttcaaagattttcacctgctgctcatcggcgttatctgcttagctacttcaattgaaaagtggaacctccataaaagaatcgcgttgaaaatggttatgatggtaggagtgaacccagcctggctcacactcggcttcatgtcttccaccgcttttctttccatgtggctctccaatacatcaacagcagccatggtcatgcctatagcagaagccgtagtgcagcagataatcaatgcagaggccgaggttgaggccacacagatgacatatttcaatggcagcacaaaccacggcctcgaaatcgatgagtccgtcaacggacacgagataaatgaaaggaaagagaaaaccaagcccgtgccgggctataacaatgacacaggaaagatatccagcaaagtcgagcttgagaaaaattccggcatgcggaccaagtatcggaccaaaaaagggcacgtcacaagaaaactgacctgtttatgcatcgcttattctagtactattggcggccttaccaccatcaccggcacttccacaaacctcatcttcgctgaatactttaacacccgctacccggattgccggtgcctgaattttggaagttggtttacgttcagtttcccggccgcgctcatcattctgttgttaagctggatatggctgcagtggctcttcctggggtttaacttcaaggaaatgttcaaatgcgggaaaaccaagactgtgcagcagaaggcttgcgccgaagtgattaagcaggagtatcagaaactgggcccgattcgctaccaggagatcgttacattggtattgttcattattatggccctgctgtggttctcacgcgatccaggctttgtacccggctggtccgccctgttctccgaatatcctggcttcgccaccgatagcactgtggccctgcttattggattactcttttttttgatcccagccaaaacgctcacgaaaacaacgcctacgggcgagatagtggccttcgactatagtccactgattacatggaaagaatttcagtcttttatgccctgggacatagctattctggtggggggtggcttcgctctggcagatggatgtgaagagtctggcctgtccaaatggatcggaaacaaactctctccattaggatccctgcccgcttggctgattatcttgatctcatctctgatggtcacttcccttacagaagttgcatcaaaccctgcgacaatcaccctgttccttccaatccttagtccactggctgaggcaatccatgttaatcccctctatattctcattccttcgaccctctgcacctcattcgcctttttgcttcccgtagctaatccaccgaatgccatcgtgttctcttacggacatcttaaggttattgatatggtcaaggccggactcggggtgaatatcgtgggcgtcgccgttgtcatgctggggatctgtacttggatagttcctatgttcgacctgtacacctacccctcctgggctccagccatgtctaatgaaactatgccgtag

SEQ ID NO: 205597 - DNA, 486 bp, synthetic construct
  misc_feature 1..486: note = Description of Artificial Sequence: Synthetic coding sequence
  source 1..486: mol_type = other DNA
atgctgcccatgttcggcatcatgcccagcaagaaggtggccagcgcttactttaaggatttccacctgctgctgatcggtgtcatctgcctggctacgtctatcgaaaaatggaatttgcacaagcgcatagccttgaaaatggtgatgatggtcggagtgaacccagcctggctgacgctgggctttatgagctccaccgcattcctaagcatgtggctgagtaataccagtactgcggccatggttatgcccattgcggaagccgttgtgcagcagattatcaacgcagaggctgaagtggaggccacacagatgacatactttaatggctctaccaaccacggcctagaaatcgatgagtcagtgaacgggcatgagatcaatgaaaggaaagaaaaaactaaacccgtgcccggctacaacaatgatacaggaaagatcagttccaaggtggaattggaaaaatacctccaagtgaggtag

SEQ ID NO: 205598 - DNA, 1881 bp, synthetic construct
  misc_feature 1..1881: note = Description of Artificial Sequence: Synthetic coding sequence
  source 1..1881: mol_type = other DNA
atgggcctgctgcagggcctgctgcgggtgcggaagctgctgctggtcgtgtgcgtccccctgctcctgctcccactccccgttctccatccatcctccgaggcttcctgtgcatatgtgttaatcgttactgccgtgtattgggtgtccgaagcggtacccctcggggcggcagccctagtcccagcatttctgtaccccttcttcggcgtgctgcgcagcaatgaagtggccgccgagtacttcaagaacacaactctgctcctggttggagtaatctgcgttgccgccgccgtggagaagtggaatctccataagcgaattgcactgcggatggttttgatggccggagccaaacctggaatgctgcttctgtgcttcatgtgctgtactacacttctgtccatgtggctcagcaacacttccacgaccgcgatggtaatgccaatcgtggaggccgttcttcaggagctggtgtccgccgaggatgagcagttggtggctggtaactcgaataccgaggaggcagagccaatcagtctggacgtgaagaactcccagccaagcctggagctaatctttgtgaacgaagagtcgaatgctgaccttaccactctgatgcataacgaaaatctgaacggtgttccttctataactaaccccattaagacagccaatcaacatcagggcaaaaagcagcacccctctcaggagaagcctcaggtcttgacccctagccctcggaaacaaaagctaaatcgaaaatacaggagccatcacgatcagatgatctgtaaatgtctctctctgtcaatttcttatagtgctacaatcggtggtctgactaccatcatcggtactagcacaagtctgatattcctggagcactttaacaaccagtaccctgccgctgaagtggtcaacttcgggacttggtttttattctcctttcctatatccttgattatgttggtggtgtcctggttctggatgcattggcttttcttaggttgtaacttcaaggaaacatgctctctgtcaaaaaagaagaaaaccaagcgagagcagctctcagaaaagcgtatacaggaagaatacgagaagttgggagatatttcctatccggagatggtgaccgggttctttttcattctcatgactgttctgtggttcacacgcgaaccaggcttcgtgcctggctgggactcattcttcgaaaagaaagggtatcggacagatgctaccgtgagtgtgtttcttggcttcctactctttttgatccctgctaaaaagccctgttttgggaaaaagaatgatggcgagaatcaggagcactctctgggcacggagccaatcattacctggaaggactttcagaagaccatgccctgggaaattgtcatcttggtgggcggtggttacgccctggcgtcaggttccaagtcgtctgggctaagcacttggatcggaaatcagatgctgtctctgtcaagcctgcccccttgggccgtgactttactcgcctgcattctggtaagcattgtcaccgagtttgtgtccaatcccgctactattactatttttctgcccattctttgtagtcttagcgagactctccacatcaaccctctctataccctgatcccagttactatgtgcataagcttcgctgtcatgctgccggtggggaaccctcccaacgcaatcgtgttcagttacggccattgccagattaaagacatggtcaaggcaggactcggcgtaaacgtgatcggcctcgtgattgtcatggttgctatcaacacctggggggtatcattgttccacttagacacctaccccgcctgggcacgggtgtccaacattaccgaccaagcttag

SEQ ID NO: 205599 - DNA, 1569 bp, synthetic construct
  misc_feature 1..1569: note = Description of Artificial Sequence: Synthetic coding sequence
  source 1..1569: mol_type = other DNA
atggccagcgccctgagctacgtgagcaagttcaagagcttcgtgattctgttcgtaacacctctccttcttttgccacttgtaatcctgatgcctgccaagtttgtgcggtgtgcctacgtgatcatcctcatggcgatctattggtgcactgaggttatcccactcgcagtcaccagcctcatgcctgtcctcctattcccactgtttcagattcttgatagtcgacaggtgtgcgtgcagtacatgaaggacactaacatgctgttcctcgggggcttgattgttgccgttgcggtagagcggtggaatctccacaagagaattgcactgaggactctgctgtgggtaggggccaaacccgctaggttaatgttagggtttatgggcgtcacagcactactctctatgtggatttctaacaccgctaccacagccatgatggttcctatagttgaagcaattctgcagcagatggaagccacctccgccgctactgaggccgggctcgaactggtagacaaggggaaggctaaagaactcccaggctcccaggtcatcttcgagggacctactctgggccagcaagaggaccaagagcgcaaacgcctctgcaaagctatgacactttgcatctgctatgccgcaagcattggcgggactgccacactgacaggtacaggaccaaacgttgtgctgctggggcagatgaatgaactcttccctgatagcaaagacctcgtaaacttcgcttcctggtttgcctttgcatttcccaacatgctcgtgatgctcctgtttgcctggctctggctacaatttgtgtacatgcgcttcaattttaaaaagtcctggggttgcggacttgagtcaaagaaaaatgagaaagccgctctaaaagtgttacaggaggaatatcggaagctggggccactttcctttgcagagattaacgtgctaatatgtttttttctgcttgtcatcctttggtttagtcgcgaccccggctttatgcccggatggttgacagtcgcttgggtcgagggagaaacgaagtacgtgtccgatgctacggtcgcaatcttcgtcgcaacattgctgtttatcgtcccttcacagaagcccaagttcaatttcaggagtcaaacagaggaagaaaggaaaacccctttttatccccccccactcctggattggaaagtgacacaggaaaaggtcccgtggggcattgtgcttctacttggaggcggctttgcgctggctaaggggtcggaggccagcggcctgtcagtgtggatgggcaaacaaatggaaccactgcatgcagttccccctgccgccatcacgctgatcttgagcctcctcgtggccgttttcacagaatgcacatccaacgtcgccacaacaacactgttcctccccattttcgctagcatggttaagactggcgtgatcatgaatataataggtgtattctgtgtgtttcttgctgtgaacacgtgggggcgagctatcttcgacttggatcatttcccagattgggcaaatgtaactcatattgaaacatag

SEQ ID NO: 205600 - DNA, 1707 bp, synthetic construct
  misc_feature 1..1707: note = Description of Artificial Sequence: Synthetic coding sequence
  source 1..1707: mol_type = other DNA
atggccagcgccctgagctacgtgagcaagttcaagagcttcgtgatattgtttgtgactcctctcctccttcttccacttgtgatcttaatgcccgccaagtttgtcagatgtgcctatgtcattatattgatggcaatatattggtgcacagaggtcatccctctcgccgtaacttctttgatgcctgttctgctcttcccattatttcagatactagacagtcggcaagtgtgcgtgcaatatatgaaagatactaacatgctgtttttgggaggactgattgtggctgtagcagttgagcggtggaatcttcacaagagaatcgctctgcgcacactgctatgggttggtgcgaagccagccagactaatgctgggctttatgggcgtgactgcgcttttaagcatgtggatctcaaacacagctacaaccgcgatgatggtgccaattgtggaggcaatccttcagcaaatggaagccaccagcgcagccaccgaggcagggctggaactcgtcgataagggcaaggctaaagagctgcctggtagccaggtcattttcgaaggccccactctgggtcagcaagaggaccaggaaagaaagaggttatgcaaggctatgactctgtgcatctgttacgctgccagcattggcgggaccgcaacactgaccggaaccgggccaaacgtggtgcttctgggtcagatgaatgagttgttcccggattcaaaagatctggtaaactttgcatcgtggttcgcatttgcgtttccgaatatgctggtgatgctgctattcgcgtggttgtggctgcaatttgtttatatgagatttaatttcaagaagtcatggggttgcggcctcgaatcaaaaaaaaacgaaaaagctgcccttaaggtgctgcaggaggagtatagaaagctgggacctctttccttcgcggaaatcaatgtgctcatttgtttttttctgctggtaattttatggttctcccgggaccctggttttatgcccggatggttgaccgtggcgtgggttgagggggaaacgaaatacgtgagcgacgccacggtcgccatcttcgttgcaactctcctttttatagttccatcacaaaagcccaaatttaatttccggtcccagaccgaagaggaacggaagacgccattttatccccctccactcctggattggaaggtgacacaagaaaaagtgccttggggtattgtattgctgcttggcgggggattcgcccttgccaagggcagcgaagcatcaggtctgtctgtgtggatgggaaagcagatggaacccctccatgccgtcccccccgccgccataactctgatcctgagcctgctcgtggccgttttcacagagtgtactagcaacgtggccactaccacactctttcttccaattttcgctagcatgtcgcgctctattgggctgaatccactctacataatgcttccatgcaccctctccgcatcctttgcattcatgctgcccgtggcaactccccctaacgctattgtatttacctacgggcatcttaaagttgcggacatggtgaaaactggggtgatcatgaatattatcggggtcttctgtgtattcttagctgttaatacctgggggagggccatttttgatctggaccatttccccgattgggcaaacgtgactcacatagagacgtag

SEQ ID NO: 205601 - DNA, 1578 bp, synthetic construct
  misc_feature 1..1578: note = Description of Artificial Sequence: Synthetic coding sequence
  source 1..1578: mol_type = other DNA
atggccagcgccctgagctacgtgagcaagttcaagagcttcgtgattttgtttgtcacaccattgctgctcctacctcttgtgatactgatgccagctaaagtgtgcgtacaatacatgaaagatacgaacatgttatttctggggggcctcatcgtagcagtggctgtggagcgatggaatctgcacaaacgcattgcgcttcgcaccttgctgtgggtgggcgctaaaccagcaagactgatgttagggttcatgggagtcaccgccctgctcagcatgtggatcagcaacaccgccacaaccgcaatgatggttccaatcgttgaagctatcctgcaacagatggaggctacttctgcggcgactgaagccggcttagagttggtggacaaaggaaaagctaaagagctgcccgggtcccaggtgatctttgagggcccgacccttgggcagcaggaggaccaggaaagaaagcgcctttgcaaagccatgacactctgcatttgttacgctgccagcattggtggcacagccaccctgacaggcaccggcccaaacgtcgtactgctgggtcagatgaatgaactatttccagacagtaaagacttggtcaactttgcatcttggttcgcgtttgccttcccgaatatgctggtcatgttattgttcgcatggctctggcttcagttcgtatacatgcgatttaatttcaaaaagtcatggggttgcgggttagaatctaaaaagaatgaaaaggccgccctcaaggtcttgcaagaagagtacaggaagctgggcccactgtcatttgcagaaattaacgtgctgatctgtttcttcttactggtgatcctctggttttcccgggaccctgggtttatgcctggctggctgaccgtcgcttgggttgagggagagacaaagtacgtcagcgacgcaaccgtagccattttcgtagctacactgttgttcatcgtacccagtcagaaaccaaagtttaacttcaggtctcaaaccgaagaggagaggaagacgccattctatccacctcccctgttggactggaaggtcacacaagaaaaggttccatggggcattgtcctgctcctcggtggcggcttcgctctcgccaaagggtccgaagcaagtgggttatccgtctggatggggaagcagatggaaccactccacgctgtgccccctgctgcaattaccctgattctgtccctgctggtcgccgtgtttacagagtgtacatctaacgtggccactaccacactgtttctgccaatatttgcttccatgagtcgcagcatcgggctgaatcccctctatatcatgctaccatgtacacttagcgccagctttgccttcatgcttcctgtggcaactcccccaaacgcaatcgtcttcacatatggccatctgaaggtagcggatatggttaagactggcgttatcatgaatatcattggagttttttgtgtgtttctggccgtcaatacctggggtagggctatattcgacttggaccactttccagattgggcaaacgtcacccatatcgagacttag

SEQ ID NO: 205602 - DNA, 1569 bp, synthetic construct
  misc_feature 1..1569: note = Description of Artificial Sequence: Synthetic coding sequence
  source 1..1569: mol_type = other DNA
atggccagcgccctgagctacgtgagcaagttcaagagcttcgtgatactattcgtgaccccactgctcctgctgcctttagtgatactgatgcccgctaagtttgttagatgcgcctatgttatcatcttgatggccatttattggtgcactgaggtcatacccctggcggtgacctctttgatgccggtgctgctcttccctctgttccagatactggatagccgccaagtgtgtgtgcaatacatgaaggacaccaatatgctctttctcggcggactgatcgtggcagtggcggtggagcggtggaacctgcacaagcggatagcgctgcgtaccttgttgtgggtgggagctaagccggctcgcctgatgttgggttttatgggcgttaccgccctcctgagcatgtggataagtaataccgccacaaccgccatgatggtgcccattgtggaggctatccttcaacaaatggaggcaacttctgctgcaaccgaggctggattggaactggtcgataaaggaaaagcaaaggaactgccagggtcccaggttatttttgagggacctacacttgggcagcaggaagaccaggaaaggaaaaggctgtgtaaagccatgacactgtgtatctgctatgctgcttctatcgggggaaccgctaccctcactggcaccggacccaacgtggtcctgcttgggcagatgaatgaactgttccccgactcaaaggacctagtgaatttcgcatcttggttcgcatttgccttccccaacatgctggttatgcttttgtttgcatggttatggctccagtttgtctatatgcggttcaattttaagaagtcgtggggctgcggcctggaaagtaaaaagaatgagaaggcagcccttaaagtcctgcaggaggagtaccggaaattaggtccccttagcttcgcagaaatcaacgttctgatctgtttcttcctgctggtcatcctctggttctcgcgggaccccggtttcatgccgggatggttgaccgtagcttgggtggagggagagactaaatatgtttctgacgccacagtggctatcttcgtcgctacgctactgtttatagtcccatcccagaagccgaagtttaacttccgaagccagaccgaagaggagcgtaagacccccttttatccaccccctctgctcgactggaaagttactcaggagaaggtcccatggggcatagtgctgttgctggggggcgggttcgcactcgctaaaggaagtgaagcatcggggctgtctgtatggatgggcaaacaaatggagccactccacgcggttccgcctgctgcgattactcttatcctcagtttactggtggccgttttcaccgagtgcacgagtaacgtcgctacaaccacactctttctacctatcttcgcttccatggtcaagacaggcgtgatcatgaatataatcggggtgttttgtgtgtttttagccgtgaatacctggggaagagctatctttgacttggaccacttcccagattgggcgaatgttacccacattgagacgtag

SEQ ID NO: 205603 - DNA, 1779 bp, synthetic construct
  misc_feature 1..1779: note = Description of Artificial Sequence: Synthetic coding sequence
  source 1..1779: mol_type = other DNA
atggccacctgctggcaggccctgtgggcctaccggagctacctgatcgttttcttcgtacccatcctactattgcctctgccaatactagtccccagtaaggaagcttactgcgcatacgccattattctgatggcactgttctggtgcacagaggccctgccactggcagtaacagccctgttcccactgatcctgttcccaatgatgggcatagtagatgcctccgaagtggcagtggagtacctgaaagattccaaccttctgtttttcggcggattattggtggccatcgcggtggagcactggaacctgcacaaacggatcgcattacgagtgctgttgatcgttggcgtacggcccgcccctctgatcctaggatttatgttggtcacggcatttctgagtatgtggataagtaatacagccacatccgccatgatggtgcctatcgcccacgctgtgctcgatcagttacactcatcacaggcctcctccaacgtggaggaggggtcaaataatccaacctttgaacttcaagaaccttccccacaaaaggaagtcactaaactagataacggtcaagcacttccggttacctctgcatcaagcgaaggtagagctcacctgagccagaaacatctgcaccttacacagtgtatgagtctgtgtgtttgctacagtgcttccatcggcggcattgccacactcacgggaacagcgccaaacctcgttctgcagggtcaaattaacagcttatttccccagaatggcaacgttgttaactttgccagctggtttagcttcgcttttcccacgatggtgattcttttgctcttagcctggctgtggctgcagatcttattcctgggttttaacttccgaaaaaactttgggattggcgagaagatgcaggaacagcagcaggcagcatactgcgtgatccaaacagaacataggctcctgggacccatgacattcgccgagaaggcgattagtatcctgttcgtgatcctggtactgctgtggtttacacgggagccggggttcttcctgggatggggcaacttggcattccctaacgcgaagggtgagtcgatggtcagcgatgggaccgtggcaatctttatcggaatcattatgtttatcattccaagcaaatttccgggactgacgcaggatcctgaaaaccctggcaagctgaaggcgcccctgggcctgctggattggaagactgtaaaccagaaaatgccttggaacattgtcctgcttctgggcgggggttatgctctggccaaagggtctgagcgtagtggactgagtgagtggcttggtaataaattgacgccactacagagcgtcccagcgccagccattgctattattctgagtttgctcgtcgccactttcaccgagtgcacctcaaacgtggccactaccacaattttcctgccaatcctggctagtatggcacaggccatatgccttcatccactctatgtaatgcttccctgtaccctggctacatctctggccttcatgttgcccgtggccactcctccaaacgccatcgttttttcgtttggagatttgaaggtcctcgatatggcccgagccgggtttctgcttaatatcatcggggtgctgatcatcgccctggcaataaattcatggggaatacctttattcagcctccattctttcccatcctgggcccagagtaatactaccgcccagtgtcttccttcacttgctaacacaacaacgccctccccatag

SEQ ID NO: 205604 - DNA, 1926 bp, synthetic construct
  misc_feature 1..1926: note = Description of Artificial Sequence: Synthetic coding sequence
  source 1..1926: mol_type = other DNA
atggccacctgctggcaggccctgtgggcctaccggagctacctgatcgtcttctttgtcccgatcttgttgctccccctcccaattctcgttccttcaaaggaggcatactgtgcttacgctattattcttatggccttattctggtgcacagaggccttacccctggcagtgacggcattgttccccttgattctgtttcccatgatgggcattgtggacgcctcagaaatcatacaacgacctttccccagctcatttgagtcccccggagagtgccaatccgtgggaatgagcgtcaccgcttcccacaatctagggggcactgtgggtgactctagagtgtttccacctctctcacatgtcagcacgtgccaggtggctgtagaatacctgaaggacagtaatctcctattttttggtggcctgcttgtcgccatcgctgtcgaacactggaatctccacaagcgcatcgcgctgcgggttctgttgatcgtaggcgtccgtccagcccccctgatcctgggattcatgctggtgacagcttttctgtcaatgtggatcagcaataccgcgacttcagcaatgatggtacccatcgcgcacgctgtgctggatcaactgcattcttcccaggcatcttccaacgtggaagagggttcaaacaatcccacatttgaattgcaggagccttcaccacagaaagaagtgacaaagcttgacaacggccaggctctgcctgttacatctgcctcctctgaaggaagagcacacctcagtcaaaaacatctgcatttaacacaatgtatgtctttgtgcgtatgctacagcgcgtccattggcggcatcgcaaccctaactggaactgcccccaatctggtcctgcagggacagatcaactccctgttcccccagaacggcaatgtggtgaactttgccagttggtttagttttgctttccccaccatggttattcttctgctgctcgcgtggctgtggctgcagatcctcttcctggggtttaactttcgcaagaattttggcattggtgagaagatgcaggagcaacagcaggccgcctactgtgtaatacagacggaacaccggttgcttggacccatgacattcgccgaaaaggcaatatccatcctttttgtgatactggtgctgttgtggtttactagggaaccggggttcttcctgggctggggtaatctggcgttccctaacgccaaaggggaatctatggtttccgatggtactgttgctatttttattggaattatcatgttcataatcccctctaaatttcccggattgacacaggacccggagaatccagggaaactcaaagcaccgctcggactgttggattggaaaactgtcaatcaaaaaatgccttggaatattgtgctcctgctaggagggggttacgccttggcaaaaggatccgaacgaagcggtttaagcgagtggttgggaaacaagctcacccctctacagagcgtgccagcccctgccatagcgattatactgtctctgctggtagcaacattcactgagtgtacatcaaatgtggcgactaccactattttcctccctatccttgcatctatggcacaggcaatatgtctgcaccccctctatgtgatgctaccatgcaccctggcaacttcactggcctttatgctcccagtcgccacaccccctaacgctatcgtgttcagttttggcgacttgaaagtactcgacatggcacgtgccggctttctcctcaatatcattggcgtgttaattattgccttagctatcaactcatggggaattcctcttttttccctccattcctttccatcctgggcccagtcaaatactactgcccagtgcctcccatccctcgctaacactactactccaagcccttag

SEQ ID NO: 205605 - DNA, 1566 bp, synthetic construct
  misc_feature 1..1566: note = Description of Artificial Sequence: Synthetic coding sequence
  source 1..1566: mol_type = other DNA
atgcccgtgtgcggcaacgtggccgtggagtacctgaaggacagcaacctgcttttttttggcgggctgctggtggcaatcgctgtcgaacactggaatctgcacaagcgcatcgcactccgggtactgctaatcgtcggcgtgcgccctgctccgctgattctgggattcatgctggttactgcatttctatcgatgtggatctctaataccgccacgtctgctatgatggtgccaatcgcccacgccgtcctggaccagttgcactcctcacaagccagctccaacgtcgaggaaggatcgaataaccccacgtttgagctccaggagccaagtcctcagaaagaagtgactaagctggataacggacaggctctccccgttacgagcgccagcagtgaggggcgcgcacatcttagtcagaagcaccttcatctgacacagtgcatgtccctgtgtgtttgttacagcgcgtccatcggtggaatagctactctcactgggacggctccgaatcttgtcctccagggccagataaacagccttttccctcagaacgggaacgtggtcaatttcgcctcctggttttccttcgcatttccgactatggtcatcctgttgctcttagcttggctctggctccagatcctgtttctggggtttaacttcaggaaaaatttcggtattggcgagaagatgcaggagcagcagcaggcagcctactgtgtgatccagaccgagcatcgtctgctcggcccaatgacattcgccgagaaagcaattagcattctgttcgtcatcctggtcctgctgtggtttacgagggagcccggcttttttcttggctggggaaacctcgcatttcctaatgcaaagggtgagtcaatggtgtcagatgggacagttgctattttcatcgggatcattatgttcattatccccagcaagtttcccggattgacccaggatcccgaaaaccccggaaagctcaaggcccccctggggctgctggattggaagacggttaaccaaaagatgccctggaatattgttctgctgctaggcggggggtatgcactcgcgaaggggtcagaacgatccgggttgtcggagtggctgggtaataagcttacacccctgcagtctgtcccagcccccgctatagcaatcatcttatctctcttagtcgctacgttcaccgagtgcacttccaatgtggccaccacaacaatctttctccccatacttgcatcaatggctcaggccatctgcttacaccctctgtacgtgatgctgccttgcaccctagctacttctctggcgtttatgctcccagtcgccactcccccaaacgccatcgtattttccttcggggacctaaaggtcctagacatggcccgtgccggattcctgttgaatataatcggcgtgctgatcattgctttggcaattaactcttggggcattcctttattctccctgcacagcttcccctcatgggcacagtccaataccactgcccagtgtcttccatctctggcgaacacgaccaccccctcaccctag

SEQ ID NO: 205606 - DNA, 1035 bp, synthetic construct
  misc_feature 1..1035: note = Description of Artificial Sequence: Synthetic coding sequence
  source 1..1035: mol_type = other DNA
atggccctgttctggtgcaccgaggccctgcccctggccgtgaccgcacttttccccctgatcttattcccaatgatggggatagttgacgcctcggaagtggccgttgaataccttaaagacagcaatctgctcttttttggaggactgctcgtggcaatcgcagttgagcactggaacctgcataaacggatagcccttcgagtgttactgattgtcggcgtgcgcccagcgcccctgattctgggatttatgctggtcacagcatttctttcaatgtggatttcaaatactgccactagcgcaatgatggtcccaattgctcatgcggtgttggatcagctgcactcctctcaagcttctagcaacgtcgaagaggggagcaacaatccaacatttgagctgcaggaacccagtccccagaaggaagtcaccaaactagacaatggtcaggcactccccgtcacaagtgcctcttccgaagggcgcgcccacttgagccagaaacacctgcaccttacccagtgcatgtccctgtgcgtttgttattctgcaagcatcggcggaatcgccactcttaccgggaccgcccctaacctggttctgcaggggcagatcaactcactctttccccagaatggtaacgttgttaatttcgcctcgtggttcagttttgcgtttcccaccatggtaattttgttgttgctggcttggctatggctgcagattctgttccttggcttcaatttcaggaagaactttggcattggagagaaaatgcaggagcagcaacaggccgcatactgtgtcatccagactgagcacaggttactgggaccaatgacatttgccgaaaaggcgatttccatattgttcgttatcttagtactgctgtggttcaccagggaaccaggattcttctggctgggtcagtttggattctcacaatgtcaaggcggagaagtgagagtggctggggtcggaagacgaacgcatttgggcctcacgtgttcagggaggagagaaggctattag

SEQ ID NO: 205607 - DNA, 1650 bp, synthetic construct
  misc_feature 1..1650: note = Description of Artificial Sequence: Synthetic coding sequence
  source 1..1650: mol_type = other DNA
atggccacctgctggcaggccctgtgggcctaccggagctacctgatagtgtttttcgtgcccatcttgctgctgcccttgcctatcttggtaccgagcaaggtcgccgtagaatatctcaaggattcgaatttactgtttttcggggggctcttggtggcaatcgccgttgaacactggaatcttcataagcggatcgccttgcgtgtgctgttgatcgtcggagtgcggccagctcccttgattctggggttcatgctggtcacggcatttctgtccatgtggatctccaacaccgccacatccgccatgatggtgcccattgcccacgccgtgctggatcagctccactcgtctcaggcctcatccaatgtcgaggaagggagcaacaacccaacttttgaactgcaagaaccctccccacagaaggaagtgaccaagctcgataatgggcaagccctgccagttacatcggcctcatcggaaggcagggcccatctgtctcaaaagcacctgcatctgactcagtgcatgagcttatgcgtgtgttattcagcaagcatcggtggcatcgctactctgactggaaccgcaccaaatttagttctacaaggccagatcaattctctgttcccccaaaatggcaacgttgtcaactttgcttcttggttttcctttgccttcccgacaatggtgatactcctcctgttggcatggctgtggctgcaaattcttttcctgggctttaatttccggaaaaactttggcatcggcgagaaaatgcaggagcaacagcaggcagcctactgcgtgatccagaccgaacacagacttctgggacctatgactttcgcggaaaaagctatatctattctatttgtcattctggtgcttctctggttcacaagagagccaggattcttcctcggttggggcaacttggccttccccaatgctaaaggggaaagcatggttagtgacggcacagtcgctatcttcatcggaatcataatgttcattattccgtcaaagttcccgggtctgacacaggacccagagaaccccggtaagctaaaggcccctctgggtctcctggactggaagactgtgaaccagaaaatgccttggaacatcgttctcttactgggcggagggtatgcactcgccaaaggttcggagagaagcggtctcagtgaatggttaggcaacaagctgactcctttgcaatcagttcccgctcccgccatcgccatcatcctgagtctccttgtcgccacatttactgaatgcaccagcaatgttgccactacaactatttttctcccaattttagccagcatggcacaagccatctgcctgcatcccctttacgttatgctgccttgcaccttggctacctctctagcttttatgctccctgtggctacccctcctaatgccatagtgtttagtttcggcgaccttaaggtactggacatggcaagagcgggctttttactgaacatcataggcgtactgatcatcgctttggccataaacagctggggtatccccctgtttagtctgcactccttccccagctgggcccagagcaatactaccgcccagtgtctcccaagcttggccaacactacaactccctcgccatag

SEQ ID NO: 205608 - DNA, 1809 bp, synthetic construct
  misc_feature 1..1809: note = Description of Artificial Sequence: Synthetic coding sequence
  source 1..1809: mol_type = other DNA
atggccgccctggccgccgccgccaagaaggtgtggagcgcccggcggctgctggtgcttctgtttacacctctcgcattgctgcctgtcgtgtttgctctcccacccaaagaaggacgatgtctttttgttattctgctcatggccgtctactggtgtaccgaggctctgcccttatcagtcacagccttgctgccaattgtgttattcccatttatgggcatcctgcctagcaacaaagtttgcccacagtacttcctggacactaatttcctgtttctgtccggtctgatcatggcatcagcgattgaggaatggaacctccaccgtagaatcgccctgaaaatcttgatgctggttggcgtgcagcctgcaagactgatcttgggaatgatggtgactacgtccttcctgagcatgtggctgagtaacactgctagtaccgcaatgatgctgcccattgctaacgctattctcaagtccctgttcgggcagaaagaggtgcgcaaagaccctagtcaggagtccgaggagaatacagctgccgtacgaaggaacggcctgcatactgtgccaacggagatgcagttcctggcgtcgaccgaggctaaggaccacccaggggagacagaggtccctctcgatctacccgccgactctcggaaggaggacgaataccggcggaacatttggaaaggcttcctgatcagcatcccttacagcgcaagcattggcggcaccgctacgttaaccggaactgcaccaaatttgatactgctggggcaactgaagagtttctttccccaatgcgacgtggttaattttggttcctggtttattttcgcatttccactgatgctcctcttccttttggccggctggctgtggatttcttttctgtatgggggactgagcttccgcggttggcgaaagaataaatcagaaatccggacaaatgctgaggaccgagctagagctgtgattagagaggagtatcaaaacctaggccctatcaaattcgcagaacaggcggtctttatcctgttttgcatgttcgctattttgctgttcacgcgagaccccaagttcattcccggctgggccagtctgtttaaccctggcttcctgtcagacgccgttaccggggtagctattgtcaccatactgttttttttcccctcccagcgccccagcctgaaatggtggttcgacttcaaggcacccaataccgaaactgagccgctcttaacatggaagaaggcccaggagacggtcccatggaacatcatactgctgttgggcggaggattcgccatggcaaaaggctgtgaggaatctggattgtctgtttggatcggaggccaattgcacccactggaaaacgtgcctcctgctcttgccgttctcttaataaccgtggtaattgccttcttcaccgagtttgctagcaatacagctaccatcattatttttctgcctgtcctggccgagttagccatccgcctgagagtccatcccttgtatctcatgatacccggcaccgttggctgttcctttgcctttatgctcccagtgtctacaccaccgaatagtattgcctttgcctcagggcacctgttggtgaaagatatggtacgcacaggccttctgatgaacttaatgggcgtcttactgttgtccttggccatgaacacttgggcccagacaatcttccagctcggaacattccccgattgggcagatatgtactccgtgaacgtgaccgcactgcctccaactttagccaatgacacctttaggaccctgtag

SEQ ID NO: 205609 - DNA, 1668 bp, synthetic construct
  misc_feature 1..1668: note = Description of Artificial Sequence: Synthetic coding sequence
  source 1..1668: mol_type = other DNA
atggccgtgtactggtgcaccgaggccctgcccctgagcgtgaccgccttactgcctatcgtgctgtttccctttatggggattctgccatccaacaaagtgtgtccccagtactttctggacacaaacttcttgttcttgagtgggttgattatggcctctgccattgaagagtggaacctgcaccgacggatagcgttgaagatcctgatgctcgtgggggtgcagcccgccaggctgatcctgggaatgatggtgaccacatctttcctgagtatgtggctctccaacaccgcaagcaccgcaatgatgctgccaatcgccaacgccatactcaaaagcctgtttggacagaaagaggtgagaaaggatccctcccaggagagtgaggagaacacagctgcagttcgacgcaacggcctgcatactgtgcctacagaaatgcaattcctggcttcaaccgaagcaaaagatcatcctggcgagaccgaggtcccactcgacctgcctgcagacagtaggaaagaggacgaatatcgccgcaacatttggaaaggcttcctcatctccattccttactctgcatccatcggaggcacggcaaccttgactggtacagccccaaatctcattctgctcggccagctgaaatcttttttcccacaatgcgacgtcgtcaacttcggatcctggttcattttcgcattcccgctgatgcttctgtttcttctggccggctggctgtggattagtttcctttacggcgggctgtctttccgcggctggagaaaaaacaagagtgaaattcggacaaacgctgaggatagagcccgagcagtaattagagaagaatatcagaacttaggtccaatcaaattcgccgaacaagctgtctttattttattctgtatgtttgccattctattgttcaccagagatcccaagttcatccctgggtgggcgtccctattcaatcccgggttcctgagtgacgctgtcaccggagttgctatcgttaccattctgttcttctttccatctcagcggccaagcctgaaatggtggtttgactttaaagcacccaacaccgaaacagaaccactattgacatggaaaaaggctcaggagaccgttccatggaatatcatcttgctactcggggggggtttcgccatggcaaagggctgcgaggaaagcggactctccgtgtggatcggcggccagctgcatcccctggaaaatgtcccccctgcacttgccgtgctgttgattacagtagtaatcgccttctttacagaattcgctagcaacactgctacgataatcatcttccttcccgtgctggcagagctggccattcggctaagagtgcatcctctgtatctgatgatccctggtactgtgggctgcagctttgcgttcatgctcccagtctctacccctccaaactcgattgcctttgcttccggccatctgttagtcaaggatatggtgaggaccggtctgctgatgaatcttatgggggtcctgttgctgagcctggccatgaacacttgggctcagacaattttccagctcggtacctttccggactgggcagatatgtactcagtgaatgttactgcactcccacctacactagccaacgatactttcagaactctgtag

SEQ ID NO: 205610 - DNA, 699 bp, synthetic construct
  misc_feature 1..699: note = Description of Artificial Sequence: Synthetic coding sequence
  source 1..699: mol_type = other DNA
atggccgccctggccgccgccgccaagaaggtgtggagcgcccggaggttactggtcctcctgttcactcctctggccctgttgccagtggtgttcgccctcccccccaaagaaggaagatgcctgtttgtcattctgctgatggcagtgtactggtgtactgaagcgctgccactgtcagtgactgccctgctgcccatcgtactatttccattcatgggcatcttaccgagcaacaaggtgtgcccccagtacttcttggacacaaacttcttattcctaagtgggctgataatggcttcagccatcgaggagtggaacctgcataggaggatagcactcaagattctcatgcttgtaggagtacagccggcccggctgattctaggcatgatggttacgacctctttcctgtctatgtggctcagcaatacagcatcgaccgctatgatgttgcccatcgctaatgctatcctcaagtctctgtttggccagaaggaagtccgtaaggatcctagccaggagagcgaggaaaacacaggcattgaaccaaacaccttcctttctgaggagcgcctaaagctgcaggctcccctggtcattcgcttgggacagatcaccgaaagtgggcagtggaacatgtccggcaacgatgtctgtaattttagagtgctgtccttccttccaggggggatgtag

SEQ ID NO: 205611 - DNA, 1017 bp, synthetic construct
  misc_feature 1..1017: note = Description of Artificial Sequence: Synthetic coding sequence
  source 1..1017: mol_type = other DNA
atggccgccctggccgccgccgccaagaaggtgtggagcgcccggcgcctgttagtgctcctattcaccccattggcactgctccctgttgtgtttgccttgcccccaaaagaaggccgctgcctgtttgtcattctgctgatggccgtttactggtgcaccgaggcgctccctttatccgtcacggctcttttacccatcgtgttatttccattcatgggcattttgccatcaaacaaagtttgccctcagtatttcctggacacaaatttcctcttcttaagcgggctcataatggcttcagcaatcgaagagtggaatctgcaccggcgcatcgcgctcaagatcctcatgctggtcggggtacagcctgctagacttatactgggcatgatggttaccacgtcatttttatccatgtggcttagcaataccgcttccactgccatgatgttgcctatagcgaatgccattttgaagagcctgttcggtcagaaagaggtgaggaaggaccccagtcaggagtccgaggaaaataccgcgaaaactacactgggacgtcagcgatttcactggatttgccgactcactcccgggaggagaatgaatatcgtcggaacttccgggagagcaagtagctctccctctccaacacagcctgtgttgggggcacagccccatagccgcgctcagccattgacgagttcgtgtcttgcgtcatctcgggggtggctctggatctcatttttgtatgggggattgagtttccgaggttggaggaagaataaatccgagataaggacaaatgctgaggatcgagcaagggccgtgatccgggaggagtaccaaaatctggggcctataaaattcgccgaacaagccgttttcattttgttttgcatgtttgctattctcctttttactcgggaccctaagtttattccgggttgggcatccttgtttaatccaggttgcaagatggggattattagcatttctacaattcaaaaaatgtag

SEQ ID NO: 205612 - DNA, 1563 bp, synthetic construct
  misc_feature 1..1563: note = Description of Artificial Sequence: Synthetic coding sequence
  source 1..1563: mol_type = other DNA
atggccgtgtactggtgcaccgaggccctgcccctgagcgtgaccgctctcctgcctatcgtattgttcccattcatgggcatcctgcctagcaacaaagtgtgcccccagtactttctggatactaactttctttttctgtcaggcctgatcatggctagcgccatcgaggaatggaatttacatagaaggattgcgctgaagatcctgatgctggtgggggtgcagcctgcaagactcatcctgggaatgatggtaacaacctcctttctctccatgtggctgagcaacactgcttcaactgccatgatgctgcctatcgcaaacgctattttaaaatccttatttggccagaaggaagtgcggaaagatccctcgcaggagtcggaagagaatacagcagccgtcaggaggaacggtctacatacagtgcccactgaaatgcagttccttgcgtctacagaagcaaaagaccacccaggtgagacagaagtgccacttgatctgcctgcggattcacgaaaagaggacgagtataggcgcaacatttggaagggcttcttaattagtatcccgtactcagcgagtattggagggaccgcgactttgactggcacggccccgaacctgattttgttgggccagcttaagtcatttttcccgcaatgcgacgtggtgaactttggttcctggttcatcttcgcctttcccctgatgctgctcttcttgctagctggatggctctggatcagcttcttgtatggcggactctcattccggggatggcgcaaaaataagtctgagatccgcacaaacgctgaagaccgggctagagccgtgatccgagaggagtaccagaacctcggccccataaagttcctgtccgacgccgtgactggggtggctattgtgactatattgtttttctttccttcccagcgcccatcacttaagtggtggtttgacttcaaggcccccaacactgagacagagcccctgctgacatggaaaaaggcgcaggaaactgtgccatggaacatcatcctgttgctgggcggtgggtttgctatggccaaagggtgtgaggagtctgggctgtctgtttggattggaggacaactgcaccccctggagaatgtcccacccgctctggcagtgttgctcattaccgttgtcatcgcctttttcacagaattcgctagcaacaccgcaactattattattttcctgccggtcttggcggagctcgcaatcaggctgcgggtgcaccccctctacctcatgatccctgggaccgtgggatgttccttcgcttttatgctgcccgtgtctacaccccctaattctatcgccttcgcctctggacatttgctggtcaaggatatggtccgaactggcctgctaatgaacctgatgggcgttcttctgttaagcctggcaatgaatacctgggcccaaacgatttttcagctgggcacattcccagattgggcggatatgtacagcgtcaacgtgacagccctacccccgacccttgccaatgacacctttcggaccctctag

SEQ ID NO: 205613 - DNA, 1659 bp, synthetic construct
  misc_feature 1..1659: note = Description of Artificial Sequence: Synthetic coding sequence
  source 1..1659: mol_type = other DNA
atggccgccctggccgccgccgccaagaaggtgtggagcgcccggcggctcctcgtcctgctgtttaccccattggctctcctgcctgtggtattcgctctgccccctaaagagggaaggtgcctgttcgtaattctcctgatggcggtgtactggtgtacggaggcccttccactcagtgtcacagccctgttgcctatcgttctgttcccctttatggggatcctgccgagtaacaaggtttgcccacagtatttcctcgatacgaattttctgtttctctccgggctgatcatggcatctgccatagaggagtggaacctgcatcggagaattgcactgaagatcctcatgctggtcggagtgcagcccgccagactgatactggggatgatggtgacaacttcctttctgtctatgtggctctctaatactgcctcaaccgctatgatgctgcctattgctaatgcaatcctgaagagccttttcggacaaaaagaggtccgcaaagatccgtcacaagaatctgaggaaaacactgccaaaactacactagggaggcagcggtttcattggatttgtagactgactcccggaaggaggatgaacatcgtcggcaccagcggaagagctagctctagtcccagcccaactcagcctgtgctgggggctcagcctcactccagagcccagccactcacctcatcttgtttggcgagtagtaggggatggctgtggatttcgtttctctacgggggcctgtccttccgtggttggaggaagaacaaaagtgaaattcgtacgaacgctgaggaccgcgcgcgggccgttatcagggaggagtatcaaaacctgggtcctatcaagtttgctgaacaggctgtattcattcttttctgtatgttcgccatcctgcttttcacacgggatcccaagtttattccaggatgggcctcactctttaaccccggcttcctgtccgacgccgtcacaggggtagctattgtgactatattgttctttttccccagtcagaggcctagccttaagtggtggtttgattttaaggctccaaacactgaaaccgagcctctgctgacatggaagaaggcccaagaaaccgtcccctggaatatcatccttcttctggggggcggatttgctatggcaaaaggctgcgaggagtccggattatccgtttggatagggggtcaattgcatcccctcgagaatgtgccacccgcactggcggtcctcctgatcacggtggtaatagcatttttcactgaatttgcctccaatactgctaccattatcatatttttacccgtcctggccgagctggctatcaggctgagagtgcacccactgtacctcatgatccctgggaccgtggggtgctcattcgcattcatgctgccagtgagcactccccccaattcaattgccttcgcaagcgggcacctgttggtcaaggatatggtcagaacggggctgctgatgaacctgatgggcgtcttgctcctttctctggcaatgaacacatgggcacaaactatcttccaattgggcacgtttccagactgggccgatatgtactctgtgaatgtcactgcactgcctcctacactagctaatgacacctttcggacattatag

SEQ ID NO: 205614 - DNA, 558 bp, synthetic construct
  misc_feature 1..558: note = Description of Artificial Sequence: Synthetic coding sequence
  source 1..558: mol_type = other DNA
atggccgtgtactggtgcaccgaggccctgcccctgagcgtgaccgctttgctgccaatcgttctattcccattcatgggaatcctaccaagtaataaggtatgtccgcaatattttttagatactaatttcctcttcctctcaggccttatcatggcatctgcgattgaggaatggaatctgcatcgtcgtatagctctaaagattctcatgctggtgggcgttcagcccgcccggcttattctggggatgatggtgaccacaagctttctgtccatgtggctgtctaatacagccagtactgcaatgatgctcccaatagcgaatgcaatcctgaaatctctgtttggacagaaagaggtgcggaaagatccgtcacaggagagcgaagagaatacgggcatagaaccaaacacgtttctcagtgaagaacgactcaagctacaggcaccactggttatcagactggggcagataacagagtctgggcagtggaatatgtctggcaatgacgtttgtaattttcgcgttttgtcatttctgcccgggggcatgtag

SEQ ID NO: 205615 - DNA, 564 bp, synthetic construct
  misc_feature 1..564: note = Description of Artificial Sequence: Synthetic coding sequence
  source 1..564: mol_type = other DNA
atgctgagccccgcctggctgctgagccccagctgcagcagcagcagaccgaaggggcccttgagcagcggtgggcttaccagtaaggagagtggactcagtgtttggataggcggccagctccaccccctggagaatgtgccgcccgctttggccgtgctgctaatcacggtcgtgatcgccttttttactgaatttgcaagcaataccgctaccattattatttttttacctgtgttagccgaactagctatacgtttgcgcgttcacccattgtacctgatgattcccggtacagtcggatgctcttttgccttcatgctgccagtgtccacccctccaaacagcatagcgtttgctagcggccacctgcttgtcaaggacatggttcgaactggattgctgatgaacttaatgggcgtgttacttctgagcctggctatgaacacctgggcccagaccatcttccagcttggcactttccctgactgggcagatatgtacagcgttaatgtgaccgccctgccccctacattggctaatgatactttcaggacattatag

SEQ ID NO: 205616 - DNA, 1230 bp, synthetic construct
  misc_feature 1..1230: note = Description of Artificial Sequence: Synthetic coding sequence
  source 1..1230: mol_type = other DNA
atggccgtgtactggtgcaccgaggccctgcccctgagcgtgaccgcactgcttccaattgttctctttccttttatgggcattttaccaagcaataaagtttgtccgcaatactttctggataccaactttctctttctgagcggactcattatggcttccgccattgaggaatggaacctccacagacggatagcgctgaagatcctgatgcttgtaggcgtccagcccgctaggctcatcttgggaatgatggtgactacaagcttcttatctatgtggttgtcaaacactgccagtaccgccatgatgctgcccattgcgaatgcaattctcaagtccctcttcggtcagaaggaagtgcggaaggatccatcccaagagagcgaggagaacactgccgccgtgcgacgcaacggactgcacacggtgcctaccgagatgcagttcctggctagcacagaagccaaagaccacccgggggagaccgaagttcctctggatcttccggcggactctagaaaagaggacgagtatcggcggaacatttggaaggggttccttatcagcattccttactcagccagcatcggagggaccgcgacactgaccggcaccgcacccaatctgatcctcctcgggcagctaaagtcctttttcccgcagtgcgatgtagtgaacttcggcagttggttcattttcgcattccccctcatgttactgtttctcctagccggctggctttggatctccttcttgtatggtgggctgtccttccgcggatggagaaaaaataagagcgagatccgcactaacgccgaagatcgcgctcgcgccgtaatacgcgaggagtatcaaaatttaggcccaatcaagttcgccgagcaagccgtgttcatcctcttctgcatgttcgctatcttgctattcactcgcgatcctaagttcatcccaggatgggcctccctgtttaacccagggttcctttcagacgcagttacgggtgtggccatcgtgacgattctgttctttttccccagccaacgaccgagtttaaagtggtggttcgactttaaggcccccaacaccgaaacagaacccctgcttacgtggaagaaggcccaggagaccgtgccgtggaatatcatactcctcttgggaggcggattcgcaatggcaaaggggtgcgaggagtctgggttgtccgtgtggatcggtgggcagttgtag

SEQ ID NO: 205617 - DNA, 1668 bp, synthetic construct
  misc_feature 1..1668: note = Description of Artificial Sequence: Synthetic coding sequence
  source 1..1668: mol_type = other DNA
atggccgtgtactggtgcaccgaggccctgcccctgagcgtgaccgccttgctcccaatcgttttgttcccatttatgggtatattaccaagcaacaaggtctgtcctcagtacttcttggacacaaattttctttttctctctggcctgattatggcctcagccattgaagagtggaacctgcacagacgcatcgccttgaagatcctgatgctcgtgggggtgcagccagccagactgatcctcggtatgatggtgaccacatctttcctgtcaatgtggctgtccaacacagctagcaccgctatgatgctgcccatcgccaatgccattctcaagagtctgttcggccaaaaggaggtgcggaaagatccttcgcaggaaagcgaggagaatacagctgcagtcagaaggaacggcctgcacacagtccctaccgagatgcagtttctcgccagcaccgaggcaaaagatcacccaggagagacggaggtgcccctcgacctgcccgccgattccagaaaggaggacgaatatcgcaggaacatttggaaaggatttctgatttcaatcccttattccgcctccataggaggaacagcgaccctgacgggtaccgcaccaaatcttatccttctaggccaattgaaatcttttttcccccagtgcgatgtggtaaattttgggtcttggtttatttttgcgtttcctctgatgctgctgtttctgttagctggatggctatggatcagtttcctctatggcggactctcgtttagggggtggcggaaaaacaagtctgagatccgcactaatgctgaggatcgtgcccgtgcagtgatccgagaagagtaccagaatttggggccaattaagttcgccgagcaggcagtcttcatactcttttgcatgtttgccatactgctgtttaccagggatccaaagttcattccaggctgggcctccctgttcaatccagggttcctatcagacgctgtgactggagtggcaatcgtcaccatcctctttttcttccctagccagaggccctctctcaagtggtggttcgattttaaagcccctaatacggagacagaaccattgctaacctggaagaaagcacaggaaaccgtgccttggaacatcatcctattgcttggaggcggttttgccatggcgaaaggttgtgaggaaagtggactctccgtctggatcgggggacagctccacccactggagaacgtgcctcccgccctagctgtgctgctgatcactgtggtaattgctttcttcactgaatttgcctcaaatacggccactataattatatttttacccgtcttggccgagcttgcgataagactgagggtgcacccactgtacctaatgataccagggaccgtgggatgctcgtttgcttttatgctgccagttagcacaccaccgaactctattgcatttgctagtgggcatctgctggtgaaagacatggtgaggaccgggttgctgatgaatctgatgggtgtgctgttgctgtccctggctatgaatacctgggcgcagacaatattccagcttgggacatttcccgactgggctgacatgtactccgtgaatgtgactgcccttcctcccaccctcgcaaatgataccttcaggactttgtag

SEQ ID NO: 205618 - DNA, 2763 bp, synthetic construct
  misc_feature 1..2763: note = Description of Artificial Sequence: Synthetic coding sequence
  source 1..2763: mol_type = other DNA
atgagcgacccccacagcagccccctgctgcccgagcccctgagctcacgctataagttatatgaggccgaatttacaagccctagctggccctctacatctcctgacacacatcccgccctgcctctgctggaaatgcctgaggaaaaagacctgagatcttcaaacgaagactcacatatagtcaagattgaaaagctgaacgagcgctccaagcggaaagatgatggcgtcgctcatagggattctgccggccagaggtgcatttgcctctctaaggccgtcggttatctgaccggagatatgaaggagtatcgcatctggctcaaagacaagcatctcgcactacagttcatcgactgggtgctccgcggtacggcacaggtcatgttcattaacaatccattaagtgggttgatcatctttatcggcttgctcatacagaacccatggtggaccattacaggcggccttggcaccgtcgtatccactctgacagcgcttgcactggggcaggatcggtctgctattgctagcggtctgcatggttataacgggatgctggtggggctcttaatggccgtattctctgaaaaactggattattattggtggctgctgttccccgtaaccttcaccgcaatgtcttgcccagttctgagctcagccctgaacagcattttctcgaaatgggacctacctgttttcacactgccctttaatatagctgtaacactatatcttgcagccaccggccactataacttattcttccccacgaccttggtcgaaccagtttcaagtgttccaaatattacttggaccgaaatggagatgcccctcctgctgcaggccatccccgtaggtgtggggcaagtgtatggatgcgacaacccctggacggggggagtgttcctcgtagccctgttcataagcagtcccttgatttgtttgcatgcggctatcggatccattgtggggttactagcggcactgtcagtggccacacccttcgaaacaatctataccgggctgtggtcttacaattgcgtactgtcctgtatcgcgatcggagggatgttttacgccctcacctggcagacacacctgctggccctgatctgtgctttattttgtgcgtatatggaagcagccatttctaacattatgagcgtagtcggggtgcctcctggcacctgggcattttgtctggctacaatcatcttcctgttactcacaacaaataacccagctattttccgcctcccactttcgaaagtgacttacccagaggcaaataggatctattacctgactgtcaagagcggggaggaggagaaggcccccagcggaggagggggagagcatccaccaactgcaggacccaaggttgaggaaggttccgaggcggtgttgagtaagcacaggagtgtattccatatagagtggtcgtcaatccgcagacgaagtaaagtgttcggcaagggcgagcatcaggagcggcagaacaaggacccatttccctaccgatacaggaaacctactgttgaactactcgacttggacactatggaggaatccagcgagatcaaggtcgaaacaaatatatcaaagacttcttggattcgctcatccatggccgccagtgggaagcgggtgtctaaagcactcagttatatcactggagaaatgaaggagtgcggtgaagggctcaaagataagtcccctgtgttccagttctttgactgggttctcagaggtacgagtcaggtgatgtttgttaataaccccctcagcggaatacttattattttgggcctctttatacagaacccctggtgggcaatctctggatgcctgggcaccatcatgtctaccctgaccgcactgattttatctcaggataaatccgcaattgctgctgggttccacggctacaacggagttctggtaggattattaatggcggtcttctctgataaaggggattattattggtggttgctgttgcctgtaatcatcatgagtatgtcctgtcccattctctctagcgccttgggcaccatcttctcgaagtgggatttgcccgtatttacccttccatttaatatcacagtgacgctttatctcgctgcaacagggcattacaatctgttcttccctacaaccttactgcagcctgctagtgcaatgcccaatataacctggagcgaggtacaggtgcctctcctgctcagagccatccctgtcggtattggtcaggtctatggctgcgataacccttggaccggtggaatcttcttgatcgcactcttcattagtagtcccctcatatgcttgcatgccgccatcggttccacgatgggtatgctagccgccctgaccattgcgactcctttcgattccatttattttggtctgtgcgggttcaattctactttggcttgcatcgccattggcgggatgttttacgtcatcacatggcagacgcatctgttggccattgcctgcgctctcttcgctgcttacctgggcgccgcgctggctaacatgttgtcggtcttcgggctgccaccctgtacctggcccttctgcctgtctgcacttactttccttctacttacaactaacaaccctgccatatacaaactccctctgtccaaagtgacttaccccgaggccaacaggatatactacctgagccaggagaggaatcgccgggcatccattataacaaagtatcaggcttacgatgtgagctag

SEQ ID NO: 205619 - DNA, 1170 bp, synthetic construct
  misc_feature 1..1170: note = Description of Artificial Sequence: Synthetic coding sequence
  source 1..1170: mol_type = other DNA
atggaggacagccccaccatggtgcgggtggacagccccaccatggtccgcggcgagaaccaagtctcaccatgccagggaaggcggtgcttccccaaagccctgggatacgtgaccggggatatgaaagagctggcaaatcagctgaaagacaaacctgtggtgctccagttcattgactggattctgcgcggcatctcacaggtggtcttcgtgaacaaccccgttagcggaattttaatattagtgggcctccttgtccagaatccctggtgggctctaactggttggctcggaacggttgtgagcactttgatggcactgctgctctcccaagatcggtctctgatcgcatctggcctgtacggttacaatgccacactggtgggtgtgctcatggcagttttcagcgacaaaggcgactacttttggtggcttctgttaccagtctgcgctatgtctatgacttgccccattttctcatccgcacttaactcaatgctgtccaagtgggatctgccggtgttcacactgccatttaatatggccctttcgatgtaccttagtgccaccggccactacaatccgttcttcccggcaaagttagtgattccaatcacaacggcaccgaacataagctggtcagatctcagcgcactggaactgctcaagagcatacccgtaggtgtgggacagatatacggctgcgacaacccctggactgggggtatctttctgggggcaatccttctcagcagtcctctcatgtgcttacacgcagccattggcagtctgctggggatcgctgcaggactctctctgtcggccccgtttgaggatatttacttcggcctgtggggcttcaattcaagcctggcctgtattgcaatgggggggatgttcatggctctgacatggcagacacacttgttggccttaggctgcgcactcttcactgcttacctgggtgtgggtatggccaatttcatggcggaagttggactgcctgcatgtacatggcccttttgtctcgctactctgctatttctgatcatgaccacaaaaaactccaatatctataagatgcccctctccaaggttacatacccagaagagaatagaatcttctatcttcaggccaagaagcgcatggttgaatctccactttag

SEQ ID NO: 205620 - DNA, 855 bp, synthetic construct
  misc_feature 1..855: note = Description of Artificial Sequence: Synthetic coding sequence
  source 1..855: mol_type = other DNA
atggccctgctgctgagccaggaccggagcctgatcgccagcggcctctacggatacaatgcaactttggtcggcgtgctgatggccgtgttctctgataagggagattacttttggtggctcctcctacccgtttgcgctatgtcaatgacctgcccaatcttcagtagtgcactcaactcgatgttgagtaagtgggaccttcccgtgtttacgctcccattcaatatggcgctcagcatgtatctgagcgccacaggacactataaccccttttttcccgcaaagctggtgatcccaatcacaaccgctccaaatatctcatggtccgacctgagcgccttggagcttctgaaatccattcccgtgggcgtgggtcaaatttatggatgcgacaacccctggaccggcggaatattccttggggctatcctcctttcctccccattaatgtgtctgcacgcagcaatcggctcattgctggggatcgccgctggactgtctctttctgccccattcgaggacatctatttcggactgtgggggttcaatagcagcctggcttgtatcgccatgggcggcatgtttatggccctcacatggcagacccatctgctcgctctgggctgcgctctgttcaccgcctatttaggtgtgggcatggcaaattttatggctgaagttggacttcctgcctgtacttggcctttctgtctcgcaactctgctgtttttgatcatgactaccaagaactcaaacatttataagatgcctttgtctaaggtgacttaccccgaggaaaataggatcttttacctacaggctaaaaagaggatggtcgagtcccctctgtag

SEQ ID NO: 205621 - DNA, 1338 bp, synthetic construct
  misc_feature 1..1338: note = Description of Artificial Sequence: Synthetic coding sequence
  source 1..1338: mol_type = other DNA
atgaacggccggagcctgatcggcggcgccggcgacgcccggcacggccccgtgtggaaagaccctttcggcacaaaagcgggggatgccgccagacgaggaatcgctaggttatcactggctttggcggatggaagccaggagcaagagcctgaggaagagatagccatggaagatagccccacgatggtgagggtcgactcaccaaccatggtgcgtggcgagaatcaggtctccccctgtcaggggaggcgttgcttccctaaggctcttggctacgtcaccggcgatatgaaggagctggcaaatcaactgaaggataagcctgtggtcctgcagttcatcgattggatcctccggggtatctcccaggtggtgtttgtaaataaccctgtgagcggaatcctgattctggttggactgctggttcagaacccgtggtgggccctcaccggatggctgggaactgtcgtgagcactttgatggcactgcttctttctcaggatcgctccctcatagcctccggactgtatgggtacaatgccacccttgtcggggtcttaatggctgtcttctctgacaagggcgattacttctggtggttgctgttgcccgtgtgcgccatgtcaatgacgtgccccattttctcgtccgcactcaactccatgctgagcaaatgggacctgccagtcttcaccttgccatttaacatggctctgagtatgtatctgtccgccaccggtcattataatccattctttcctgccaaattggtgattcccatcacaacagctccaaacataagctggtccgacctctctgccctggaactgcttaagagtatccccgtcggtgtgggccagatctatggctgcgataacccatggactggcgggatcttcttgggtgcaattctgctctcgagcccccttatgtgtctgcacgccgccatcggttcacttcttgggattgccgcagggctgagtctgagcgctcctttcgaggacatctattttggactgtggggttttaactcttctttagcttgcatcgccatgggggggatgttcatggctttaacttggcagactcatctgttggccctagggtgtgccttgttcactgcttacctcggcgtcggcatggccaactttatggcagaggtgggtctcccagcctgcacatggccgttctgtctcgctacactactcttcctcatcatgacaaccaaaaattccaacatttacaaaatgccccttagtaaggtcacttaccctgaggaaaaccgtatcttctatctccaggccaagaagcggatggttgaatcccccctttag

SEQ ID NO: 205622 - DNA, 1338 bp, synthetic construct
  misc_feature 1..1338: note = Description of Artificial Sequence: Synthetic coding sequence
  source 1..1338: mol_type = other DNA
atgaacggccggagcctgatcggcggcgccggcgacgcccggcacggaccagtctggaaagaccctttcggcacgaaggccggggacgccgcgaggagggggatcgcccgcttgtctctggccctggctgatggtagccaagaacaggagcctgaggaagagattgccatggaagattcacctacaatggtcagagtggattctccaactatggttaggggagaaaaccaggtcagcccctgtcagggtcggcgctgcttcccaaaagcattaggctatgtcactggtgatatgaaggagctggcaaatcagctgaaggacaagcccgtggtccttcagttcattgactggatcctgcgggggatcagtcaggttgtgttcgttaacaaccctgtgtccggcattttaatcctggtgggactactagttcagaacccgtggtgggcgcttacagggtggctcggtactgttgtgagcacactcatggctctgctgttgagccaggatcgcagcctcatcgcctcaggcctgtacggctacaacgcaacactagtgggggtgctcatggccgttttcagcgataaaggagattatttttggtggctgctcctccccgtgtgcgctatgtccatgacctgtcccattttcagctccgctctgaatagtatgctgtccaaatgggacctgccagtatttaccctgccttttaatatggctctgtctatgtatctgtccgcaacggggcactataatcctttctttccagctaaactcgttatacccattacaactgctcccaacatatcgtggagcgacctctctgccctggaacttctgaagtccatccctgtgggcgtggggcagatctatggttgcgataacccatggactggcggcattttcctcggggcaatcctgctatccagcccgcttatgtgcctgcatgctgctatcggaagtttgctaggaatcgccgctgggctgtctctgtctgccccgtttgaggacatttatttcggtttgtggggattcaattctagcctggcgtgtatcgcgatgggtggcatgttcatggccctcacttggcagactcatcttcttgctttggggtgtgcattgtttactgcctatttgggcgtgggcatggcgaattttatggccgaggtggggttgccggcctgcacctggccgttctgtctggccaccctcttgtttctgatcatgaccacaaaaaattcaaatatctataagatgccactcagtaaggttacctatcccgaggaaaatagaatattttacctccaagccaagaagagaatggtggaatctccactgtag

SEQ ID NO: 205623 - DNA, 645 bp, synthetic construct
  misc_feature 1..645: note = Description of Artificial Sequence: Synthetic coding sequence
  source 1..645: mol_type = other DNA
atgaacggccggagcctgatcggcggcgccggcgacgcccggcacggccctgtgtggaaggacccgttcgggaccaaagcaggtgacgccgctaggcgaggtatagctcgactctcactggctctggcagatggttcccaggaacaagagccggaggaggaaatcgctatggaagatagtcctaccatggtacgggtggatagcccaaccatggttcggggagagaaccaagtttcaccctgccaaggacgccggtgtttcccaaaagcgctcggttacgtgaccggcgacatgaaggagctcgcaaatcagctaaaggataagcctgtggttttgcaatttattgactggatcctgcggggaatttcacaggtagtcttcgtcaacaaccccgtttcgggcatcctcatactggtgggactcctagtgcaaaacccatggtgggcgctgaccggatggttaggcacagttgtcagtaccctgatggcacttctcctcagccaagatcggagccttatcgcttcaggtctgtacggatacaacgctactctggtgggcgtactcatggctgtgttttctgacaaaggggactatttttggtggttgctgctgccagtgtgtgccatgagcatgacctgctgctag

SEQ ID NO: 205624 - DNA, 846 bp, synthetic construct
  misc_feature 1..846: note = Description of Artificial Sequence: Synthetic coding sequence
  source 1..846: mol_type = other DNA
atgggccggcggaaccggagcctgatcgccagcggcctgtacggctataacgccacattggtcggggtgctcatggctgtgttttcagataagggtgactacttctggtggctactgctgccagtgtgtgccatgtctatgacctgtccaatcttctcctccgctctgaatagtatgctctctaagtgggatttgccagtgtttacgctgcctttcaatatggccctgtcaatgtacctgagcgcaaccgggcattataacccattcttcccagctaaactcgtgataccgatcactacagcaccgaacatttcatggtcagatctttcggcgttagaacttttaaaaagcatccccgtgggcgtgggccagatatacgggtgcgacaacccgtggacgggcggcatctttttgggtgcgattcttttgagttccccactgatgtgtctccacgctgctattgggagcttgctgggaattgccgcggggctgtctctcagcgccccgtttgaagacatatatttcggcctttggggcttcaattcaagcctcgcctgtatcgctatgggcggtatgttcatggccctgacttggcaaacccatctgctcgcgctgggctgcgccctctttactgcttatctgggtgtcggcatggccaacttcatggctgaggtggggcttccagcctgcacctggccattctgtctggccacgctgctgtttttaataatgaccacaaaaaattcaaatatctacaagatgccccttagtaaggtcacataccctgaggagaatagaatattctacttgcaggccaagaaacgcatggtggagagccctctatag

SEQ ID NO: 205625 - DNA, 774 bp, synthetic construct
  misc_feature 1..774: note = Description of Artificial Sequence: Synthetic coding sequence
  source 1..774: mol_type = other DNA
atggccgtgttcagcgacaagggcgactacttctggtggctgctgttaccagtgtgcgcaatgagcatgacttgcccaatattctcctctgccctgaattccatgctctctaagtgggacctacccgttttcacgcttcctttcaacatggcactgtccatgtacctgtctgcgaccggtcattataacccatttttccctgccaagctcgtgattccaataacaacagcccccaacatttcctggtcagacctttcagcactggagcttttgaagagcattccagtgggagtggggcaaatctatgggtgcgataacccatggactggaggtatcttccttggcgccattctcctctcatccccccttatgtgtctgcacgctgcaattggtagtctcctgggaatcgctgccgggctgtcgctgagcgcccctttcgaggatatctatttcgggttgtggggcttcaattcaagcctggcctgtattgcgatgggcggcatgttcatggccctgacctggcagacccatctactggctttagggtgtgccctcttcacagcatacctgggagtgggaatggcaaatttcatggcggaggtgggtctcccggcctgtacgtggccattctgcctggccacactgctatttttaatcatgactactaagaactccaacatttacaagatgcctttatctaaggtcacgtatcccgaggaaaaccgaatcttctatttgcaagccaagaagcgtatggtggagtcacctctgtag

SEQ ID NO: 205626 - DNA, 2763 bp, synthetic construct
  misc_feature 1..2763: note = Description of Artificial Sequence: Synthetic coding sequence
  source 1..2763: mol_type = other DNA
atgagcgacccccacagcagccccctgctgcccgagcccctgagctccagatataagctgtatgaggccgagtttacaagcccgtcatggccaagcacttcaccagatactcatccagccctacccttgttagaaatgccagaagaaaaggacttacgctcctctaatgaggacagtcacatcgtcaaaattgaaaagctgaacgagcggagcaaaagaaaagacgacggcgtggctcatcgcgactccgcaggacagagatgtatctgtttaagcaaggcagtcgggtacctgaccggggacatgaaagaatatcgcatttggttaaaggacaaacacctggctctacaattcattgattgggtgttgagaggaaccgcacaggttatgttcattaataacccactttccggtcttatcatcttcataggtctgcttatccagaatccttggtggaccataactgggggcctgggaacagtggtgtccactctcaccgctctggcgctgggccaggatcgctccgctatagcaagcgggctccacggttataatggaatgctcgtgggactacttatggccgttttctctgagaagctggactactactggtggctcctttttcctgtgacgtttaccgccatgagttgtcccgtgcttagtagtgctctgaatagcatattctccaaatgggatctgcctgtctttaccctgccttttaatatagccgtgacactgtatctcgccgctaccgggcactacaacctgttctttcctacaaccttggtggagcctgtgtcttccgtccctaatatcacatggactgaaatggagatgcctctcctgctccaagccatccctgtgggcgtgggacaggtttatgggtgtgataatccttggacagggggagtctttcttgtggcactttttattagcagtccgctcatctgtctccacgctgccatcggttccatcgttgggctgctggcagccctcagtgttgccactccttttgaaaccatctacactggtctgtggagttataattgtgtcctctcctgcattgccatcgggggcatgttttatgccctgacttggcagacccatcttttggcgctgatttgcgccttgttttgcgcctacatggaggccgctataagcaatattatgagtgtagtgggagtgcccccaggcacttgggctttttgcctggctaccattatttttctgttgctgacaacaaacaaccccgctatcttccggctgcctctgtcgaaagtgacttaccctgaggccaatcgaatctactacctgaccgtgaagagcggggaggaggagaaggcaccctccggcggcgggggggagcatccccctacagctggccctaaagtggaagagggaagtgaggccgtcctctccaagcatagatctgtgttccacatagaatggagctcaattcgcagaaggagtaaagtgttcggaaaaggggaacaccaggagcgtcagaataaggatccttttccctatagatacagaaaaccaaccgtggaactgctcgatttggacacaatggaggaaagtagcgaaatcaaagtcgaaacaaacatcagcaaaaccagttggatccggtccagcatggcagcaagcgggaagcgcgtgtctaaggctctgagttacatcacaggtgagatgaaggagtgcggagaggggcttaaagacaaatcccctgtgtttcaattctttgactgggtcctgaggggcacgtctcaagtgatgtttgtgaacaacccattatcagggatcttgatcattctggggcttttcatccagaatccttggtgggccatcagcggatgtctgggtactattatgtcaaccctgacagcccttatactgtcccaggacaaatccgctatagccgccggatttcacgggtataatggcgtgttagtgggcctgctgatggctgtgttctctgacaaaggagactactattggtggctgcttttgcctgtaattattatgtccatgtcatgccccattttatcgtcagctttgggtaccatctttagcaagtgggatctaccagtgttcacgttgccattcaatattacagtaaccctctacctagctgccacgggacattacaatcttttcttccctactacccttcttcagccggctagcgccatgccaaacattacctggtccgaggtccaggtccccttgctgctgcgcgccataccagtgggcattggacaggtgtatgggtgcgacaacccttggactggcggcatctttctgattgcgctgtttatttcttccccactcatctgcctgcacgctgctattggaagcaccatgggcatgctggccgccctgactatcgccactcccttcgattccatttacttcggactttgtggtttcaattctacccttgcctgtattgcaatcggagggatgttttatgtcatcacctggcagacacatcttctggccatcgcctgtgctttattcgccgcttatctgggcgccgctttagccaatatgcttagtgtgttcggtctgccgccttgcacttggcccttctgtctatccgccctgactttcctccttctgaccacgaataaccccgcgatttataagttgccactatccaaagtcacttaccccgaggcaaataggatttattatctaagccaggagcgaaaccgcagagccagcattataaccaagtaccaagcctatgacgtctcatag

SEQ ID NO: 205627 - DNA, 708 bp, synthetic construct
  misc_feature 1..708: note = Description of Artificial Sequence: Synthetic coding sequence
  source 1..708: mol_type = other DNA
atgagcgacccccacagcagccccctgctgcccgagcccctgagcagccgatataagctttatgaagccgaattcacatcccccagctggcctagcacgtccccagacacacaccctgccctgccgctgttggagatgcctgaagaaaaggatctgcgctcttctaacgaagactctcacatcgttaaaatcgaaaagctgaatgagcggagtaagcggaaagatgatggtgttgctcaccgcgacagtgccggccagagatgtatatgtctttctaaggcagtagggtatcttacaggtgatatgaaagaatacagaatttggctcaaggataagcacttggctctgcaattcatcgactgggtacttaggggcaccgcacaggttatgttcatcaacaatccgttgtccggcttaatcattttcattggcctgttaatccagaacccatggtggactattacaggaggcctcgggaccgtggtaagtaccttaaccgctcttgccctgggccaagaccgctcggccatcgcgtccggcctgcacggatacaatggcatgctggtagggctgcttatggccgtgttctctgaaaaactcgactattactggtggcttttatttcccgtgacctttaccgccatgtcttggatggagacagattttaactggtccaagagcgggtgctggaagcatttactccagtag

SEQ ID NO: 205628 - DNA, 627 bp, synthetic construct
  misc_feature 1..627: note = Description of Artificial Sequence: Synthetic coding sequence
  source 1..627: mol_type = other DNA
atggaccagtggggcgtgtacttcaaccccgtgctggtgagcttctgccagtccttttttgggtatcctctaagcatattcttcatagtcgttaatgaattttgtgaacgcttctcctactacgggatgcgggccattctaattttgtacttcactaacttcattagctgggatgacaatcttagcaccgccatctatcataccttcgtggccttgtgttatctcaccccaatattaggagccctgatcgctgacagttggctgggaaaatttaagaccatcgtttcgctgtctattgtctacaccatcgggcaggccgtgacatctgtgagctctattaacgatcttactgaccacaaccacgatggaactcccgattctttgccagtgcacgtggtcctgtccctgatcggcctagccctgatcgctttgggcaccggcggcatcaaaccctgcgtgtccgcattcggaggagaccagttcgaagaaggccaggagaagcagcggaatagatttttttcaatcttttatttagcaatcaatgcgggctcattactctcaacaataataacacccatgctgcggggaaaacgctacttgaagggtacatcggttggccttttttag

SEQ ID NO: 205629 - DNA, 849 bp, synthetic construct
  misc_feature 1..849: note = Description of Artificial Sequence: Synthetic coding sequence
  source 1..849: mol_type = other DNA
atgcgggccatcctgatcctgtacttcaccaacttcatcagctgggacgacaatttaagcacagccatctaccacacattcgtggccctttgttacttgaccccgatcttaggggcgttgatcgccgactcatggctggggaaatttaagacaatagtctcactaagcatcgtgtacacaatcggccaggccgtgaccagtgtgtcatcaatcaatgatttgacggaccacaatcacgacggaactccggattctctgcctgtccacgtggtgctatcattaatcggtctcgcacttattgccctcggtactggtggaattaagccttgcgtgtccgcattcggaggagatcagttcgaggagggacaagagaagcagaggaacaggtttttctccattttttacctggcaatcaatgcgggctcacttctctctaccattattacacccatgctcagaggtaaaagatatctcaaaggtacctccgttggtctctttctggtgagaccatcgccttgcctactgcgattcgtgctcttcttcccctccgctttgttttccagttgtcagttacatgctggcatgcacgtcggcatttggagcaagtgcttcctgccatgcgagttccacctactgttcgtcctgttcaagtccctaatccctgttactacgggtgagagcaaaccaagcctcgcatgggcttcaatctttctgaattgttactcatgtaaggttatgctggtggtcagggggaaacgccaggagcggtgtctgggaagccaagccggcggtcggagctgccacttctcccttcaagcattactgccatccgacatctcagtgacgtag

SEQ ID NO: 205630 - DNA, 2127 bp, synthetic construct
  misc_feature 1..2127: note = Description of Artificial Sequence: Synthetic coding sequence
  source 1..2127: mol_type = other DNA
atgggcatgagcaagagccacagcttcttcggctaccccctgagcatattttttattgtggttaatgaattttgtgagcggttcagctattacgggatgcgggccatcctcatcctctactttaccaactttatttcctgggatgacaatttgtccactgccatctaccacacctttgtcgcactgtgctacctaacccccattcttggtgcactcatcgctgattcgtggttaggtaagtttaaaaccatagtatctttgtcaatcgtctacacaatcggacaagctgttaccagtgtgtctagcataaacgacctgaccgaccacaaccatgatgggactcctgactcattacctgtccatgtagtgctctcccttatcgggcttgccctgatagctttgggcacgggcggcatcaagccctgcgtctctgcattcggaggagaccagttcgaggaaggtcaggagaagcagagaaatcggttcttttcgattttctacttagccatcaatgcaggctccctactctctacaatcataacgcccatgctgagagtgcagcagtgtggcattcactcaaaacaggcttgctatccactggcatttggagtccctgcggccctcatggctgtggcgttgatcgtttttgttctgggtagcgggatgtataaaaagttcaaacctcagggcaatattatgggaaaggtggcaaaatgcatcgggtttgctattaagaaccgcttccggcatagatcaaaagccttcccgaagagagaacactggcttgattgggcaaaagaaaagtacgatgagcggttgattagccagattaaaatggtaacccgagtaatgtttttgtatattcctctacctatgttctgggctctctttgaccaacagggaagccgttggacacttcaggcgaccactatgtccggcaaaatcggggctctggagattcaaccagatcagatgcagacagtgaacgctatcctgatcgtcattatggtgccgatctttgacgccgtcctctatccgcttattgccaaatgcggattcaactttacatcccttaaaaaaatggctgtcggcatggtactggcttctatggcctttgtggtggctgccatcgttcaggttgagattgataagactctgccagtatttcccaaaggtaatgaagtccagattaaggttcttaatatcggaaacaacactatgaatatctctctgccaggggaaatggtcacgcttgggcctatgtctcagaccaacgctttcatgacctttgatgtcaataaactgacccggatcaacatttcctctccaggaagtcccgtgacagccgtcactgatgactttaagcagggacagcgccatactctcttggtatgggctccaaatcactatcaggtcgtgaaggatggactgaatcagaagcccgaaaagggggaaaatgggatcagattcgtgaacaccttcaacgagttgataactataaccatgtcaggaaaggtgtatgccaacatttcttcctataacgcgtcaacataccagttcttccccagcggtatcaaaggctttacgatatcctctacagaaatacccccacaatgtcaaccaaatttcaacacattctacctggagtttgggtcagcctatacatacattgtgcaacgcaagaacgattcatgtcccgaagttaaggtttttgaagacatctcagcaaacacagtgaatatggcactgcaaattccccagtatttcctccttacatgtggggaagtggtctttagcgtgacaggactggagttctcttactcacaggcccctagcaatatgaaaagtgtgctgcaggccggatggctcctgactgtagccgttggtaacattatcgtattgatcgtggcgggcgccgggcagttttcaaagcagtgggcagagtatattttattcgctgccctgctgctggtggtctgtgtaatctttgcgattatggcaagattttacacatatattaacccagccgagattgaggcgcagtttgatgaagacgagaagaagaatcgcctcgaaaagagtaatccatacttcatgtccggcgctaattcacagaaacagatgtag

SEQ ID NO: 205631 - DNA, 1503 bp, synthetic construct
  misc_feature 1..1503: note = Description of Artificial Sequence: Synthetic coding sequence
  source 1..1503: mol_type = other DNA
atgccccccgccgtgggcggccccgtgggctacaccccccccgacggcggatggggttgggccgtggtgatcggggcatttataagtattggattttcctacgctttccctaagagtattaccgtgttcttcaaggagatcgagggcatcttccatgccacaaccagtgaggtgtcttggataagcagcatcatgctggcagtgatgtatgggggcggcccgattagcagcatcctggttaacaagtacgggagccgaatcgtgatgattgtaggaggctgcttaagcggatgcgggttgatagcggcatccttctgtaataccgtgcagcagctgtatgtgtgtataggggtcattggcggactcgggctggcctttaacttgaaccccgccctgaccatgattggcaaatacttttacaagcggagacctcttgccaacgggctcgcaatggccggttctccagtgtttctgtgcaccttagcacctcttaaccaggtcttctttggcatcttcgggtggagaggcagcttcttgatacttggggggctgctcctgaactgctgtgttgctggggctctgatgagacctatcgggcccaaacctacaaaggccggaaaggacaaatccaaagcatctctggaaaaagctgggaagtcgggcgtcaaaaaagatctccacgatgccaataccgatctcatcggaagacatcctaagcaggagaaacgcagcgtgtttcagaccatcaatcagttcctagacctcaccctgttcacacacagggggttcctcttgtatctctctgggaatgtgataatgttttttggcctctttgccccactcgtttttctttcttcatatgggaagtcgcaacattacagcagcgagaagagcgctttcctgctgtctatcctggccttcgtagacatggtcgccaggccttctatgggccttgtcgcaaatactaaacccatccggccaagaatccagtattttttcgcagcatctgtcgttgcgaatggagtctgccacatgctggctcccctgtcaactacctacgtcggtttttgtgtctacgctggctttttcgggttcgccttcggctggctttcctccgtgttgtttgagactctgatggacctcgtggggcctcagaggttttcatctgccgtcgggctagtaacaattgtcgaatgttgcccagtcttacttggcccaccattgcttgggcgtcttaatgacatgtatggcgactacaagtacacttactgggcctgcggggtggtccttatcattagcggcatttacctgttcatcgggatgggaataaactacaggctgcttgccaaagagcaaaaggcaaacgaacagaaaaaggagagtaaggaagaggaaacctctatcgacgttgccggaaagccaaatgaggtaacgaaggccgccgagagtccggaccagaaggataccgatggcggacctaaagaggaggaatcccctgtgtag

SEQ ID NO: 205632 - DNA, 648 bp, synthetic construct
  misc_feature 1..648: note = Description of Artificial Sequence: Synthetic coding sequence
  source 1..648: mol_type = other DNA
atgccccccgccgtgggcggccccgtgggctacaccccccccgacggcggctgggggtgggcagtggttatcggcgcttttatctccatcgggttttcatatgcattcccaaaaagcataacagtattctttaaggagattgaggggatcttccatgccaccacaagcgaggtcagttggatatcttctatcatgttggccgtgatgtatgggggcggccctatctcctctatccttgtgaataagtatggatcccgcatcgtcatgatcgtcggaggctgcctatccggctgtgggttgatcgctgcatccttttgcaatactgtgcagcagctctacgtgtgtatcggtgtcatcggcgggttgggattggcattcaaccttaacccagcccttactatgatcggcaaatatttttacaaacgcaggcccttggcgaatggcctggcaatggccggatcacctgttttcttgtgcacacttgcccccctgaaccaggtcttctttggaatcttcggctggagagggtcattcttgatcttagggggactgttgttgaactgctgcgttgccggcgcactgatgaggccaatcggacccaagccaaccaaagctggcaaagacaagtctaaagccagcctggaatag

SEQ ID NO: 205633 - DNA, 1293 bp, synthetic construct
  misc_feature 1..1293: note = Description of Artificial Sequence: Synthetic coding sequence
  source 1..1293: mol_type = other DNA
atgccccccgccgtgggcggccccgtgggctacaccccccccgacggcggatgggggtgggcagtggtgattggggcttttatctccatcggctttagctacgcattccctaagagcatcactgtgttctttaaggagatcgagggtatatttcatgccacaacaagtgaagtctcttggatatcctccattatgctcgcagttatgtatgggggcggacccattagtagcatactggtgaataagtatggatcccgaattgttatgattgtgggcggatgcctgagcgggtgcggtctgatcgctgccagtttctgcaataccgttcaacaactctatgtgtgtattggagtcattggaggacttggcctggcttttaacctaaatcctgcattaacaatgattggcaaatatttctacaagaggcgccctttggctaacggcttggcaatggcaggctcaccggtcttcctgtgtaccctggcccccctgaatcaggtgtttttcgggatcttcggctggagagggagctttctgatcctgggtgggcttctgctcaactgttgcgtagcaggggcgctgatgcgtcctatcggtcccaagcccacaaaggctggcaaggataagtctaaggccagcctggaaaaagctggtaagtccggcgtgaagaaggacctccatgacgcaaacacagacctgatcgggaggcatcccaagcaagagaagagatctgtgtttcagactatcaaccaattcttggatctgaccctcttcacccataggggtttcctcctctatctgtctggaaatgtgatcatgttcttcggcttatttgcccctcttgtgttcctttcatcgtatgggaagagccagcactatagcagtgaaaagtctgcttttctgctttctattcttgcctttgttgatatggtggctagacctagtatgggcttggtcgccaatacgaaaccgataagaccccgtatccagtacttctttgccgcctccgtagtggcaaacggcgtctgtcacatgctagccccactgtcaaccacctacgttggcttctgtgtatatgcgggttttttcgggtttgcttttggctggttaagcagcgtactctttgagacattgatggatctcgtcggaccccagcggttctcctccgccgtgggactcgtaaccattgttgagtgttgtccagtcctcctcggccctcctctcttaggcatagtgtatcttcccactaacgttgggttactgcaaaacaagcatgtccggtgggaatgttag

SEQ ID NO: 205634 - DNA, 891 bp, synthetic construct
  misc_feature 1..891: note = Description of Artificial Sequence: Synthetic coding sequence
  source 1..891: mol_type = other DNA
atgccccccgccgtgggcggccccgtgggctacaccccccccgacggtggttggggctgggcagtagtgattggagcgtttatcagcattggctttagctatgccttccccaagtcaatcactgtgttcttcaaggagattgagggcatcttccacgccactactagtgaggtttcctggatctcttccattatgctcgcagtcatgtatgggggaggcccgatttcgagcatcctcgtgaataagtacggatccaggatcgtgatgatcgtcggcggatgtctctccggctgtggtctcattgctgccagcttttgtaacaccgtgcagcagctttatgtttgtatcggcgtgatcggcggtctgggcctagcattcaacctcaatccagctctgacaatgatcgggaaatacttctacaagagaaggcccctagccaatgggttggccatggccggttctcctgtcttcctctgcacccttgcgccattaaaccaggtcttttttggaatttttggttggcgagggtcttttttgatcctgggcggtctactgcttaattgctgtgtcgccggtgccctgatgcgtcctatcgggccaaaacccacaaaagctggtaaagataagtcgaaggcctccctcgaaaaagcaggcaagtctggggtcaaaaaagacctccacgatgccaatacagacctgatcggacgccatccaaaacaggagaagcggtcagtattccagactattaatcagtttcttgacctgacattattcacccatagaggctttctgctgtacctgtcaggtaacgtaataatgttctttggcctcttcgctcccctcgtgttcctgtcctcctatggcaagtctcagcattattcgtcggaatag

SEQ ID NO: 205635 - DNA, 1371 bp, synthetic construct
  misc_feature 1..1371: note = Description of Artificial Sequence: Synthetic coding sequence
  source 1..1371: mol_type = other DNA
atgccccccgccgtgggcggccccgtgggctacaccccccccgacggtggctggggctgggccgtggtcattggcgcctttatctctatcggattttcatacgcatttcccaagtctatcacagtgttctttaaagaaatcgaggggatatttcatgcaaccacgtctgaggtgtcctggatcagttcaataatgctcgcagtgatgtatggcgggggtccaatctccagcatcctcgtgaacaaatatggatcccgcatcgtgatgattgtgggcgggtgtctcagcgggtgtggattaattgctgcatccttttgtaacactgtccagcagctctacgtttgcataggcgtgatcgggggcctaggcttagcattcaaccttaatccagccctgacgatgatcgggaagtatttctacaagagaaggccgctggctaatggcctggcaatggccgggagcccagtctttctgtgtaccctggctccactaaaccaggtgttttttgggatttttggctggaggggaagtttcctgattttgggcggactgctcctgaactgctgtgtggcgggtgcgctcatgcggccaatcggaccgaagcctactaaggccggcaaagataaaagtaaggccagtttagagaaggcaggcaagtccggcgtgaaaaaggatttgcatgatgccaataccgatctgattggcagacatccaaaacaggaaaaacgaagtgtgttccaaactattaaccaattcttggatctcactctgtttacgcaccggggatttctcctttatctgagcgggaacgttatcatgtttttcgggcttttcgctcctctagtgtttctgagttcatatggaaagtctcagcattacagttctgaaaagtctgcctttttgttgtctatactggctttcgttgacatggtcgcccgacctagtatgggcctggtagcaaatacaaagcctattaggcccagaatccagtacttctttgccgctagcgtcgtcgccaatggcgtgtgccacatgctggccccactgtccactacatacgtcggattctgtgtgtatgccggctttttcggcttcgcattcggttggctcagttccgtcctatttgaaacgcttatggatttagtgggaccacagcgtttttcgtccgcagtggggctcgtcaccattgttgagtgctgcccagtgctactgggacctcctttgctggggcgcctgaatgacatgtatggcgattacaagtatacatactgggcgtgcggggttgtactgatcatcagcggcatttatctgttcattggcatggggatcaattaccgcctgctagctaaagagcagaaggccaatgaatag

SEQ ID NO: 205636 - DNA, 1503 bp, synthetic construct
  misc_feature 1..1503: note = Description of Artificial Sequence: Synthetic coding sequence
  source 1..1503: mol_type = other DNA
atgccccccgccgtgggcggccccgtgggctacaccccccccgacggcgggtggggctgggccgtggtgattggggcctttatttctataggcttcagttacgccttccctaagagcatcacagtgtttttcaaagaaatcgagggaattttccatgccaccacttctgaggtgagttggattagttccatcatgcttgcagtcatgtacggtgggggccccatcagctcaattctagtgaacaagtatggatcacgcatcgtgatgattgtcgggggttgcctctccggatgtggtctcatcgccgcctctttttgtaacaccgtgcagcagttatacgtctgtattggcgtcatcggcgggctgggactggcattcaacctgaaccccgccctgacaatgattggaaagtacttttacaagcggagacctcttgccaatgggctggcaatggctggaagccccgtgtttctgtgcaccctcgcccctctgaatcaggtgttcttcggtatcttcgggtggcgtgggtctttcctcatcctgggcgggcttctgctgaactgttgcgtcgccggtgccttgatgcgacccattgggcccaagccaaccaaggcagggaaggacaagtctaaggcatccctggagaaagctggtaaatcgggggtgaagaaggatctacatgacgcgaacaccgatttgattggaagacaccccaaacaggagaagcgttctgtcttccagaccattaaccagttcctggacctgacattgttcacccatcgcggatttcttctttacctgtctgggaacgtcatcatgtttttcggtttgttcgctccactggtgtttctgtcttcctacggtaagagccagcattatagctcagagaagagcgccttcttactttcaattctggctttcgttgacatggtcgcgcggccaagcatgggcctagtggccaatacaaagcccatcaggcctagaattcaatactttttcgccgccagcgttgtcgccaacggcgtgtgccacatgttagctcctctttccaccacttatgtcggcttctgcgtttatgccgggtttttcgggttcgccttcggttggctctcctctgtgctcttcgaaaccttaatggacctcgttggaccgcagagattttcttctgctgtggggctggtcacaatagtcgagtgttgccctgtgctgctcggcccaccactattagggcgtttgaacgatatgtacggggattacaagtacacctattgggcttgcggagtcgtgcttatcatctcgggaatatatctattcattggtatgggcatcaattataggctgctggcgaaagaacaaaaagccaacgagcaaaaaaaagagtcgaaggaagaggagacatctatagacgtcgcaggtaaacctaatgaggtcactaaagctgctgagtccccagaccagaaagatactgacggcggccccaaagaagaggaatctccagtttag

SEQ ID NO: 205637 - DNA, 606 bp, synthetic construct
  misc_feature 1..606: note = Description of Artificial Sequence: Synthetic coding sequence
  source 1..606: mol_type = other DNA
atgaagcacgtgaacgagcggttccaggacgagaagaacaaggaggtggtcctgatgtgtatcggggtgacaagcggagtcggaagactcctgttcggcaggattgcagattacgtccccggcgtcaaaaaagtctaccttcaggtgcttagcttttttttcattgggttaatgagcatgatgattcctttgtgtagcatattcggcgcactcatcgcagtgtgtctgattatgggcctctttgatggctgttttatctctattatggcacccatcgcctttgaactggtgggagcgcaggacgtctcacaggccatcggcttccttctcggctttatgtctataccgatgaccgtggggccacctatagcggggcttctgagggataagctgggatcttacgatgttgctttttacctggccggcgtgccaccattgattggtggcgccgtactatgttttatcccttggattcattccaaaaaacagagagaaatctccaaaacgactggcaaggaaaaaatggagaagatgctcgagaatcaaaactcgctgctatcaagctctagcgggatgtttaagaaggagagcgactcaatcatctag

SEQ ID NO: 205638 - DNA, 1548 bp, synthetic construct
  misc_feature 1..1548: note = Description of Artificial Sequence: Synthetic coding sequence
  source 1..1548: mol_type = other DNA
atggtgctgagccaggaggagcccgacagcgcccggggcaccagcgaggcccagccactcggacccgcacccacaggtgccgcacctccgccgggtcctggaccaagcgattcaccagaggccgcagttgagaaagtggaggttgaactcgcggggccagccaccgcagaacctcacgaaccccccgaacctccagagggcggctggggttggctggtcatgcttgctgccatgtggtgcaatggctccgtcttcggcatccagaacgcttgtggggtcctgttcgttagcatgctcgaaaccttcggatctaaggatgatgataaaatggtttttaaaactgcctgggtcggttccctttcaatggggatgatttttttttgttgtcctatcgtgtccgtgttcaccgatttgtttggatgtcgcaagaccgcagtagtaggggccgcagtgggcttcgttgggctcatgtcctcctccttcgtctcttccattgaaccgttgtacttaacttacggtataatcttcgcatgtggctgttcgtttgcctatcagccctctctcgtgattttgggccattactttaaaaaacgcttgggtctcgtcaacgggattgtcacagccggctccagtgtttttactatcttgttacccctgctgttgcgggtgttaatcgattcagtaggcctcttctacaccctgagagtcctttgtatcttcatgttcgtgctgttcctggccggatttacgtaccgccctttggccacttctaccaaagacaaagagtccgggggctccggaagttcactcttcagccgcaagaaatttagccctcccaagaagatcttcaactttgctatcttcaaggtaacagcctatgccgtgtgggctgttggcatccccctggcactgttcggctactttgtgccctacgttcacctcatgaagcacgttaacgaaagatttcaggatgaaaaaaacaaggaggtcgtccttatgtgtatcggagtgacctctggagtggggcggcttttgttcggtcggatcgcagactacgtgcccggtgtcaaaaaggtgtatctacaggtcttatcctttttctttatcggcctcatgtctatgatgattccgttgtgcagtatctttggggccctcatagccgtgtgtctgattatgggtctttttgacggctgctttatttcaatcatggctcccattgcgtttgagctggtcggggctcaagatgtgtcccaggctattggtttcctcctgggtttcatgagcatccccatgaccgtaggacctccgattgccggactacttcgcgacaagctgggcagctatgacgttgctttttacctagcaggcgtcccaccacttataggcggagctgtactgtgtttcatcccatggattcattccaaaaaacagcgagagatctctaagaccaccggaaaagaaaagatggaaaagatgttggagaatcagaactccctgctcagtagcagcagcggaatgttcaagaaggagtcagactcaataatctag

SEQ ID NO: 205639 - DNA, 651 bp, synthetic construct
  misc_feature 1..651: note = Description of Artificial Sequence: Synthetic coding sequence
  source 1..651: mol_type = other DNA
atggtgttcaagaccgcctgggtgggcagcctgagcatgggcatgatctttttttgttgccccatcgtgagtgtgtttacagacttgtttggatgccgtaaaaccgctgtagtgggggctgcagttggtttcgtgggactgatgtcctccagtttcgtcagttctatcgagccattgtatctaacctatgggataatttttgcttgtgggtgttccttcgcttaccaaccctccttggtgattctgggacattacttcaaaaagaggcttggacttgtgaacggaatcgtaacagctggatcttctgtgtttaccatcctattgcctcttctacttcgggtcctgattgatagcgtagggctgttctacactctgagggtcttgtgcatattcatgttcgttttattccttgcggggttcacctatagaccgctcgccacgagcacaaaagacaaagagtctggcggaagtgggtcctctctcttttccaggaaaaaatttagccctccaaagaagattttcaactttgcaatctttaaggtaacggcatacgcagtgtgggccgtggggattcccctcgccttgtttggctatttcgttccctacgtgcacctggctaagttctcctttgtgattctgaaatatgaatag

SEQ ID NO: 205640 - DNA, 636 bp, synthetic construct
  misc_feature 1..636: note = Description of Artificial Sequence: Synthetic coding sequence
  source 1..636: mol_type = other DNA
tgatgggtgggcagcctgagcatgggcatgatcttcttctgctgccctatcgtgagcgtattcacggatctgtttggctgtagaaagacagctgtcgtcggggcagcggtcgggtttgttgggctgatgtcgtcttcgtttgttagctccatagagccactatacctaacctatggaattatattcgcctgcggatgcagctttgcttatcagcctagtctcgtcatcttagggcattacttcaaaaagcgtcttgggctggtcaacgggatagtgacagctgggtcttccgtgttcactatcctgctgcccctgctgctccgagtcctgattgattcagtagggctcttttacactcttagggtgctctgtattttcatgttcgtactcttcctcgcgggatttacctatcgacctcttgctacatccacaaaggacaaagagagcggcggttcaggctcaagcctgtttagcaggaaaaaattctctcctccaaaaaaaatattcaatttcgccatatttaaggtcaccgcatatgcagtttgggccgtggggattccattggccttgttcggttacttcgtcccttacgtacacctggctaaattctccttcgtcattctgaagtacgagtag

SEQ ID NO: 205641 - DNA, 621 bp, synthetic construct
  misc_feature 1..621: note = Description of Artificial Sequence: Synthetic coding sequence
  source 1..621: mol_type = other DNA
tgatgggtgggcagcctgagcatgggcatgatcttcttctgctgccctattgtgtctgtcttcaccgacctgtttggctgtagaaaaactgcagtggtgggggccgctgttgggttcgtggggttgatgagcagtagttttgtgtcaagcattgagccgttgtatttgacttatggtatcatcttcgcttgtgggtgctccttcgcctatcaaccttccctggtgatcctaggccactatttcaagaaacggcttggactcgtaaatggaattgtgactgcaggatccagcgtctttacaattctgctcccgttgttgttgcgtgttctgattgacagcgtgggattgttctatacactgcgggtgctgtgcatcttcatgtttgtgctattcctagctggcttcacgtatcggcccctagctacttcgacaaaagacaaggaatcaggtggcagcgggtcatcactttttagcaggaaaaagttcagtccacctaagaagatattcaactttgccatattcaaggtcacggcttacgctgtctgggccgtcggcatacccctcgcgctgttcggctactttgtgccatatgtgcacctcgtgagtatgcttctccattag

SEQ ID NO: 205642 - DNA, 981 bp, synthetic construct
  misc_feature 1..981: note = Description of Artificial Sequence: Synthetic coding sequence
  source 1..981: mol_type = other DNA
atggtgctgagccaggaggagcccgacagcgcccggggcaccagcgaagctcaacctcttggccctgcaccgaccggagctgcccctccacccggtccagggcccagtgatagcccagaagccgctgttgaaaaggttgaagtggaacttgccggccctgccacggcggaaccccacgagccgcctgaaccaccggaggggggatggggctggttggtgatgctggccgcaatgtggtgtaatgggtcagtcttcgggatccaaaatgcatgcggcgttctgtttgtgtccatgctagagacgttcggatccaaggatgatgataagatggtattcaaaacagcttgggtgggcagtctgagcatgggaatgattttcttttgctgtcccattgtgagtgtgtttaccgacctgttcggttgccgcaagactgccgttgtgggcgcagccgtaggcttcgtgggcttaatgagctcaagttttgtaagctccattgagcctttatatctcacctacggcatcatatttgcatgtggttgctcctttgcttaccagcccagtctcgtcatccttggccattacttcaaaaagcgtctgggattggtaaacggcatagttactgctggctcctctgtgtttacaatcctgctgcctctactactgagggtgctcattgacagtgttggacttttctatactctaagagtcctgtgtatcttcatgttcgtcctgttcctagccggcttcacataccgccctctagccacatcaacaaaggataaggagtccggcggatcaggtagttctctgtttagcaggaaaaagttcagtcccccaaaaaatttccaattctgccacctgcagggtgattctctgtgttccgtgggatcgtggaacaccacttgcacgttctggatcctttgcgctctgtgttctctgggcgagtatgctccaagtctgatcatgaatataacaatctag

SEQ ID NO: 205643 - DNA, 1461 bp, synthetic construct
  misc_feature 1..1461: note = Description of Artificial Sequence: Synthetic coding sequence
  source 1..1461: mol_type = other DNA
atggccaaggtgaaccgggcccggagcaccagcccccccgacggcgggtggggatggatgatagttgctggatgctttctggtaaccatttgcacccgggccgtgactagatgtatttcaatcttctttgtggagtttcagacctatttcactcaggactacgcccagaccgcctggattcactctattgtagattgcgtcaccatgttgtgcgccccccttgggtctgttgtatccaatcacctgagttgccaggtaggcatcatgctgggtggcctgctggcttccacaggacttattctgagctcgttcgctaccagtcttaagcatctctacctgacactgggcgttctaacggggctcgggttcgctttatgttacagtcctgcaatcgccatggtcggtaaatatttttcgagacggaaagctttggcatatgggattgcaatgagtggctcaggaattgggactttcatattggcccccgtcgtccagctgctgatcgagcaattctcttggagaggtgccttgttaattttgggcgggtttgtcttgaacctgtgcgtgtgtggggctctcatgcgtcccataactctaaaagaggaccatacaacccctgagcagaatcacgtctgccggacacaaaaagaagacatcaagagagtgagcccttatagtagcctcactaaagagtgggcacagacctgtttgtgttgctgcctccagcaggaatattcattcctgctcatgagcgactttgtggtcctggccgttagcgtgctctttatggcctacgggtgctctcccctctttgtctacctggttccatatgccctctctgtgggggttagtcatcagcaggccgcattcctgatgtccatcctgggagtcattgacattatcggcaatattacattcggctggctgaccgataggaggtgccttaagaattatcagtacgtgtgttatcttttcgcagtagggatggatggcttgtgttacttgtgcttacctatgctgcaaagccttcctttacttgtgccatttagctgcacgtttggctatttcgacggggcctacgtgacgttgatccctgtcgtgaccacagaaattgtggggaccacatcactctctagcgccttgggagtggtgtactttctccatgctgtgccctacttggtgagtccacccatagcaggtcggctggtcgacaccacagggtcatacactgcagcattcctattgtgtggctttagcatgatcttctcttcagtgctgctagggttcgccagactaattaaaagaatgcggaagacacaattgcaattcattgccaaggagagcgacccaaaactgcagctctggaccaacggcagcgttgcttacagtgtagcgagagagctggaccagaaacatggagagcccgtcgccacagccgtgcccggctatagcctcacctag

SEQ ID NO: 205644 - DNA, 1551 bp, synthetic construct
  misc_feature 1..1551: note = Description of Artificial Sequence: Synthetic coding sequence
  source 1..1551: mol_type = other DNA
atgcccagcggcagccactggaccgccaacagcagcaagatcatcacctggctgctggaacagccgggcaaagaagagaagcgcaaaactatggctaaggtcaaccgggcccgttccactagccctccagatggcgggtggggatggatgattgttgcgggctgtttcctggtcactatctgtaccagggcagtcacgagatgcatctcaattttcttcgtggagttccagacatactttacacaggattatgctcaaacagcttggatacactccattgtggactgtgtgaccatgctgtgtgccccgcttggctccgtcgtgtcaaatcatctgtcctgccaggtggggattatgctgggcggcctcctcgccagcaccggcctgattcttagcagcttcgcgactagcctgaaacacctctatctcacccttggtgtgctcaccggcctgggatttgctttatgctattcccctgcaattgcaatggtcggaaaatacttttcccggcgcaaagctctcgcgtatggcatcgctatgtctggttccggtatcggaacttttatccttgctcctgtggtgcagcttctgattgagcagttttcttggcgcggagccttgctcatactgggggggtttgtgctcaatctgtgcgtttgcggagccctgatgagacctatcacccttaaggaagatcacaccaccccggaacagaaccacgtgtgcagaacgcagaaggaggacatcaagagggtgagcccctactctagtttgactaaagaatgggcgcagacttgtctgtgctgctgcctgcagcaagaatacagcttcttattaatgagcgactttgtggttctcgcagtcagtgtattgtttatggcttacggatgcagcccactctttgtctacctggtgccttacgcactgtccgtgggcgtgagccatcaacaggccgccttcctcatgtcaatattgggagttattgatattatcggcaatatcaccttcggctggctcaccgatagaagatgtctcaaaaattatcaatacgtgtgttacctcttcgctgtggggatggacggattatgctacttgtgtctacctatgttgcaatcactgcctctgctggtcccattttcttgcacatttggatatttcgacggtgcgtacgtaacactgatccctgtggtgacaacggagatagttggcaccaccagcttgagctcagctctgggagttgtgtactttctccacgccgtcccatacctggtctctcctcccatcgcaggccggctggttgacacaacagggagctacacggccgccttcttgctatgcggtttctctatgatctttagcagtgtactgctgggcttcgcccggctaattaagcgaatgcgaaagacacagcttcaatttatcgctaaagagtctgacccaaaactgcagctatggaccaacggaagcgtggcctatagcgtggccagagaactcgaccagaagcacggtgaacctgtggcaacagcggtccctgggtatagcttgacttag

SEQ ID NO: 205645 - DNA, 78 bp, synthetic construct
  misc_feature 1..78: note = Description of Artificial Sequence: Synthetic coding sequence
  source 1..78: mol_type = other DNA
atgcccagcggcagccactggaccgccaacagcagcaagatcatcacatggttgctggagcagccgggcaaagaatag

SEQ ID NO: 205646 - DNA, 453 bp, synthetic construct
  misc_feature 1..453: note = Description of Artificial Sequence: Synthetic coding sequence
  source 1..453: mol_type = other DNA
atgcggcccatcaccctgaaggaggaccacaccacccccgagcagaaccacgtgtgtaggacacagaaggaggacattaagcgggtgagtccctactcttcccttacaaaagaatgggcccaaacatgcctgtgctgctgtctgcagcaagagtatagttttttactaatgtcagactttgttgtgctggcagtaagtgtactattcatggcctatggctgcagccccctttttgtttatttagtcccctatgctctcagcgttggagtctcccaccagcaggccgcgttcttaatgtctattctaggagtcatcgacataatcggcaatattaccttcgggtggttgacagacaggaggttctgcataaagacgttcggaatattccggaaatcagtgagaaagatgtacatcctgcgaagtaccattttacatttctacacggaattctag

SEQ ID NO: 205647 - DNA, 1842 bp, synthetic construct
  misc_feature 1..1842: note = Description of Artificial Sequence: Synthetic coding sequence
  source 1..1842: mol_type = other DNA
atgggccggggcggcggcggcctggacgtgggcggcggcggcgaggggagccgcgatcggttatcacgtgacgggttggctagttggggcgctgagccaggtggcggaggttctggatctggctcttctagtccacccagttcctcttcatgttcatcaagaaataaatatcagccccagtctgggtccagtggcccctctagtcactctccaccagccgctatggcccttcagtcacaggcttcagaagaggcgaaaggaccttggcaggaggccgaccaggagcagcaggagcctgtgggatctcctgaaccagaaagcgagccagaacctgagccagagcctgagcccgtccccgtccctccacctgagccgcagcccgaaccccagcctctccctgatcccgcacccttaccggagctcgagttcgagtctgagcgcgtgcatgagcctgagcctacacctacagtggagacccgaggcacagcccgcggcttccagccccctgaggggggattcggctgggtggttgtgtttgctgcaacatggtgcaacgggtcgatctttggaatccataatagtgttggcatcctatatagcatgcttcttgaggaggaaaaggagaagaatcggcaagtggagttccaggcagcttgggtgggcgctctcgctatgggcatgatctttttttgcagtcctatcgtatcaattttcacggatcggctgggttgcaggatcaccgctactgccggggccgccgtggcgttcatcggtctgcatacatccagctttactagcagcctcagtttgaggtattttacttacggtatcctgttcggctgcgggtgttccttcgcgttccagcccagcctggtcattctgggccactactttcagagaagattaggactcgccaatggagtcgtgtcggccggcagttccattttcagcatgagttttccttttctgattaggatgttaggggacaaaattaagcttgcccagacattccaagtactgtcaaccttcatgttcgtgttaatgctgctgtcgttgacttacagacctctgcttccatcttctcaggataccccttctaagcgaggcgtcagaaccttgcatcagcgattcctggctcagctcagaaaatactttaacatgagggtttttagacaacgcacataccggatctgggcttttggcatcgccgccgcggctctcggctattttgtgccctacgtccatctgatgaaatacgtagaagaagagttctcagagattaaagagacatgggtccttctagtttgcatcggggccacaagcggattggggagactggtatctggccatattagcgattccatcccaggtctgaagaaaatttatcttcaggtgctgtcttttctgctgctggggctgatgtctatgatgatcccgctgtgtagagattttgggggactaatcgttgtgtgcctgtttctgggcctctgcgatggattttttatcacgatcatggctccgatagcattcgagctcgtagggcctatgcaggcctcacaagccatagggtacttactcggaatgatggccttgcctatgattgctggaccacctattgcgggactgctgaggaactgcttcggtgactaccacgtggctttttacttcgcgggggtacccccaatcattggggcggttattctgttcttcgtgccattaatgcaccagagaatgttcaaaaaagagcagcgtgactcgtcaaaggataagatgcttgcaccggacccagatccaaacggtgagttgctgccaggcagcccgaaccccgaggagccgatctag

SEQ ID NO: 205648 - DNA, 1437 bp, synthetic construct
  misc_feature 1..1437: note = Description of Artificial Sequence: Synthetic coding sequence
  source 1..1437: mol_type = other DNA
atgccccccatgcccagcgccccccccgtgcaccccccccccgacggcggatggggttggattgttgtgggcgccgccttcatttctatcggttttagctacgccttccccaaagcggtcactgtcttcttcaaagaaatacaacagatctttcatactacatactctgaaattgcctggatctcatcaattatgctcgccgtgatgtacgcaggcggcccagtgtcgagcgtgctcgtgaataaatacggaagcagacctgtagtgatcgccggcgggcttctgtgttgtctgggcatggtccttgcttccttttcaagtagtgtggtccagctttacctgactatgggcttcattactggcctgggactcgcattcaacttgcagcctgccttgaccattatcggcaaatatttctacaggaagcgacctatggctaatggacttgctatggcggggtcaccagtgtttttgagctccctcgccccttttaaccagtatctgttcaacacattcggttggaagggatcgtttcttattctcggatctttactgctcaatgcatgcgtagcggggtctctgatgaggcccctcggccctaaccagacgacatcaaaatcaaagaacaaaaccggcaagaccgaagatgactcaagccctaaaaagatcaagactaaaaagagcacctgggagaaagtgaacaagtatctggactttagccttttcaagcatcgcgggttcttgatttacttgtcaggcaatgtgatcatgttcttaggtttctttgccccgatcattttcctggccccatacgccaaggaccagggtatcgacgaatattccgctgctttccttctgtcggtcatggcttttgtggacatgtttgctaggccctcagttggccttattgcaaacagcaaatatatccggcccaggatccagtatttcttttccttcgcaatcatgttcaatggagtctgtcacctgctgtgtcctttggctcaggactatacaagccttgttctctacgctgtcttcttcgggctcggctttggcagcgttagctccgtgctgtttgagactctcatggatctcgttggtgccccgcggtttagctctgctgtgggcttagtgacaattgttgagtgcggccccgtgctcctggggccacccctggccgggaaattagttgatttgactggcgagtataagtatatgtacatgagctgcggcgccattgttgtggctgcgtcggtgtggttgctcatcggtaacgcaatcaattaccgcctgctcgcaaaggagaggaaagaggaaaatgcaaggcagaaaacacgggagtcagaacccctgagcaaatccaaacatagcgaggatgtaaacgtgaaggtgtcaaatgcccagtccgtcacgtccgaaagagagactaatatctag

SEQ ID NO: 205649 - DNA, 1140 bp, synthetic construct
  misc_feature 1..1140: note = Description of Artificial Sequence: Synthetic coding sequence
  source 1..1140: mol_type = other DNA
atggtgctggccagcttcagcagcagcgtggtgcagctgtacctgacaatgggattcattaccggcctgggattagcgtttaatctacagcccgctctcacaatcatcggcaaatacttttatcgaaagaggccaatggcaaatggactggccatggcaggcagtcccgtgttcctttcctccttggcgccatttaatcagtatctttttaacactttcggctggaagggcagtttcttgatcctgggtagcctgctgcttaatgcatgcgttgcaggaagcttgatgcgcccgctgggcccaaatcagaccacatccaagagcaaaaataagaccggtaagacagaagacgattcctcccccaaaaaaatcaaaaccaagaagtccacctgggagaaggtcaacaaatatctcgacttcagcttgttcaagcatcgagggtttttaatttatctgtccggcaacgtgatcatgttccttggcttttttgctcctataatctttttggctccgtacgctaaggatcaaggaattgatgaatacagcgcggcattcctcctctccgtaatggcattcgtcgatatgttcgctcgtccctcagtaggactcatcgctaactccaagtatatccggccacgcatccagtacttcttcagttttgctataatgttcaatggcgtctgccacttgctatgccccctggcccaagattacactagtctcgtcctgtatgctgtcttcttcggactgggctttggcagcgtgtcctccgtgcttttcgaaacactgatggacctagtgggagctccccgtttctctagtgctgtcggtctggtgacaatagtggagtgcggacccgtgctgttgggcccccccctcgccggcaaactcgtagatttaaccggggaatataagtatatgtacatgagttgtggtgccatcgtggtagccgcctcagtgtggctgcttattggaaacgcgatcaactatcgcctcttggccaaggagagaaaggaagagaatgcgagacaaaaaactagagagtctgagcccctttccaagtccaagcattctgaagacgtcaatgtaaaggtctccaacgcccagagtgtgacgtccgagcgcgagactaatatctag

SEQ ID NO: 205650 - DNA, 1437 bp, synthetic construct
  misc_feature 1..1437: note = Description of Artificial Sequence: Synthetic coding sequence
  source 1..1437: mol_type = other DNA
atgccccccatgcccagcgccccccccgtgcaccccccccccgacggtggctgggggtggatagtcgtgggcgcagctttcattagcattggcttttcctatgccttccccaaggccgtgaccgttttttttaaggagatccagcaaatatttcacactacttatagcgaaattgcatggatttctagcatcatgctcgccgttatgtatgcgggcggccccgtctcatctgtgctcgttaataaatacggatctcgaccagtggttatcgcgggtggacttttatgctgcctgggaatggtcctggcttccttcagctcctccgtggtgcagttgtacctcactatggggtttataaccggcctgggcttggccttcaatctgcagcctgctctgactattatcggtaaatacttttatcggaaaagacccatggccaatggcctcgccatggctgggagtccagtttttctttcgtcactggccccttttaaccagtacctctttaacactttcggttggaagggttcatttctgatccttggatccctgctgctgaacgcctgcgttgctggtagcctaatgaggcccctgggtcctaatcaaaccacttcaaaatccaaaaataagaccggtaaaactgaggacgactctagtccaaaaaagattaagactaagaaatccacctgggagaaggtgaataaatacctcgactttagcctttttaagcacagaggatttctgatttatctgagcggaaacgtgattatgtttctgggcttcttcgcaccaatcattttcctagccccttacgcgaaagaccaggggatcgacgagtactccgctgctttccttttgtccgtgatggccttcgtggacatgttcgccaggccatcagtgggcctgattgcgaatagcaaatatattcggccccggattcaatacttcttctccttcgccattatgttcaatggggtgtgccacttgctctgtccactggcccaggactacacctccctggtgttatacgccgtgtttttcggcctcggattcgggagcgtctcaagcgtgttgtttgaaaccctcatggatctggtgggagctccacgcttcagctcagcggtgggtttagttactatagtggagtgcggccccgttctgcttggaccacccctcgcgggaaagctcgtagatctcactggggagtacaagtacatgtacatgtcttgcggagctattgtcgtggccgctagtgtgtggttgctgatcgggaacgccatcaattatcgcctgttagcaaaagaacgaaaggaagagaacgcaaggcagaagacgcgagaaagcgaaccactgagcaaaagtaagcacagcgaagacgtgaacgtgaaagtgtcgaatgcccaaagcgtgacctcagaacgtgagaccaacatctag

SEQ ID NO: 205651 - DNA, 1437 bp, synthetic construct
  misc_feature 1..1437: note = Description of Artificial Sequence: Synthetic coding sequence
  source 1..1437: mol_type = other DNA
atgccccccatgcccagcgccccccccgtgcaccccccccccgacggtggctggggatggattgtcgttggcgccgcattcataagcatcggatttagctatgctttcccaaaagccgtgacggtctttttcaaagagatccagcaaatcttccatacaacatactccgagatcgcatggatctctagtatcatgctggctgtcatgtacgccggggggcccgtgtcttcagtgctcgtgaataagtacggaagcaggccggttgttatcgccggtggactgctctgttgtctcggaatggtattagccagcttttcttcttcagtcgtccagctgtacctaacaatgggattcatcactggactcggcctggcattcaatctgcaaccggccctgactataattggcaagtacttttatcgcaagcgaccaatggcgaacgggcttgccatggctgggtctccagttttcctgtcctctttggctccgttcaaccagtatttatttaacacattcggttggaaaggcagttttctcatcttaggaagcttactcctgaacgcttgtgtagcgggcagcctcatgcggcctttaggccctaatcagaccactagcaaatcaaaaaacaaaaccgggaaaaccgaggatgactcatcccctaagaaaattaaaaccaagaagtcaacttgggagaaagtgaataagtatctggattttagtctttttaaacatcgggggttccttatctatctgtccggaaatgtgatcatgttcctcgggttctttgctccaattatctttctcgccccatacgctaaggaccagggcatagatgagtattctgctgccttcctgttgtccgtcatggcgtttgtggatatgttcgcgcgacccagtgtgggactcatcgctaattctaaatatatcaggccgcggatacaatacttctttagcttcgccatcatgtttaatggtgtgtgccacctgctctgtccattggctcaggattatacgtcgctggtcctctatgctgtgtttttcggcctgggctttggcagcgtctcctccgttctctttgaaactcttatggatctggtcggcgcaccacgattctcttccgctgtcgggctggtgactatcgtggagtgtgggcccgttttgttaggccccccactggccgggaaactggttgatctaactggggaatacaagtatatgtacatgagctgtggagccattgtggtcgccgcctccgtctggctgctgattggtaacgccattaattaccgcttactggccaaagagcgcaaagaggaaaatgcacgtcaaaaaacccgcgagtcagagccactcagcaaatccaagcactcggaggacgtgaacgtgaaagtcagtaatgcacagtccgtcacatccgaacgggaaacgaatatttag

SEQ ID NO: 205652 - DNA, 1437 bp, synthetic construct
  misc_feature 1..1437: note = Description of Artificial Sequence: Synthetic coding sequence
  source 1..1437: mol_type = other DNA
atgccccccatgcccagcgccccccccgtgcaccccccccccgacggaggttggggctggattgtggtgggtgcagccttcatcagtatcggtttttcctatgcctttcccaaggccgtgacagtgtttttcaaagaaattcagcaaatattccacacaacgtatagcgagatcgcctggatcagctctataatgctggccgtcatgtatgcagggggacctgtgtcttccgtacttgtgaataagtatgggagccgccctgtggtgattgcagggggcctattgtgttgcttgggcatggtgctcgcttcttttagcagtagcgtggtccagctttatctgaccatgggcttcattacaggcctcggtcttgcattcaatctgcagcccgctctgacaattattggcaagtacttctatcggaaaagacctatggccaacggactcgcaatggcaggttctcccgtgtttctcagtagtctggcaccgttcaaccagtacctcttcaacaccttcggttggaaaggaagcttcctgattctgggtagcttgcttctcaatgcatgcgttgccggaagcctcatgagacctctcggccctaatcaaacaactagcaaaagcaaaaacaagacgggcaaaaccgaggacgactcttctcctaagaagatcaaaaccaagaagtcaacgtgggagaaggtgaataagtatctggatttttctctgttcaagcatcgtggatttctgatttacctttccggtaatgttattatgtttttagggttttttgcgcctatcatcttcttagccccatacgctaaggaccagggcatcgatgagtattcagcggcatttcttctgtccgtgatggctttcgttgacatgttcgcccgtccctccgtcggtctgatagcaaactccaaatacatacgccctagaatccagtattttttttcattcgctattatgtttaacggagtctgtcatcttttatgtccactagcacaggactacacatctctggtgctgtacgcagtgtttttcggcctggggttcggaagcgtatcatcagtactcttcgaaacattaatggacctggtgggtgcccctaggttctcttcagcggtggggctggtgaccatagtggagtgcgggcccgtcctattaggacctccactagcaggcaaactggtggacctaaccggcgagtataagtacatgtatatgagttgtggagctatcgtggtggcagcctcggtatggctgcttattgggaatgcaatcaattataggcttctggccaaagagcggaaagaggaaaacgcacgccagaagacgcgggaatccgaaccactgtcaaagtccaagcatagcgaggatgtaaatgtgaaggtgtctaacgctcaaagcgtcacttcggaaagggaaacaaacatttag

SEQ ID NO: 205653 - DNA, 1530 bp, synthetic construct
  misc_feature 1..1530: note = Description of Artificial Sequence: Synthetic coding sequence
  source 1..1530: mol_type = other DNA
atggagctgaagaagagccccgacggcggctggggctgggtgatcgtattcgtgagcttcctgactcagttcctgtgctacggatccccccttgctgttggcgtgttgtacatcgagtggctcgacgcttttggcgagggcaaagggaagactgcctgggtggggtcccttgcttctggagttggactgctggcgtccccagtgtgcagtctttgcgtcagttcctttggggcacggccagtcaccatcttttctggcttcatggtcgccggcgggctaatgctgtccagttttgcccctaatatctactttttgttctttagttatgggatagtcgtaggattgggctgtgggctgctatataccgcgactgttacgattacttgccagtacttcgatgaccgccgagggctggctttaggtctgatcagtactggatctagcgttgggctgttcatttacgccgctctgcagcgcatgctcgtggaattctacggcctcgacggctgtttgctgattgtcggggccctggctttgaacatccttgcatgtggctctctgatgaggccactacaatcaagtgattgccccttacccaaaaaaatcgctcccgaagaccttcccgacaagtactccatctataacgaaaagggaaaaaatctggaagagaacatcaacattctggacaaaagttattctagtgaagaaaagtgtagaatcacattagccaatggggattggaagcaggactccctactccacaagaacccgacagtaacccacactaaggagccagagacatacaaaaagaaggtggccgagcagacatacttttgtaaacagcttgctaaacgaaagtggcagctgtacaagaactattgcggcgagactgtggcactgttcaaaaacaaggtcttttcagctctgttcattgcgatattactttttgatattggaggcttccccccaagtctactcatggaggacgtggctaggagctccaacgtaaaggaagaagaatttattatgcctttaatctccattatcggaatcatgacagctgtgggaaaacttctccttggtattctggcggactttaagtggatcaatacgctgtacctctacgttgctactctgatcatcatgggtctggctctgtgtgcgattccttttgccaaaagctatgtcaccctggccctgctgtccggtatcctcggtttcctcactggaaactggagcattttcccgtacgtgactacaaagactgttgggattgagaagttagcccacgcctatggaattctgatgtttttcgccggactgggaaacagcctcgggcccccaattgtcggctggttctacgattggacacagacatacgacatagccttctatttctctgggttttgtgtgctgctgggagggttcatcctgttattagcagcattacccagctgggatacctgcaataagcaactgcctaagcccgctccgacaacattcctgtataaggtcgcgagtaacgtatag

SEQ ID NO: 205654 - DNA, 1530 bp, synthetic construct
  misc_feature 1..1530: note = Description of Artificial Sequence: Synthetic coding sequence
  source 1..1530: mol_type = other DNA
atggagctgaagaagagccccgacggcggctggggctgggtgatcgtgtttgtatccttcctgacacaatttctgtgttacggcagcccactagccgtgggtgtgctctatatcgagtggcttgatgcgtttggagagggtaagggcaagactgcctgggtgggctctctcgctagtggagtcggcctgttggcatcccccgtctgtagcctctgtgtgagctcctttggcgcccgtcctgtaacgatttttagcggcttcatggtcgccggcggactgatgctctccagctttgcccccaatatttattttctctttttcagctatggaatcgttgtgggtctagggtgcggtctgctttatacagccactgtgactataacctgtcagtatttcgatgatcgccgggggttggcactgggactcatcagtacgggcagcagcgttggtttgtttatttatgccgccctccagaggatgctcgttgagttctacgggctggatggttgtctgctgattgtaggggctctggccttgaacattcttgcgtgtggttctttgatgaggcctcttcaaagctctgactgccccctccccaagaagatcgcacctgaggaccttccagacaagtattccatttataatgaaaagggaaagaatctggaagagaacataaatattctggacaaatcatatagcagcgaagaaaagtgtagaataacgctggccaacggagattggaagcaggattctttgttgcataaaaaccccacagtcacacacacaaaagagccagagacatacaagaaaaaagttgcagagcagacctacttttgcaagcaattggcaaaacgcaagtggcagctatataaaaattactgcggcgaaacagtcgccttgtttaagaataaggtgttctctgctttatttattgctatacttctgtttgatattgggggcttccctccctctctgctgatggaagatgttgcacgttcatcaaacgtcaaggaggaggagttcatcatgcccttgatttcaatcatcggaatcatgacagcagttggaaaactgttgctgggcatactggccgacttcaaatggatcaacaccttgtacctatacgtggcgacacttattataatgggcttagccttgtgcgctatccccttcgctaaaagctatgtcacactcgcgctcttgtccggaattctcggctttctgacgggtaattggagtatctttccctacgtgactactaagaccgtgggcatcgagaagttggcccacgcttacggcatcctgatgtttttcgcggggcttggcaacagtcttggccccccaattgtgggctggttctatgattggacccagacgtacgatatcgccttctacttctcaggtttttgcgttcttctgggtgggttcatactgttattagccgcactgccttcatgggacacatgtaacaaacagctacctaaacctgcaccgaccacttttttatacaaggtggcctcaaacgtgtag

SEQ ID NO: 205655 - DNA, 198 bp, synthetic construct
  misc_feature 1..198: note = Description of Artificial Sequence: Synthetic coding sequence
  source 1..198: mol_type = other DNA
atggagctgaagaagagccccgacggcggctggggctgggtgatcgtattcgtctcgtttctcacacagtttttgtgctatgggtctcctctggcggtgggtgttctctatattgagtggctcgatgcgttcggagaggggaaagggaaaacggcttgggtgggttccctcgcaagcggggttggccttctggcttag

SEQ ID NO: 205656 - DNA, 1488 bp, synthetic construct
  misc_feature 1..1488: note = Description of Artificial Sequence: Synthetic coding sequence
  source 1..1488: mol_type = other DNA
atgcggagccccgtgcgggacctggcccggaacgacggcgaggagagtaccgataggacacctttgctacctggcgcgcctcgcgctgaggctgcccctgtatgctgcagcgccaggtacaatttagctatcctcgcattctttggtttttttatagtctacgcactccgcgtgaacctttccgtagcactggtcgacatggtggacagtaacactacactggaagacaatcgaacatccaaagcttgtcccgagcactccgccccaattaaggtgcaccacaatcagacgggtaagaagtaccaatgggatgccgaaacgcagggctggatactcggtagcttcttctacggttatattattacacagatcccaggcggctatgtggcctccaaaatcggcggcaaaatgttgctgggcttcgggatactgggcaccgctgtgcttactctcttcactcccatcgctgcagacctcggcgtaggccctctcattgtgctgagagcactcgagggactgggggaaggtgtaacattccccgctatgcacgctatgtggagtagttgggcgccaccgctggaaaggtctaagctactgtcaatctcatatgctggggcacagctcggaactgtaattagcttgcctctatctggcattatatgttattatatgaattggacttacgttttttacttctttgggaccatcggcattttctggtttctcctgtggatctggctagtctccgacacaccccagaagcataaacgcataagtcactacgagaaagagtacatactgtccagtcttagaaaccagttgagctcccagaaatctgttccttgggtacccatacttaagtccctgccactctgggctatcgtggttgctcactttagttacaattggacattttataccctccttacactgttgccaacttacatgaaggaaattctgaggtttaatgttcaggaaaatggcttcctgtctagcctgccctacctgggatcctggttatgcatgatcttaagcggacaggctgccgataacctgagagccaaatggaatttttccaccctctgtgttcggcgaatcttcagtctgatcgggatgatcggccctgccgtgtttctagtggccgccggatttataggatgtgattattcattggccgtcgcctttcttactataagcactacactcggcgggttttgtagcagtgggttctctatcaatcacttggacattgccccatcctatgccggaatcctcctggggatcacgaacaccttcgctacaataccgggcatggtgggaccggtgatcgcaaaatctctcactcctgacaacaccgtcggagagtggcagacggtcttttatatcgctgcggccattaatgtcttcggcgctatattcttcacactgtttgccaagggagaggtgcaaaactgggccttgaacgaccaccatggacacagacattag

SEQ ID NO: 205657 - DNA, 546 bp, synthetic construct
  misc_feature 1..546: note = Description of Artificial Sequence: Synthetic coding sequence
  source 1..546: mol_type = other DNA
atgcggagccccgtgcgggacctggcccggaacgacggcgaggagtctacagatcgaaccccactgcttcctggtgcgccgagagccgaagccgctcccgtctgctgttcggccaggtataatctcgccatccttgctttctttgggtttttcattgtgtacgccctcagggttaatctttcagtcgcactggtggatatggtggattctaacaccactctagaagacaaccgcacttctaaagcatgccctgagcatagcgcccccatcaaggtccatcacaatcagactggcaaaaagtaccagtgggatgctgagacacagggatggatcttgggaagcttcttctacggctacatcattacccagattcccggaggctatgtagcatcaaaaatagggggcaagatgctgctgggctttggtattttaggaaccgctgtgttaacattgttcacccctatcgccgccgatctcggcgtggggccacttatcgtccttagagctctggaagggcttggcgaggaacattccctgggacagtag

SEQ ID NO: 205658 - DNA, 1404 bp, synthetic construct
  misc_feature 1..1404: note = Description of Artificial Sequence: Synthetic coding sequence
  source 1..1404: mol_type = other DNA
atgcagatggacaaccggctgccccccaagaaggtgcccggcttctgcagttttagatatggtctgagcttcctggtgcattgttgtaacgtgataattacagcacagagagcatgcctcaatttgaccatggtcgtgatggtgaactccactgacccacacggcttgccaaacacatcgaccaaaaagttactggacaacatcaaaaaccccatgtacaactggtcccctgacattcagggaatcatcctgagtagtacatcttacggcgtaatcattattcaggtgccagtcgggtacttttccgggatatacagtactaagaagatgatcggcttcgcattgtgtttatcatccgtgctctcactgctgatccccccggccgctgggatcggtgtcgcctgggttgtcgtgtgtagagccgtgcaaggcgcagcacaaggaatcgtcgctactgcccaatttgagatttacgttaagtgggctccacctctggagagagggcggttaaccagcatgtctacttctggattcctgttggggccatttatcgtgctgcttgtgactggcgtgatctgtgaaagcttaggatggcctatggtattttacattttcggagcttgcggatgcgccgtctgtctgctatggtttgtcctgttctatgacgaccccaaggaccatccatgtattagcatcagtgagaaggaatacatcacctcttccctcgtacaacaagtttcaagcagtcgacagagcctgcccatcaaggcaatccttaagtccctgcccgtgtgggccattagtactggatcgttcacattcttttggtctcataatataatgactctctacacccctatgttcattaacagcatgttgcatgtaaatattaaagagaatggcttcctgagttctctcccttacctgttcgcatggatttgtggaaatctggcaggccaactttctgatttttttctgacacggaacatcctgtctgttatcgccgtgagaaaattatttacggctgctggtttccttcttccggcaatctttggggtgtgcctaccctatctgagttcaaccttctattccatcgtgatttttctgattctcgcaggcgccaccggttctttttgcctgggaggggtgtttatcaatggactcgacatcgcacccaggtacttcggctttatcaaagcatgcagcacgcttactggcatgatcggcggtctgatcgctagcacattaaccgggctgatcttaaagcaggatcccgaatccgcctggtttaaaacctttatactcatggccgcaatcaatgtcacaggcctaatcttctacctcattgtggctaccgcagagattcaagattgggcaaaggagaagcagcacactcgcctctag

SEQ ID NO: 205659 - DNA, 630 bp, synthetic construct
  misc_feature 1..630: note = Description of Artificial Sequence: Synthetic coding sequence
  source 1..630: mol_type = other DNA
atgcagatggacaaccggctgccccccaagaaggtgcccggcttctgcagtttccgatacgggttgtccttcctggtccattgctgcaatgtgattatcaccgctcagagggcgtgtctgaacttgacgatggtagtgatggtgaactccacagatccacatgggctcccgaacacatctacaaaaaaactactcgataatattaagaaccccatgtataactggagcccagacattcagggaatcattttgtccagtaccagttatggtgtgatcatcatacaggtccctgtcggctacttcagtggcatatattcgactaaaaagatgatcggcttcgctctgtgtctgtcttcagtgttaagcctactgatccccccagctgccggtattggggtagcgtgggttgtggtctgcagagctgttcagggcgccgcccagggaatcgttgccacggcccaattcgagatttatgtcaagtgggcccccccgctggagcggggaagactgacatctatgtcaacctccgggtttctgttaggtccgttcatcgtgctactggtaacaggcgttatttgcgagtctctcggatggccgatggtattttatatcttcggtcagttcaaatag

SEQ ID NO: 205660 - DNA, 1242 bp, synthetic construct
  misc_feature 1..1242: note = Description of Artificial Sequence: Synthetic coding sequence
  source 1..1242: mol_type = other DNA
atgcagatggacaaccggctgccccccaagaaggtgcccggcttctgttccttcagatatggccttagtttcctggttcattgttgcaatgtgatcattactgcacagcgggcatgcttgaatctgaccatggttgtgatggtgaatagcacagaccctcacgggctcccaaacacctccacgaaaaaactgctggacaacattaaaaaccccatgtataattggagtcctgatatacagggtatcattctcagttccacatcatacggtgtaatcattattcaggtgcccgtcgggtattttagtggaatatattcaacgaagaagatgatcgggttcgccttgtgtctatccagcgttctttccctgttgattcctccagctgcagggatcggagtcgcctgggtagtcgtgtgtagagccgtacagggtgcagcgcaaggcattgtcgccaccgcccagttcgagatctacgtcaaatgggcaccacctttggagcggggtcgactgacatctatgagtacctctgggtttctgcttggaccattcatcgtgctgttggtgactggagttatttgtgagagccttggttggccgatggtattttacattttcggcgcttgtggctgtgctgtgtgtctcctctggttcgtgctcttctacgacgatcccaaggaccatccttgcatcagcatctccgagaaggagtacatcacgagctccctcgtacagcagaatggctttctgtccagcctgccttacttatttgcctggatttgcggcaacctagctgggcagctgagcgactttttcttgaccagaaatattctgagcgtgattgctgtgagaaaattatttaccgcagcgggcttcctgttgccagctatctttggggtttgtctcccatacctatcttcaacattttacagtatcgtcattttcttgatcctggccggcgccacgggaagcttttgcttaggcggcgttttcattaacggcctggatattgctccccgatacttcggctttataaaggcctgctcgaccctgacaggaatgatcggagggctaatcgcatccacattgactggtcttatcctgaagcaggatcctgaatctgcgtggttcaagactttcattttgatggccgccatcaatgtcacgggacttattttctacctgatagtggccaccgctgagatacaggattgggccaaagagaagcagcacacgcgtttgtag

SEQ ID NO: 205661 - DNA, 1242 bp, synthetic construct
  misc_feature 1..1242: note = Description of Artificial Sequence: Synthetic coding sequence
  source 1..1242: mol_type = other DNA
atgcagatggacaaccggctgccccccaagaaggtgcccggcttctgctccttcaggtacggtttgtcatttctcgtacactgttgtaatgtcattataaccgcacagcgggcctgcctcaacctgacgatggtggtgatggttaactccacggaccctcacgggttacctaacacctctacgaaaaagttactggacaacattaaaaacccaatgtacaattggagccccgacatccagggcattatcctcagctctacttcctacggggtcataatcattcaagtgcccgtaggctattttagcggcatttactccacgaagaagatgatcggcttcgccctgtgcctgtcctccgtgctgagcctcctgatcccgcccgccgctggcattggagtggcatgggtagtggtatgccgcgccgtacaaggtgcagctcagggaattgtcgctacagcacagtttgagatctacgtgaagtgggccccgcctctagagagaggcagactgactagcatgtctacttccggattcctgctcggcccgtttattgtgcttctagtgacgggggtgatttgcgaaagtttagggtggcctatggtgttctatatttttggagcgtgcgggtgtgccgtgtgtctcttatggttcgtcttgttctacgatgatcctaaggatcacccctgtatctcgattagcgagaaagaatatattacatcgagtttagtgcagcagaatggctttcttagctccctgccttacctattcgcctggatttgtgggaatctggcgggccagttgtccgactttttcctcactaggaatatattgtcagtcatcgcagtacgcaagctatttaccgccgctggcttcttgctcccagcaatatttggggtttgtctgccttacctgtccagcacattctattccatcgtaatattcctgattcttgccggagccacaggatcattttgtctcggaggcgtttttattaacggactcgacattgctccccggtacttcggtttcataaaggcttgttcaactctcacgggcatgattgggggccttattgcaagtacgctaactggactgatcctcaaacaggaccctgaatccgcttggtttaagaccttcattcttatggcagccattaacgtgactggcttgattttctacctgattgtggccactgccgagatacaggattgggcaaaggaaaagcagcatacccggctgtag

SEQ ID NO: 205662 - DNA, 1404 bp, synthetic construct
  misc_feature 1..1404: note = Description of Artificial Sequence: Synthetic coding sequence
  source 1..1404: mol_type = other DNA
atgcagatggacaaccggctgccccccaagaaggtgcccggcttctgctccttcaggtatggtctgtctttcttggtgcactgttgcaatgtgatcatcacagcccagagagcctgcctgaacctcaccatggtcgtaatggtcaacagcacggacccacacggtcttcccaacactagtactaaaaaactcctggacaacataaagaacccaatgtataattggtctccagacattcagggcatcattttatcgagtacctcttacggcgtgattattattcaggtgcccgtcggttatttttccggcatttactccaccaagaagatgattgggttcgccctatgtttatctagcgtcctgtctttattgattccccccgccgccggtattggcgttgcctgggtggtggtctgtagggcagtgcagggagcggcgcagggcatcgtggccacagcacaatttgaaatttacgtcaagtgggcccctcctctagagaggggacgcctgacaagtatgagcacatctggttttttgttagggccattcatagtactgttagtgacaggagtgatttgtgagtccctgggttggccaatggtgttttatatattcggagcatgcggttgcgccgtgtgtctactgtggttcgtgctgttctacgatgacccgaaggaccatccatgcatcagcattagcgagaaggaatacatcacctctagtctggttcaacaggtctctagctcccggcaatccctcccaataaaggcaattctgaagagcctgccagtttgggcgatttccacaggcagcttcacctttttttggagtcacaatataatgactttgtacacacccatgttcatcaactccatgttacacgtgaatataaaggagaatggttttctctcttctcttccttatctgttcgcgtggatttgcgggaacctcgcgggccagctatccgattttttcctgacaagaaatatcctgtccgtaatagcggtcagaaagctcttcacggcagcaggcttcctgctccctgccatttttggcgtgtgtctcccctatctgagctcaactttttacagtatcgtgattttcctcattctggccggggccaccggatccttttgtctgggtggagtctttatcaacggtctggatatcgctcccagatactttggcttcatcaaggcttgcagcaccctgactggcatgatcggcggccttatcgcctcaaccttaaccgggttgattcttaagcaagacccagagtccgcctggttcaagacgtttattttaatggccgccattaatgttacgggtcttatattttatctcattgtggccacagccgagatccaggactgggcgaaagagaaacagcacactagactgtag

SEQ ID NO: 205663 - DNA, 1320 bp, synthetic construct
  misc_feature 1..1320: note = Description of Artificial Sequence: Synthetic coding sequence
  source 1..1320: mol_type = other DNA
atggacggcaagcccgccacccggaagggccccgacttctgcagcctgcggtacgggttggccttgattatgcactttagcaattttaccatgattactcagcgcgttagcctatcaattgctatcattgccatggtgaatacaacccaacagcagggcctgagcaacgcctcgaccgaagggcctgtggcggacgcctttaacaactccagtattagcattaaagagtttgacacaaaggcctctgtttatcagtggtctccagaaacccagggcatcattttctctagtatcaattatggtatcattctgaccctcatcccctcagggtacctagccggaatctttggagcaaaaaagatgcttggtgccggcctactcatttccagtctcctcacactctttacccccttggctgcagatttcggagtgatactggttatcatggtgcgcaccgtccaggggatggcacaggggatggcttggactggacagttcacaatctgggccaagtgggcccctcccttggagcgaagcaaactgacaaccatcgctggttctggctcagctttcggttccttcattattctctgtgtgggaggattgatttcccaggctctgtcatggccctttattttttatatcttcggctccacaggttgcgtgtgctgcctgctgtggtttactgtaatatacgatgaccctatgcatcacccgtgcatctccgtcagggagaaggagcatattcttagttctttggcgcaacagccctcaagcccagggagggcagtccctataaaagctatggtgacctgcctgcccctgtgggccattttccttggcttttttagccacttctggctatgcactatcatcttaacttacctgcccacctacatctctacattactgcacgtgaacatccgggatagtggagtgctgagtagtctgccgttcatcgctgccgcttcatgcacgattctgggcgggcagcttgctgatttcctgttgagccggaaccttctgcgcctcatcacagtgaggaaactgttttcttctctaggactgctgctgccatctatatgcgccgtggccctgccttttgtggccagctcatacgtcattaccattatcctgctgatcctcatcccaggtactagtaacctttgcgattcagggtttataattaataccctagatatcgcaccacgttacgcttccttcctcatgggaatcagccgtgggtttggactgattgctggcattattagttcaacagcaaccgggtttcttataagtcaggtcggcccagtttactag

SEQ ID NO: 205664 - DNA, 1311 bp, synthetic construct
  misc_feature 1..1311: note = Description of Artificial Sequence: Synthetic coding sequence
  source 1..1311: mol_type = other DNA
atggacggcaagcccgccacccggaagggccccgacttctgcagcttgcgctacgggctagccctaattatgcatttctcgaattttacaatgataacacagcgcgtaagtctgagcatcgcaataattgccatggtgaatacaacccaacagcagggtttatcaaatgccagtaccgaaggaccggtcgcggatgcatttaataattccagcataagcattaaggaattcgacacaaaggcctccgtgtatcagtggagccccgaaacccaaggcattatcttctctagcatcaattacggcattattctcactctgattccatccgggtatctcgccggcatcttcggtgcaaagaaaatgcttggcgccgggctgctgataagcagcttactgacgctctttacaccactggctgccgatttcggagttatcctggtgatcatggtgagaactgtacaaggcatggctcagggaatggcctggacaggacagtttactatctgggccaagtgggcgcctcccctcgagagatccaagcttacaacgattgcgggctcaggaagcgcttttgggtcattcattatactttgcgtagggggactcattagccaggcgctgtcctggcctttcatcttctatatcttcggcagcacagggtgcgtctgttgcctgttgtggttcactgtgatctatgacgaccccatgcatcatccatgcattagtgtgcgcgagaaggagcatatccttagttcactcgctcagcagccctcctctcccgggcgcgccgtccccattaaagcaatggtgacatgcctgcccctctgggccattttcctggggtttttcagccacttttggctctgcacaatcatcttgacttatctgcctacgtacatctcgactctcctgcatgttaatattcgcgatagcggtgtcctcagttccctcccttttattgccgctgcatcatgtacaatcctgggcggacagctcgcagactttctgctgagtagaaatctgctgaggctcatcaccgtcaggaaattattctctagcctagacatgcaagtatctagctgggaatcccaaggagacctgggatctagccaggaaagtagtctgccactgccgctggactcatctagtgtcagaattctgagcttagtcggtggtatgtccttctcttgcttacttcagtccacatgcctggcttggagctttactagtaggcttgataagcaaaacttcaagactggacccaaaagagggccactaccagcgagcgaggacataaaactgcaaacttag

SEQ ID NO: 205665 - DNA, 1437 bp, synthetic construct
  misc_feature 1..1437: note = Description of Artificial Sequence: Synthetic coding sequence
  source 1..1437: mol_type = other DNA
atggacggcaagcccgccacccggaagggccccgacttctgcagcctgcgctacggcctagctttaattatgcatttttccaactttacaatgataacccagagggtctcgttgtctatcgccatcattgctatggtgaataccacacagcaacaagggcttagcaacgcaagcaccgaggggccagttgccgacgcttttaacaactcttctatctctataaaagaatttgacacaaaggcgagtgtttaccagtggagtcccgagacccaaggaatcatcttttctagcattaactacggcattatccttaccctcattccatcaggctacctggccggcatcttcggggccaagaaaatgctgggggctggccttctcatcagcagcttgctgacactgtttactcccttggccgctgactttggcgtgattctggttattatggttagaacagtacagggtatggcgcaggggatggcctggacagggcagttcacaatttgggccaagtgggcaccacctctcgagcgctccaagctcaccaccatcgccggttcggggtccgcatttggaagtttcatcatactgtgtgtgggagggctgatcagccaggcactgtcctggcctttcatattttatatctttggctctaccggctgtgtgtgctgtctgctgtggtttacagtaatctacgatgatccaatgcatcacccatgcataagtgtccgcgagaaagagcacatcttgagtagcttggcccagcagccttcatcacccggtcgggcagtgccaattaaggctatggtgacatgcctccccctgtgggccatctttctgggatttttctcccatttctggttatgcacaataatactgacatatctgccaacctacattagcactctgctccacgtgaatatcagagactcgggcgtgctgagcagcttaccctttatcgcggcagcctcatgcaccattctggggggacaacttgccgacttcctgctgagtcgcaacctgctacgattgatcacggtgcgcaaactgttcagcagcctgggcctgttacttccaagtatctgcgctgtggccctcccttttgttgcttcgagttacgtgatcaccatcatattattaatcctcatccctgggacgtcaaacctgtgtgactcaggttttattatcaataccctggatatcgcacctcgttatgccagcttcctgatgggaatctctcgtggttttggtcttattgcagggataataagctctaccgcaacagggttcctgatctctcaggacttcgaatccggatggaggaacgttttctttctgtctgcggctgtaaatatgtttggcttagttttttacctcacatttggacaagcggaactgcaggactgggctaaggagaggacattgaccagactttag

SEQ ID NO: 205666 - DNA, 1263 bp, synthetic construct
  misc_feature 1..1263: note = Description of Artificial Sequence: Synthetic coding sequence
  source 1..1263: mol_type = other DNA
atggccaccaagaccgagctgagccccaccgcccgggagagcaagaatgcccaggacatgcaagtggacgaaactctgatcccccgcaaagtcccctcactatgcagcgctagatatgggatagccttggtcctccatttttgcaactttactaccatcgcacagaatgtcataatgaacatcacaatggtggctatggtgaattccacttcaccccagtcccaactgaacgatagttcagaggtactgcccgtcgattcgttcggcggactgtccaaagctcccaaatctttgccagctaaaagcagtatcctcgggggccagtttgcaatttgggaaaagtgggggcctccacaggagagaagccgactatgctcgattgctttaagtggcatgctgttggggtgtttcaccgccatactcattgggggattcattagcgaaacactgggatggcctttcgtgttctatatctttggaggtgtgggctgcgtgtgttgtctgctgtggttcgtggtgatttatgatgaccctgttagctacccatggatatccacgagcgaaaaagagtacattatctcctctctgaaacaacaagttggttcatccaagcagcccctgcctataaaagccatgctgaggagcttgcccatatggagcatatgtctgggctgtttctcacaccaatggttggtctcaacaatggtagtatatatccccacatatatttcatcggtttaccacgtcaatatcagggacaacgggctgcttagcgccctgcccttcattgtcgcctgggttatcggaatggtgggcggctacctggctgactttttgctgacaaaaaaattcaggcttattacagtccgtaaaatcgctactattttgggctccctcccatcttcagccctgattgtctccttaccctatcttaactcaggctacatcacagccactgccctcctgaccctgagctgtggtttatctacattatgtcaatccggcatctacattaatgtgctggacatagcccccaggtattcttcttttctcatgggcgcctctcgtgggttttcctccatcgcccccgtcattgtccctaccgtctcaggatttctactcagtcaggaccccgaattcggttggcggaatgtattttttttactgttcgctgtgaacctgttgggtttgctcttttatctcatcttcggagaggctgacgttcaggagtgggcaaaagagcgaaagctgactcggttgtag

SEQ ID NO: 205667 - DNA, 1263 bp, synthetic construct
  misc_feature 1..1263: note = Description of Artificial Sequence: Synthetic coding sequence
  source 1..1263: mol_type = other DNA
atggccaccaagaccgagctgagccccaccgcccgggagagcaagaacgcgcaggacatgcaggtggacgagaccctgatccccaggaaagtaccctccctgtgttcagcccggtatggcatcgcactggtcctccacttctgtaattttaccacaattgcacagaacgtcatcatgaacatcacaatggtcgctatggtgaattctacttccccgcaaagtcaactcaacgacagttctgaggtgttgcccgtcgactcattcggagggctgagtaaggcgcccaaatcacttcccgctaaatcctcgattttgggcgggcagttcgctatctgggagaagtgggggcctcctcaagagaggtcccgcctctgttccatcgccctgtcgggtatgttgctcggatgcttcactgccatcttaataggaggttttattagtgagacactgggttggcccttcgtgttttatatttttgggggcgtcggctgtgtgtgctgtctcctctggtttgtggtcatctacgacgacccggtgtcttatccatggatctccactagtgagaaggaatatattatatcatctctgaaacagcaggtgggttcaagcaagcagccactgccgatcaaggccatgcttcggagtctgccaatctggtcaatatgcctgggttgcttttcccaccagtggctggtgtccaccatggtggtgtatattcctacctacatttccagtgtataccatgtcaacataagagataacgggctcctgtccgctctgccctttatcgtcgcatgggtaataggtatggtgggcggatatctggcggatttccttctgaccaaaaaattccgcttaattactgttaggaagatagctacaatcctaggcagcctcccctcttctgcactgatagtttcacttccctacctgaacagcggatacattacagcaaccgccctgctgaccctgtcctgtgggctgtctaccctctgtcagtcaggcatttatattaatgtcctagacatcgccccccggtattcgagctttttaatgggagcatctagaggctttagtagtattgcacccgttattgtgccaaccgtgagcggattcctgttgagccaggaccctgaatttggttggcgcaacgtgttcttcctgctgtttgccgtgaatctattagggctccttttttatctgatattcggggaagcagacgtccaggagtgggctaaagaacggaagctcaccagactctag

SEQ ID NO: 205668 - DNA, 1497 bp, synthetic construct
  misc_feature 1..1497: note = Description of Artificial Sequence: Synthetic coding sequence
  source 1..1497: mol_type = other DNA
atggccaccaagaccgagctgagccccaccgcccgggagagcaagaacgcccaagacatgcaggttgatgagactcttatacctagaaaggtaccaagtctgtgcagtgccaggtatggaattgccctggtgctacatttttgtaattttactactattgctcagaacgttatcatgaacataacaatggttgcgatggtgaactcaacatcaccacagagtcagttaaacgactcctccgaagtactgccagtagatagctttggtgggctttccaaggcacctaaatcgctgcccgccaaggccccagtgtacgattggtcgccccaaatccagggaatcatcttcggagccgtgggatacggggggatactaaccatggccccatctggctacctggccggcagagtcggtaccaagcgcgtagtgggtatcagcttgtttgccacttcatttcttacattatgcattcctctagcgacagattttggaattgtcctgctcatcgtgacccgaatagtccagggactgtcacagagctctatcctgggggggcagtttgcaatctgggagaagtggggaccacctcaggagagatcacggctgtgcagcatcgcactgtcaggaatgctcttgggttgcttcacagccatccttattggtgggtttataagcgagactttaggctggcccttcgttttttatatctttggaggggtcgggtgtgtctgctgccttctctggttcgtggttatctacgatgaccctgtgtcttacccctggatatctacatccgagaaggagtacatcatcagtagcctgaaacagcaagtcggaagtagcaaacagcctctccccattaaggctatgttacggagccttcctatttggagcatttgccttggctgtttttcacatcagtggctcgtcagcaccatggtggtctatattcccacatatattagttcagtttaccacgtcaacattagagataatggattgctttcagctctgccttttatcgtcgcctgggttattggcatggtgggcgggtatcttgccgactttttgcttacaaaaaagttcaggctaataacagtgcgaaaaattgcgaccatcctgggctcccttcctagctcagcccttatcgtgtctctcccttatctgaacagtggctatatcactgcaactgcactcctcactctgtcctgtggactttctaccctttgccaatcaggaatatatatcaacgtccttgatatagcaccaaggtacagttcttttcttatgggggcctcacgggggttttcctccatcgcccctgttattgttcccaccgtgtcagggttcctattgtcacaggacccagagttcggatggaggaacgtcttcttcctgttgttcgccgtgaacttgctgggactgctgttctatttaatttttggtgaggcggatgtgcaggagtgggcgaaagaacgtaaacttacacgcctgtag

SEQ ID NO: 205669 - DNA, 300 bp, synthetic construct
  misc_feature 1..300: note = Description of Artificial Sequence: Synthetic coding sequence
  source 1..300: mol_type = other DNA
tgaaccctgagctgcggcctgagcaccctgtgccagagcggcatctacataaacgtcttagacattgcccctaggtatagttcctttctaatgggtgcaagtagaggattcagctccatcgccccagtgattgtccctaccgtgtctggtttcttgctgagccaggatcctgaatttggatggcgcaatgtatttttcttgctgttcgccgtcaacttattggggctgctgttctaccttatatttggggaagccgatgttcaggagtgggcaaaagaacgcaaactgacaaggttgtag

SEQ ID NO: 205670 - DNA, 156 bp, synthetic construct
  misc_feature 1..156: note = Description of Artificial Sequence: Synthetic coding sequence
  source 1..156: mol_type = other DNA
agcggcttcctgctgagccaggaccccgagttcggctggcggaacgtgtttttcctgttgtttgctgtaaatttgctggggctcctgttttacctcatatttggcgaggccgatgtgcaggagtgggccaaggagaggaagctgaccagactttag

SEQ ID NO: 205671 - DNA, 1494 bp, synthetic construct
  misc_feature 1..1494: note = Description of Artificial Sequence: Synthetic coding sequence
  source 1..1494: mol_type = other DNA
atgagcaccggccccgacgtgaaggccaccgtgggcgacatcagctctgacggaaacctgaatgtcgctcaggaggagtgttcccgtaagggattttgttccgtccggcatggcctcgccttgatcctacaactgtgtaactttagcatctacactcagcagatgaatctgtctattgccattcctgccatggtgaataacaccgctccaccttcacagccaaatgctagtactgagcggccctcaactgacagccagggctactggaacgaaacacttaaagagttcaaggcgatggcaccagcctacgattggtcccccgaaatccaagggattatactcagctctcttaattacggctcttttctggcacccattccatctggctacgtggcaggaatcttcggcgccaagtacgtcgtgggcgcagggctctttatcagtagctttcttaccctgttcattccccttgcagctaacgccggcgtggccctcttgattgtacttcgaatcgtgcaggggatcgcccaggtaatggttttgaccggccaatattcgatttgggtaaaatgggccccgcccctcgaacggtcacagctgaccactattgctgggagcgggtccatgctcgggagttttattgttttgctcgccggggggttgttgtgtcaaactattggttggccctacgttttctatatcttcggaggaattggttgcgcctgctgtcccctgtggtttccactaatctacgatgacccggtaaaccaccctttcatctcagccggcgaaaaaaggtatattgtgtgtagcttagcccaacaggattgttcccctggctggagcctgccgatacgggccatgatcaaatccttgcccctgtgggccatactggtctcctacttttgcgagtactggctattctatacaattatggcttacacacctacgtacatttctagcgtgctgcaggcgaatcttagggactcaggtatcctcagcgccttgcctttcgtcgtcggctgcatctgtattatcctgggtggactgcttgcggactttttactgtcccgcaagatcttacggttgattacaatccgtaagctgttcacagccatcggcgtgctgttcccatccgtcatcctggtgtcattgccctgggttcggtcatcacattccatgacaatgactttcctggtgctcagtagcgcaataagctccttttgtgaatcaggcgcgctggtgaacttccttgatatagctccacggtacactgggttccttaaggggttgctgcaggtcttcgcccacatcgcgggggctatttcaccaacagctgccggcttctttatctctcaagacagtgaatttggttggcgcaatgtgttcctactttccgctgctgtcaatatcagcggcttggtcttctacctcatatttggtagagccgatgttcaggactgggccaaggagcagacctttacccacctgtag

SEQ ID NO: 205672 - DNA, 666 bp, synthetic construct
  misc_feature 1..666: note = Description of Artificial Sequence: Synthetic coding sequence
  source 1..666: mol_type = other DNA
atgaacctgagcatcgccatccccgccatggtgaacaacaccgcccccccgtcccagcccaatgcttctacggaacgtccatccactgactctcaaggatactggaatgaaaccttaaaggaattcaaagccatggattgctcaccagggtggagccttccaatcagggcaatgattaagagcctgccgttgtgggcaatcctggtaagctatttctgcgagtattggcttttctacacaattatggcttacacccccacatatatttctagtgtcctgcaagccaacttacgcgacagcggcattttgagtgcactgccattcgttgtcgggtgcatctgcataatcctgggtggcttactagcggattttctgctgagtagaaagatccttcgcctcattaccatccgcaagttgttcaccgctattggcaagggggagaccggccacaggggagaacgaggtaagttgagagcagccttttcactcctgtgcgtgtgccccccaacccctggagtgctctttccatccgtgattttggtatccctaccatgggtacggtcttcccattctatgacgatgacctttcttgtactgagtagtgcaattagcagcttctgcgagtccggggcgctggtgaattttctagacattgcaccccggtag

SEQ ID NO: 205673 - DNA, 804 bp, synthetic construct
  misc_feature 1..804: note = Description of Artificial Sequence: Synthetic coding sequence
  source 1..804: mol_type = other DNA
atgagcaccggccccgacgtgaaggccaccgtgggcgacatcagctcagatggcaatctcaatgtggcccaggaggagtgcagtcgcaagggtttctgcagtgtgcggcatggcttggcgctgatcctacagctttgtaatttctcaatctatacccaacagatgaatctttccatcgccatcccggcaatggttaacaacaccgccccccccagccagccgaacgcctctacggagaggcccagtacggactcccagggctactggaatgaaacactcaaagaatttaaagctatgtcggggatcctctccgcccttccttttgtggtggggtgcatttgcattatcttgggagggctgcttgccgacttcttgctcagccgaaagatcctgaggttgattacgatcaggaagctgtttactgctatcggtgtgctgttcccatctgtcattttggtttcactgccttgggtgagaagctcacatagtatgacgatgactttcctggtattgagctccgcaatttcaagcttctgcgaaagcggcgccttagtgaactttctcgacatcgcaccacgatacaccggctttctgaagggtctgctgcaggtctttgcccacatcgcaggagccatatcccccaccgccgccgggttctttatatcgcaggattccgaatttggctggcgcaatgtgttcctgctgagtgccgcggtcaatatcagtggcctcgttttctatcttattttcggccgcgctgatgttcaggactgggctaaagagcaaacctttacccacttgtag

SEQ ID NO: 205674 - DNA, 1749 bp, synthetic construct
  misc_feature 1..1749: note = Description of Artificial Sequence: Synthetic coding sequence
  source 1..1749: mol_type = other DNA
atggagagcgtgaagcagcggatcctggcccccggcaaggagggcttgaagaatttcgcaggaaagagcctcggccagatctacagagtcttggaaaagaagcaggacaccggagagaccatcgagttaacagaagacggaaagccacttgaggtcccggagaggaaagcaccactgtgtgactgtacctgcttcggtttgccgcggcggtacattatcgccattatgagcggtctgggtttttgcatcagctttggtattaggtgtaatttaggggtagctatcgtcgatatggtcaataactctactatacacaggggcggtaaggtgataaaggaaaaggccaaatttaactgggacccagagactgtgggaatgatccatgggagttttttctggggatatattattacccagatccctggcggttacattgcgagtagattggccgccaaccgggtttttggtgccgccatccttcttacctcaactctgaacatgctcattccgtctgccgccagagtgcactatggctgcgtaatcttcgtgaggatcctccagggtctagttgagggcgttacttacccagcatgtcacggcatctggagcaagtgggcccccccattagagcgcagcagactcgctaccacttctttttgtggcagctacgccggcgccgtgatcgccatgcccctcgccgggatccttgtccaatacacaggttggtcaagcgtgttctacgtgtatggctccttcgggatggtgtggtatatgttttggctgctagtctcttatgaatctccggccaagcatccaaccatcaccgacgaggagcggagatacattgaggagtcaatcggtgaatccgctaatctactgggagctatggagaaatttaaaaccccctggcgcaaattctttacatctatgcctgtgtacgcaatcatcgtggccaacttctgcagatcctggactttctacctgctgctgatttcacagcccgcctactttgaagaggtttttgggtttgagatctccaaggtgggaatgttatctgctgtgcctcacctggtgatgaccatcattgttcccattgggggccagatcgccgatttccttcggagcaagcagattttgtcaacaactacagttcgcaagatcatgaattgcggcggcttcggaatggaggccacactcctgttagtggtgggttacagccacacacgtggtgtggccatcagctttctggtgctggcggtcggattctctgggtttgccatatcgggtttcaacgtcaaccatctggacatcgcccctcgatatgcgtctatcttgatgggcattagtaatggtgttgggaccctgagcgggatggtctgtccaattatcgtgggtgctatgacaaaaaataaatccagggaagagtggcagtatgtatttctgattgcagccctcgtccactatggaggtgtgatcttttacgcgatctttgcgagtggggaaaagcagccttgggccgatcccgaagagacatcagaggagaaatgcggattcattcacgaagatgagctggacgaggagaccggggacatcacacaaaactacattaactatggaacgacaaaatcgtatggcgctaccacacaagccaacggcggctggccctccggatgggagaaaaaagaagaattcgtccaaggcgaggtccaggatagccactcttacaaggaccgagtcgattatagctag

SEQ ID NO: 205675 - DNA, 1413 bp, synthetic construct
  misc_feature 1..1413: note = Description of Artificial Sequence: Synthetic coding sequence
  source 1..1413: mol_type = other DNA
atgaaggccaagttcaactgggaccccgagaccgtgggcatgatccacggcagtttcttctggggctatatcataacacagatacccggggggtacattgcatcccgccttgccgctaatagggttttcggagcggccattttactgacctcaaccctgaatatgcttatcccttcggcagcaagggtacattacgggtgtgtcatttttgtgcggattctgcaggggttggtagaaggggtcacctacccggcctgccatggcatatggtctaaatgggcccctcccctcgaacggagccgtctggccaccacctcattttgcgggtcgtatgccggagctgtgatcgcgatgcccctggctggtatcttggtgcagtacaccgggtggtcctcagtcttctacgtctatgggagttttgggatggtctggtacatgttttggctcctggtctcatacgagtcccctgccaagcatcccactattaccgacgaggagcgcagatacattgaagagagcattggcgaaagtgccaatctgctcggagctatggaaaaattcaaaacaccatggaggaaattcttcacttctatgccagtgtatgccattattgtggctaatttctgtaggagctggaccttttatctcctattgatctcacagccagcatatttcgaggaagtgtttggattcgagatcagcaaagtaggaatgcttagtgctgtcccacatttagtgatgactatcatcgtgccaatcggcggacagattgctgacttcctgagatctaagcagattctaagtactacgaccgtccgcaagattatgaactgcggaggcttcggtatggaagccacactgctcctggtcgtgggctactcgcatacacgcggggtagccattagctttctggtcttggcggtggggttcagtggatttgccatctccggcttcaacgtaaaccacctggacatcgcaccccggtatgcctccattctcatgggcattagtaacggtgtggggacattaagcggaatggtgtgtccgattatcgtaggcgctatgacaaagaacaaatctcgtgaggagtggcagtatgtcttcctgatcgccgccctggtccactacgggggagttatattttatgccatttttgcctctggtgagaagcagccttgggcggaccccgaggagacttctgaggaaaaatgcggatttattcacgaggacgaactagacgaggaaacgggagacataacccagaattatatcaactacggaacaaccaagtcctacggggccacgactcaagctaatggcgggtggccctccggctgggagaaaaaggaagaatttgtgcagggagaggttcaagactcccattcctacaaggaccgcgtagactattcatag

SEQ ID NO: 205676 - DNA, 5223 bp, synthetic construct
  misc_feature 1..5223: note = Description of Artificial Sequence: Synthetic coding sequence
  source 1..5223: mol_type = other DNA
atgggcgagaagctggagctgcggctgaagagccccgtgggcgccgaacccgctgtgtatccctggccactgccagtgtacgacaagcaccacgacgcggcgcatgaaataatcgagactatccgctgggtgtgcgaggagattcccgatttgaaacttgccatggagaactacgtgctcatagattatgacaccaagtcatttgagagcatgcagcgactttgtgataagtataatcgggccattgacagcatccaccagctctggaagggaacaacgcagcctatgaaactcaacacccgaccctccaccgggttgctccggcatatcctccagcaggtgtacaaccactctgtaacagatcccgagaagctgaataattatgagccattctctcctgaggtgtacggggaaaccagtttcgacttggtcgctcagatgattgacgagattaagatgaccgatgatgatttgttcgtggacctggggtctggcgttggccaagtagtgcttcaagtcgccgctgccacaaattgcaagcatcattatggcgtggaaaaggccgacattccggccaaatacgcagaaactatggacagggaatttaggaagtggatgaagtggtacggtaagaagcatgccgagtatactctggagcgaggagactttctgtcagaagagtggcgcgagaggatcgcaaatacctctgtaatatttgtgaacaattttgcattcggcccggaagtggatcatcagttaaaagaacgcttcgctaacatgaaggagggcggcaggattgtatccagcaagccttttgctcccctgaacttccgaatcaacagcagaaacctgtccgacatcggcaccattatgcgtgtggtagagctttcaccactgaaaggttccgtcagctggaccgggaagccagtctcttattatcttcacacaattgacaggaccatcctggagaactatttctcttccctgaaaaacccaaaactcagggaggagcaggaagccgccaggaggcgccaacagagagaatcaaaatccaatgcggccaccccaacgaagggccctgaaggaaaggtcgccggcccggccgacgcaccaatggactctggggcggaagaagagaaggctggggctgcaactgttaagaaaccaagtccaagcaaggccagaaaaaaaaagctcaataaaaaaggccggaagatggctggtcggaaacgcgggagacccaaaaaaatgaataccgccaaccccgaacgaaagcccaaaaagaatcagaccgccttggatgctttgcacgctcagaccgtgtctcagacggccgcttcatcgcctcaggacgcgtatagatcacctcactcgccgttttaccaattaccaccgagtgttcaaaggcacagccccaatcccttattagttgctccaactcctccagcattacagaaactcctggaaagcttcaagattcaatatttacagtttcttgcttacactaagactccgcaatacaaagccagcctgcaagaactgctgggtcaggagaaagaaaaaaacgcacagctgttgggggctgcacagcaactactctctcactgtcaagctcagaaagaggagatcaggcgactgttccagcaaaaactagatgagctgggggttaaagccctaacatataacgaccttattcaagcccaaaaagagatcagcgcccacaaccagcagcttagagaacagagtgaacagctggagcaagataaccgagccttgcgaggacagtccttgcagctgctgaaagctagatgtgaagagctccagctggactgggctaccctcagtttggaaaagctgctgaaagaaaagcaggccctgaagtctcagatttcagagaagcaacggcactgtcttgaactacagatatcgatcgtcgagctggaaaagtctcagcgccagcaggaattactccaactgaagagttgcgtccctccggacgatgccctctctttgcatctcagggggaagggagccctggggcgcgagcttgaacccgacgcctctcgcttgcatctagagttagattgtaccaaatttagccttccacacctatcctctatgtctcccgagttgagcatgaatgggcaggccgcgggttacgagttgtgtggagtcctgagccgaccttcctccaaacaaaatacaccacagtacctggccagccccctcgatcaggaggttgtgccttgcaccccgtcccacgtaggccgaccaagacttgagaagctctcaggcctggccgcccctgattatacccgcctgagccctgctaagattgtgttgaggaggcacctttctcaggaccatacagtccccgggaggccagcagccagcgaactgcatagccgagccgagcacacaaaagagaatggtctcccatatcagagtccctccgtgcccggctccatgaaattgagcccccaggacccaaggcccttgagtcccggagctctgcagctggcgggcgaaaagtctagcgagaaaggactgcgtgagcgcgcatacgggtcctccggggaacttattacttccttaccaatatccattccgctgtctacagtgcagccaaataagctcccagtgtcaatcccccttgcttcagtagtgctaccaagtcgggccgaacgggctcggtcgactcccagcccagtgttgcagccacgagatcctagctctactctcgaaaagcagatcggagccaatgcacatggtgccggttcacgctcactggctctggccccagcgggattttcgtacgctgggtccgtggccatatccggagctctggctggcagtcccgcatctttaaccccaggcgctgagccggcaactctggacgaatcctcctcctctggcagtctgttcgcaaccgtgggttctcggagtagtaccccccagcatccactgctgctggctcagccacgaaattcgcttcccgccagccctgcccaccaattgtcctcaagcccacgtctgggtggcgcagcgcagggacccttaccagaagcgagcaagggcgatctgccttctgactcaggcttctccgaccctgaatccgaagccaaacgccggatcgttttcactatcaccaccggagcaggcagcgccaagcaatcacctagtagcaagcacagcccgctcacagcctccgcgagaggagattgcgtccctagccatggacaggacagtcgtcgtcgcggcagaagaaaacgagctagcgccggtacgccatcactgagcgccggcgtttctcctaaaaggcgcgcccttccttctgtcgcaggcctgttcacacagccctcgggaagccctctcaacctgaactcgatggtctcaaatattaaccaacctctcgaaatcaccgccatctcaagtcctgaaacctccctgaaatcatcccccgtgccgtaccaagaccacgatcagccgcccgtcctcaagaaagaacgccccctctcgcagacaaatggagcccattactcccccctgacatctgacgaggaacccggctcggaggatgagccctcgtcagcaaggattgagaggaaaatagctacaatctcactcgaatcaaaatcccctccgaaaaccctcgaaaatggtgggggactcgcgggcaggaaacccgcccccgctggggagcccgtgaattcctctaaatggaagagcaccttttctcccatctccgatattggtctcgccaaaagcgcggacagtccattgcaggccagctccgcgctatcacagaacagtctgttcacatttaggcccgctctcgaagagccttctgcggacgccaaattggccgcccaccctcgcaagggatttccaggatctctgagtggggcagacggtttgagtcctggcaccaaccctgcaaacggctgcactttcggcggagggcttgcagcagatttgtcacttcacagtttctcagacggggcgagcctgccccacaaggggccagaggctgccggactcagttcaccattgtcttttccgtcacagagggggaaagagggatccgatgcgaacccattcttgtcaaagagacagctggacggactggctggccttaagggagaagggtcgcgaggcaaagaggccggtgagggtggactccccctgtgtgggccaacagataagacccctctcctaagcggcaaagccgccaaggcgcgggacagagaggtggatctcaagaatggccataatctgtttatttccgctgccgccgtgcctcccggttccctcctgtcaggcccgggtctggcccctgccgcctcctccgctgggggagcagcttcctccgcacagacacatcgcagcttccttgggccctttccaccagggcctcagttcgccttagggccgatgtccctgcaggcaaacttaggtagtgtcgcagggagcagcgtgctccagtctctgttttcaagcgtgccggccgccgccggtcttgtgcacgttagcagcgccgctacccgccttaccaactctcatgctatggggagtttttccggtgttgcgggcggtacagtgggagccgggggcgtgttcaatcatgctgtcccttccgccagcgctcacccctttggcgcgcgggtgggtcggggcgctgcctgcggctccgcaaccctaggcccttcccctctgcaggcagccgctagtgcctccgctagttctttccaggctcccgcaagtgtcgagacgcggcctccgcctcctccacctcctccaccccctccactgccacctccagcccacctgggaaggtctcccgcgggcccgcctgtccttcacgccccccctccccccaatgctgccctgccccctcctccaacactgctggcctcaaaccccgaacccgcattgctccaatcactggcctcactcccccctaaccaagccttcctcccacccacaagcgccgcatccctccccccggcaaacgcctccctttccatcaagcttactagcctcccgcacaaaggcgctcgaccatcgtttacagtacaccatcagcccctgccccgactggcccttgcccaggctgcccctgggatcccccaggcatccgctacgggccccagtgcagtgtgggtgtccctcggaatgccgcccccttacgccgctcatttatccggagtgaaacctagatag

SEQ ID NO: 205677 - DNA, 1647 bp, synthetic construct
  misc_feature 1..1647: note = Description of Artificial Sequence: Synthetic coding sequence
  source 1..1647: mol_type = other DNA
atgggcagccagctggccctggccggcctgctggagaagcggcaggaaggggcggagacccttgaactgagcgctgatggccggcccgtaaccacacaaactagggaccctcccgtggtcgactgtacgtgtttcgggctgccacggcggtatatcattgcgatcatgtctggtctgggtttttgcattagcttcggcattcgctgtaatcttggcgtggccatcgtgagtatggtgaacaatagtaccactcatcgcggtggccacgtcgttgtccaaaaggcccaattttcgtgggacccggaaaccgtggggctcattcacggaagttttttttggggatatattgttactcagattcctgggggttttatctgtcaaaaattcgccgccaatcgagtatttggcttcgccatagtagccacgagtactctgaacatgcttattccaagcgccgctcgggtgcattacggctgcgtgattttcgttagaattctccagggcctagtggagggcgtcacctatcctgcttgccacggcatctggtctaaatgggctccacccctggaaaggtccagacttgcaacaactgccttttgcggcagctacgcgggtgccgtcgttgctatgccactcgcaggagtgctggtgcaatatagcggatggagtagcgtgttttatgtgtacggaagcttcggcattttctggtatctgttctggttactggttagctatgaaagccccgccctccacccatcgattagcgaggaggagcggaagtatatcgaagatgcaatcggggaatccgcaaagctaatgaaccctttaacaaagttctcaacaccctggaggcgattctttacgtccatgcctgtatacgcaatcatcgtggcgaatttctgtaggtcttggaccttctatttgcttttaatttctcagccagcctattttgaagaggtctttggatttgagatcagcaaggtgggtctagtttccgctctgcctcatttagtcatgaccatcattgttcccattggcggtcagatcgccgacttccttcgctcccggcggatcatgtcgaccactaacgtgcggaagttgatgaactgtgggggatttgggatggaggcaaccttactgctcgtcgtgggctactctcacagcaaaggggtggccatctcttttctggttctcgcagtcggatttagcggcttcgccatcagcggattcaacgttaaccacctggatatagctcctaggtacgcctcaatcttaatgggtattagcaacggagtggggacattgagcggaatggtctgcccaattattgtgggggccatgacgaagcataagacacgcgaagaatggcagtatgtctttctgatcgcttctctcgtccattatggtggagtgatcttctacggggtattcgcctcaggtgaaaagcagccctgggccgaaccggaggagatgagtgaagagaaatgtggcttcgttgggcacgaccaattggcaggatccgacgacagcgagatggaggacgaggcggagccacctggcgctccaccggcaccaccaccgtcttatggcgcaactcacagcacattccaacctcctaggccacccccccccgtgagagactattag

SEQ ID NO: 205678 - DNA, 1770 bp, synthetic construct
  misc_feature 1..1770: note = Description of Artificial Sequence: Synthetic coding sequence
  source 1..1770: mol_type = other DNA
atgcccttcaaggccttcgacaccttcaaggagaagatcctgaagccaggcaaggaaggcgtgaagaacgcagttggcgattcactcggcatactccagcggaagattgacggcaccaccgaggaagaagacaacattgagttaaatgaggagggccgacccgtgcagaccagtagaccaagcccccctctgtgcgactgtcactgctgtggtctgcctaaaaggtacatcatcgccattatgagcggcttggggttctgtatcagctttgggataagatgtaatctgggagtcgctatagtggagatggtgaataactcaactgtttacgtcgatggcaagcccgagatccaaaccgcgcaattcaactgggaccccgaaaccgtgggcctaattcacggctccttcttttgggggtacatcatgactcagatccccgggggatttatcagcaacaagtttgctgctaacagggtcttcggcgcagcaatctttctcacttcaacactgaatatgttcatcccttctgctgcacgcgtgcattacgggtgcgtgatgtgcgtcagaatccttcagggtctggtagagggagtgacctatcctgcatgtcacgggatgtggagtaaatgggcaccgcctctggagaggtccaggcttgctacaacttcattttgcgggtcatacgcaggcgccgtggtagcaatgccccttgcaggcgtacttgtccagtacatagggtggtcatcagttttttatatatacgggatgttcggaattatttggtatatgttttggctgttgcaggcttatgagtgccctgcagcccatcccactattagcaacgaagagaagacatacattgagacctccatcggagaaggcgcaaacgtagtttctctgagtaagttctccaccccatggaagcgattcttcacctctcttccggtatatgccattatcgtcgcaaacttttgtcggagctggactttttacttacttttgatcagccagcctgcttacttcgaggaggtatttgggttcgctattagcaaggttggtttgctgtccgccgtgcctcacatggtgatgaccatcgtagtgcccatcggcgggcagttggccgactacctaagatctcggcaaatcctgactacaacagcggtccgcaaaataatgaactgcggtggtttcgggatggaggctacactcttactcgtggtcggattttcccacacaaaaggagtggccattagtttcctggtgctggccgtgggattctcggggtttgctatctctgggtttaacgttaatcatctcgatatcgcgccgcgctacgcctccattctgatgggcatctctaacggcgtcgggaccctcagtggcatggtctgccccctcatcgtgggagccatgacacgccataaaactcgggaagagtggcaaaacgtgtttctgattgcagctctggtgcactatagtggcgtcattttttatggtgtttttgcctcaggtgaaaagcaggagtgggcggaccccgaaaacctgagcgaagagaagtgcggtattattgatcaggacgagcttgccgaggaaatcgagctgaaccacgagtcctttgcaagccctaaaaagaagatgtcctacggtgcaactagtcagaattgcgaggtccagaaaaaagagtggaaaggacagcgcggggctaccctggacgaagaagaactgacttcttaccagaacgaagaaaggaacttttctacgatatcctag

SEQ ID NO: 205679 - DNA, 1620 bp, synthetic construct
  misc_feature 1..1620: note = Description of Artificial Sequence: Synthetic coding sequence
  source 1..1620: mol_type = other DNA
atgcccttcaaggccttcgacaccttcaaggagaagatcctgaagccgggaaaggagggcgtcaagaatgcagtgggcgattcactcggcattcttcagcgtaagattgacgggactacagaggaagaagataacattgagctgaatgaagagggacggccagtccagacttcacggccttctcctcccttgtgtgactgccattgctgcgggcttccaaagaggtatatcatcgccattatgagcggcctagggttttgcataagtttcggaatccgctgtaatttgggagtcgcaattgtggaaatggtcaacaactccactgtgtatgtggacgggaaacccgagattcagaccgcccagtttaactgggacccagaaacagtggggctcattcatggcagcttcttttgggggtacatcatgacgcagatcccgggcggttttatctccaacaagttcgccgcgaacagagtatttggggcggccatctttttaacaagtaccttaaacatgttcatcccctcagccgcacgagttcactacgggtgtgtgatgtgtgtacgcatactgcagggactggtggagggggttacttacccagcctgccatggaatgtggtccaaatgggcacctcccttggaacgttcaagactggccacaacttccttttgcggtagttatgccggcgctgtggtggctatgccgttggccggagtgctggtccagtatataggttggtcctccgtgttttacatttacggaatgttcggaataatctggtatatgttctggctcttgcaggcctacgagtgcccagccgcgcatccaaccattagcaatgaggaaaaaacttatattgaaacatctattggcgagggagctaatgtcgtttctctatcagtgggactcttatctgccgtgccacatatggttatgacaatcgtggtgccaatcggcggacagctggccgactacctgcgcagccggcaaatactgactactactgccgtcagaaagatcatgaactgtggtggtttcggaatggaggccacgcttctactggtagttgggttttcgcacacaaaaggagtggcgatcagcttccttgtactggcagttggtttttcaggctttgccatatccggctttaatgtaaatcatctcgacatagctcccagatacgcatcaatactcatgggaatttccaatggggtgggcactctgtcgggcatggtctgcccactgatcgtaggagccatgaccaggcacaagacaagagaagagtggcagaatgttttcttgattgccgcactggtccactatagcggcgtgatcttctatggggtgtttgcttcaggggagaaacaagagtgggccgaccccgaaaacctgtccgaggagaagtgtggaatcattgatcaggacgaattagctgaggagattgagctgaatcatgaatctttcgcttcacctaaaaaaaagatgagctatggtgcgacctctcagaattgtgaagtgcagaagaaagagtggaaggggcagagaggggccaccttggatgaagaagaattaaccagctaccagaatgaggaaagaaatttctcaaccatctcctag

SEQ ID NO: 205680 - DNA, 1293 bp, synthetic construct
  misc_feature 1..1293: note = Description of Artificial Sequence: Synthetic coding sequence
  source 1..1293: mol_type = other DNA
atgaccctgaccagccggcggcaggacagccaggaggcccggcccgagtgccaagcgtggacaggaaccctgctcttgggcacctgtctgttgtattgtgcccggtcttcaatgccaatatgtacagtgtctatgagccaggacttcggatggaataagaaggaggctggtatcgtgctgtctagcttcttctggggatactgcctcacacaggtggtgggcggccatctgggagacaggattgggggtgaaaaggtgattttgcttagcgctagcgcctgggggtcaatcacagcagtgactccattgctggcgcatctctcgtccgctcacttggccttcatgaccttttctcgaattctaatgggacttctgcaaggcgtctattttccagccctgacatcattgttgtcacagaaggttagagagagtgaacgggccttcacatactccatcgtcggagccgggtcacagtttggaacgctgctaaccggagcagtgggatcattactgctcgaatggtacgggtggcagtccatcttctacttttccggcggtttgaccctattgtgggtgtggtacgtgtaccgatacctgcttagcgagaaagacctgatcctggccctgggcgttctggcacaaagccgccccgttagccgccacaaccgcgtgccttggaggcgattgtttagaaagcctgccgtgtgggctgcggtggtttcgcaactctctgctgcctgttcatttttcatcctgctttcctggcttcctacattcttcgaagagacctttcctgacgccaaaggctggatctttaatgtggtgccttggcttgttgctatccccgcatcattattcagtggttttctcagtgaccatttgataaaccaaggatacagagcaatcactgttagaaagcttatgcagggaatgggactcgggctcagctctgtcttcgcactgtgtctgggccacacctcaagcttttgcgagagtgttgtgttcgcttcagctagtattggcctgcagacgttcaaccactccgggatctcagttaatattcaggacctcgcccctagctgtgccggcttcctgttcggggtcgccaatactgctggcgcgcttgcaggggtggtgggggtatgtctgggcgggtacctgatggagacgaccggctcttggacctgtctgtttaaccttgtggccattatctccaaccttgggttatgcaccttcttagtcttcggtcaggctcagagggtggatctgtcatcgacgcacgaggatctctag

SEQ ID NO: 205681 - DNA, 1311 bp, synthetic construct
  misc_feature 1..1311: note = Description of Artificial Sequence: Synthetic coding sequence
  source 1..1311: mol_type = other DNA
atgcagcccccccccgacgaggcccggcgggacatggccggcgacacccagtggtccaggcccgaatgccaggcttggaccggcacgcttttactggggacctgtctactttactgcgctaggagcagcatgccaatctgcacggtcagcatgagccaggattttggatggaataagaaagaggccggcattgttctgagttcattcttctgggggtattgcttgacccaagtagttggtgggcacctgggcgacagaatcggcggcgagaaagtgatcttattgtcagcttcagcttggggtagtatcacggccgtcacacctctgctggcgcacctctcctcagcccaccttgcctttatgacatttagtagaattctgatgggattgctgcagggcgtgtactttcccgcccttactagcctactatctcaaaaagtccgcgagtccgagagggctttcacatattccattgtgggggccggctcccagtttgggacactgttgacgggggcagtcggctccctgctattagagtggtatggttggcagtcaattttttacttctctggaggactgactctcctttgggtttggtacgtgtataggtatctgctgagcgaaaaggacctcatccttgctctaggagtgctggcccaaagccggccggtatctaggcacaaccgagttccatggcgccggcttttcaggaaacctgccgtgtgggcagccgtggtctcccagctgagtgccgcgtgttctttctttatactgctatcatggctacccaccttctttgaagaaaccttcccagatgcaaaagggtggatttttaacgtcgttccttggttggtggctattccagccagtttgttcagcggtttccttagcgaccacctgatcaaccagggatacagagcaatcaccgtcagaaagctcatgcagggtatgggcctgggcctaagttctgtgttcgctctctgcctgggacatacaagctccttttgcgaaagtgtggtattcgcttctgcgtccatcggcctccagacgttcaaccactctggtatcagtgtcaacatacaggatcttgcgccctcttgcgctggtttcctatttggggttgccaacactgccggggcgttagcaggagttgtgggcgtgtgcctgggaggttatcttatggagacaactgggagctggacgtgcctcttcaaccttgtagcaatcatctcaaatttaggcctatgtacgtttctggtgtttggccaagcccaacgagtcgacttaagttcaactcacgaggatttgtag

SEQ ID NO: 205682 - DNA, 459 bp, synthetic construct
  misc_feature 1..459: note = Description of Artificial Sequence: Synthetic coding sequence
  source 1..459: mol_type = other DNA
atgttcccccggcccggcgccctgagctggaccgtgcggcggcacactcctagacaagtggagccaccatgtgtatgtatgacccttacttctagacgtcaggattcgcaagaagctcggccggagtgtcaggcatggacaggtacgttactgttaggaacctgcctgctttactgtgccagatccagtatgccgatttgtactgtgtctatgtcccaggatttcgggtggaataagaaggaggccggtattgtcctgtcttcctttttctggggctattgccttacccaagtggtgggcggacacctgggggacaggatcggcggagagaaggtcatcctgctttcagcgtctgcttggggctctattacagcagtgacccccctgctcgcacatctgtcttccgctcatctggccttcatgacattctctagaattctgatgggtctccttcaatag

SEQ ID NO: 205683 - DNA, 1599 bp, synthetic construct
  misc_feature 1..1599: note = Description of Artificial Sequence: Synthetic coding sequence
  source 1..1599: mol_type = other DNA
atggagagcgccgagcccgccggccaggcccgggccgccgccaccaagttgtcagaagctgtgggggcagctctacaggagcctagacgccagagacgccttgttttggttatcgtttgcgtagccctattgcttgacaatatgctgtacatggtgattgtgcccatagttcccgactatattgcccacatgcgtggcggcggggaggggcccactcggacacccgaagtttgggaacccacccttccactgcccaccccagctaacgcctctgcttataccgcaaatactagcgcctcccctacagcagcttggcccgcaggatccgccctgagacctaggtaccctactgagagcgaggatgtcaagatcggcgtgttatttgctagtaaggctatattgcaactgctggtcaatcccctatcaggcccttttattgaccggatgtcctacgatgtgcccctcctgatcggtctgggtgttatgttcgcttcaacagtcctgtttgccttcgccgaagattacgccaccctgtttgcagcccggtctctgcagggactgggttccgcattcgcggatacctccggcatcgctatgatagcagacaagtacccagaggaaccagagcggtcgcgggccctcggggttgcactggcatttatttccttcggcagcctggtggctcctcccttcggaggaattctttatgagtttgcaggcaagagagtaccattcttggtgctagcagccgttagcctgttcgacgctctactgctccttgccgtcgctaagccgttttccgccgcagcccgcgcacgggccaacctacccgtgggcacgccgatccacaggcttatgttggatccctatatcgcagttgtggctggggccttaaccacctgcaacattcctctggccttcctcgaacctaccattgccacatggatgaaacacacaatggctgcttcagagtgggaaatgggaatggcttggctgccagcgtttgtaccacatgtcctcggcgtgtacctgaccgttcgccttgcagcacgttatccacatctgcagtggctctacggagccctcggcctagccgttatcggagcttcatcatgtatcgtcccggcctgtcggtctttcgcccccctggttgtttcgctttgcggtctgtgttttggcatagcattggtcgataccgccctgctgccaaccctggcttttcttgtcgacgtccgacacgtcagtgtctacggatctgtgtacgccatcgcagacatatcctacagcgtggcttatgcgttggggccaattgtggctggccacatcgtccacagcctgggtttcgagcaactgagtcttggtatgggactggcaaacttactttacgcgcctgtgctcctcttgctcaggaatgtcggacttctcactcgttccagatctgaacgcgacgtgctcttggacgagccaccccagggcttatacgacgccgtgaggctgagagaaaggcctgtctccggtcaagatggagagccccgttcaccccctggacctttcgacgcatgtgaggacgactacaactactactacacccgttcgtag

SEQ ID NO: 205684 - DNA, 1482 bp, synthetic construct
  misc_feature 1..1482: note = Description of Artificial Sequence: Synthetic coding sequence
  source 1..1482: mol_type = other DNA
atgctgcggaccatcctggacgccccccagcggctgctgaaggaggggcgagcgtctaggcagttggtacttgtggtggtcttcgtcgcgctgctcctagacaatatgttgttcactgtggtggtgcctattgtgcccaccttcttatacgatatggaatttaaggaggttaacagttccttgcatctgggacatgctgggagttctccccacgctcttgcaagccccgcttttagtacaatattcagcttcttcaacaacaacaccgtagccgtggaggagtccgtgccttccggcatcgcttggatgaatgacaccgcctccacgattcctcctccggccaccgaggccataagcgctcacaaaaataactgtttacagggaacgggcttccttgaggaagaaattacccgtgtcggagtgctttttgcctctaaagcagtcatgcagttgttagttaaccccttcgtgggtccactgacaaacagaattggttaccacataccaatgttcgccgggttcgtaattatgttcctaagtaccgtaatgttcgcattctctgggacatacaccttactgttcgtggccagaacgctgcagggaatcggcagttctttttccagcgtcgccggcttaggtatgctggcctcagtctatactgacgatcacgaaagagggcgagcaatgggaaccgcccttggcggcctagcactggggctcctggtgggagcccctttcggctctgtgatgtatgagttcgtgggcaaatccgcgccgttcctgatcctcgcgtttctagcactcctcgacggcgctctgcaactttgcatcctgcaaccatccaaggtgtcccccgagtcggctaaggggacacccctcttcatgctgctgaaggacccctacatcttagtggcagctggattggctttcctaccagcctctgtttcctatctcatcggcactaacctgtttggcgttctggctaataagatgggcaggtggttatgctctctcattgggatgctggtagtgggcacatcccttctttgcgttccattggcgcataacattttcggactgatcggacctaacgcaggactcggactagctatcggaatggtggactctagtatgatgcccatcatggggcacctcgttgacctcaggcacacatccgtgtatggctcggtctacgccattgcagacgtggcgttctgtatgggctttgccattggtcctagcacaggaggagctatcgtgaaggctatcggttttccttggctcatggtgatcaccggcgtgatcaacatcgtctatgcccctctgtgttactacttgaggtcaccaccagccaaggaggaaaaattggccattttgagccaggactgtcctatggagacccgtatgtatgcgacccagaaacccactaaagaattccctcttggggaggacagtgacgaagagcccgaccacgaggagtag

SEQ ID NO: 205685 - DNA, 1578 bp, synthetic construct
  misc_feature 1..1578: note = Description of Artificial Sequence: Synthetic coding sequence
  source 1..1578: mol_type = other DNA
atgctgcggaccatcctggacgccccccagcggctgctgaaggaggggagggcctccagacagctggtactggtggtggtcttcgtagctctgctgttggataatatgctgttcaccgttgttgtgcccatcgtgcccaccttcctgtatgatatggaatttaaagaggtcaattctagtctccacttgggacatgcaggtagttctccacacgcgctcgcatcccctgctttttcaaccatcttcagcttctttaataataatactgttgctgtggaagaatctgtgccatccgggattgcctggatgaatgacaccgcgagcaccatacccccacctgcgaccgaggcaatctccgcacataaaaataattgtctacaggggacaggattcttagaggaagagataacacgagtcggggttctgttcgcttccaaagccgtcatgcagttgctggtcaacccctttgtaggccccctgactaatcgcattggataccacattccgatgttcgctggttttgtcattatgttcctcagtacagtgatgtttgctttctccgggacatataccttactgttcgtcgctagaacactccagggaattggcagctccttctcaagcgtcgcaggcctaggcatgctcgcttctgtctataccgacgaccacgagcggggccgggctatgggcacagcactggggggcctggccttgggtctcctggtgggtgctcccttcggctctgtgatgtatgagttcgtgggcaaaagtgcccctttcttgatcctggccttcctggccctgcttgatggggccctccagttgtgtatcctccagccttctaaggtatcgcctgaatcagccaaagggactccactattcatgctcctgaaagacccgtatatcttggtggctgctggcagtatctgtttcgccaatatgggcgtcgctatcctggagccaactttaccgatctggatgatgcagacgatgtgttctcccaagtggcaactggggctcgcctttttgccggcgtcggtgtcatatctcattggtaccaatttgtttggcgttctggccaacaaaatgggccggtggctgtgctcccttatcgggatgctggttgtgggaaccagtttgctgtgcgtgccactggcccacaatatttttggcctgattggccccaatgcggggctggggctggccatcgggatggtggattccagcatgatgcccatcatgggacatcttgttgaccttaggcacacttctgtgtatggctccgtgtacgcaatcgctgacgtcgctttctgcatggggtttgcaatcgggcccagtacagggggcgccatcgtcaaagcaattggtttcccatggctaatggtgatcacgggagtcatcaatatcgtctacgcgcctctatgctactacttgcgctcgccccctgcaaaagaagagaagcttgcaatcctgagtcaggactgccctatggagacaagaatgtatgcaactcagaaacccacaaaggaatttccactcggggaggatagcgatgaggaacccgaccacgaggagtag

SEQ ID NO: 205686 - DNA, 1419 bp, synthetic construct
  misc_feature 1..1419: note = Description of Artificial Sequence: Synthetic coding sequence
  source 1..1419: mol_type = other DNA
atgctgcggaccatcctggacgccccccagcggctgctgaaggagggacgggcctctcgacagctcgttttggtggtcgtgtttgttgcgctcctacttgataacatgctcttcactgtcgtcgtgccaatcgtgcccacctttctgtacgacatggagtttaaagaggtcaattctagtctgcacctaggccacgctggtagtagcccccacgcattggctagccccgcattctcgactatcttttccttttttaataacaacaccgtcgcggtggaggagtcggtgccaagtggtatcgcctggatgaatgacacagcttctaccatcccccctccagccaccgaggctattagcgcacataaaaacaactgtctgcagggtacggggtttctggaggaggaaataacaagagttggcgtgctattcgcctccaaggccgtgatgcagcttttggtcaatccttttgtgggacctctgacgaatcgcattggatatcacattcccatgttcgcagggtttgtcattatgttcctctctacggttatgttcgcattttcagggacctacacactgctgtttgtggcccgcactctgcagggcataggtagtagtttttcatctgttgccggcctgggcatgctggccagcgtttacaccgatgatcacgagcggggtcgagccatggggacagctttgggggggctcgcacttggattgctggtgggtgcaccattcgggtctgtgatgtacgaatttgtgggcaagtccgccccctttctaatcctggcatttcttgcgcttttggacggtgctctgcagttatgcattctgcaaccaagtaaagtttctcccgaatccgctaaagggacccccctcttcatgctacttaaagacccttacattctggtagcggctggctctatctgcttcgccaatatgggggttgcaatactggaaccaacgctgcccatatggatgatgcagaccatgtgtagccctaaatggcagctgggcttagcatttctaccggcaagcgttagctacctgataggtacaaacctgtttggcgtacttgctaacaagatggggcggtggctctgctccttaatcgggatgcttgttgttggtacatcccttctatgtgtgcctctggcgcataacatttttggtctcataggtcccaacgccgggctgggactcgctattggaatggtggattcgagtatgatgccaattatgggccacctggtggatctgcggcacacgtccgtgtacggctccgtgtacgctatcgccgatgtcgcgttctgcatgggtttcgctatcggttatagcgaaagcggcctgcctcatggcgaccctgatgtgtgcaatccagaggcccatgagggcatatcaagcggtggcggtcaatag

SEQ ID NO: 205687 - DNA, 1578 bp, synthetic construct
  misc_feature 1..1578: note = Description of Artificial Sequence: Synthetic coding sequence
  source 1..1578: mol_type = other DNA
atgctgcggaccatcctggacgccccccagcggctgctgaaggagggacgggcgtcaagacagcttgttctggtggtggtttttgtcgctctgctcttagataatatgctcttcactgtcgtcgtcccaattgtgcctactttcctttatgatatggagttcaaggaggtgaattcatcactccatctgggtcatgccggatccagccctcacgcgctggcatcacctgctttcagcacaatcttctccttttttaataataataccgttgcagtagaggagtccgtcccatcaggaatcgcatggatgaatgatacggcaagtaccatcccccctcccgctaccgaggcgatctcagcccacaagaataactgtctccaaggaaccggctttctcgaggaggaaatcacacgggtgggggtgctgtttgcaagcaaagccgtcatgcagttgctagtgaatccttttgtgggtccactgaccaacaggattggataccacattccaatgtttgccggtttcgtaattatgttcttgagcactgttatgttcgctttcagcgggacttataccctgctcttcgttgctcggacattgcaagggatcggtagctcattttcctcagtggctggcctcggtatgttggcctccgtgtacacggatgatcacgaaaggggcagagcaatgggcacagctctggggggactggcactgggactgctcgtgggagctccgttcggctccgtgatgtacgaattcgtggggaaatccgctccattcctgattctggccttccttgccctgctagatggcgcattgcaattatgcatcctgcagcccagtaaagtgtcgcccgagagtgcaaagggcacaccactgtttatgcttctaaaagatccttatattctggtggccgccggttctatttgtttcgccaacatgggagtagctatcctcgaacccactttacccatttggatgatgcagacaatgtgctcccccaagtggcaactggggcttgcctttctccccgcttccgtctcgtatctgattggcactaaccttttcggcgtgctcgctaataaaatgggacgctggctgtgcagcctcatcggaatgctcgtggttggcacctctctcttgtgcgtgcccctcgcccataacatctttgggctaattggcccaaacgccggcctgggattggctatcggaatggtggattctagcatgatgcctatcatgggtcatcttgtagacctacggcacacctcagtatatggatctgtgtatgcgatagccgatgtcgctttttgtatgggtttcgccatcggcccttcgacgggcggcgcgatcgttaaagcgatcggatttccttggcttatggtgattaccggggttatcaacatcgtctacgctccactgtgttactaccttaggagcccgcctgccaaagaggaaaagctcgccattctgtcgcaggattgccccatggagacacgcatgtatgccacccaaaagccaacaaaggaatttcccttgggcgaggattccgatgaagagccggatcacgaagagtag

SEQ ID NO: 205688 - DNA, 1158 bp, synthetic construct
  misc_feature 1..1158: note = Description of Artificial Sequence: Synthetic coding sequence
  source 1..1158: mol_type = other DNA
atgctgcggaccatcctggacgccccccagcggctgctgaaggagggacgcgcttccagacaattagtgctggttgttgtattcgtcgccctcctgctggacaacatgctcttcactgtggtggtgccgatagtgccgacgtttctttacgatatggagttcaaagaggtaaattcatctctgcacctgggccacgcaggctcctctcctcacgcactcgcctcacccgccttttccactatctttagtttctttaacaataacaccgttgcagtggaggaaagcgtaccttcgggaatcgcatggatgaacgatacagcatctaccatcccccctccagcgacagaagctattagcgcacacaagaataattgcctgcagggcaccggctttctggaggaggagattactcgggtcggggtactgtttgcatctaaagccgtgatgcagctactcgttaatcccttcgttgggcccttgaccaacagaatcggatatcatataccgatgtttgccggatttgtgatcatgtttctctctacggttatgttcgcatttagtggaacttacacactgctcttcgtggcgagaaccctccagggaataggctccagctttagttctgtggctggactggggatgcttgcttccgtgtatactgatgaccatgaacgcggccgagcaatgggaaccgcactgggggggctcgcgcttggcctgctcgtcggggccccgttcggcagtgtaatgtatgaattcgttgggaaaagtgctccattcctgattctggcattcctggccctgcttgacggcgccctgcagctgtgcatcctgcagccctctaaagtcagccctgagtcagctaagggcactcctctctttatgctgctgaaggacccctacatcctcgtggcagccggtagcatatgcttcgcgaacatgggggtggcaattctggagcccaccctccctatatggatgatgcagacaatgtgtagcccgaagtggcagctgggactggccttcctccctgccagtgtcagctacttgatagggacaaatctgtttggagtgctggccaataaaatggggaggtggctgtgtagtcttattggaatgttggtcgtcgggacttccctgctgtgcctcccttcttag

SEQ ID NO: 205689 - DNA, 1482 bp, synthetic construct
  misc_feature 1..1482: note = Description of Artificial Sequence: Synthetic coding sequence
  source 1..1482: mol_type = other DNA
atgctgcggaccatcctggacgccccccagcggctgctgaaggagggccgggcaagtaggcagctggtgctggtcgtggtctttgtggctcttttacttgacaacatgctgttcactgtggttgtgccaattgtgccaacattcctatacgacatggaatttaaagaagttaacagttcacttcacttgggccatgctgggagttctccacatgcattggcatcccccgcgttttctacgatcttctctttttttaacaataataccgtcgccgtcgaggaatcggttccttctggcatcgcatggatgaatgataccgcttcgaccattccccctcccgcgacagaagccatctcggcccataaaaataattgtctccagggcactggtttcttggaagaggaaattacaagagtgggcgtgttattcgctagcaaagcggtgatgcagttgttagtgaatcccttcgtgggtccactgacaaacagaataggctatcatattcccatgttcgccggttttgtgataatgttcctctcaacagttatgtttgctttctccggcacgtataccctgctgtttgttgcaaggactctgcaggggattggcagctcctttagctcggtggcgggccttggcatgttggcctcagtctacactgacgatcatgagcggggtcgagcaatgggaacagcgctgggaggcctggcattaggcctgctggttggagcgcctttcggctccgtcatgtatgagtttgtgggcaagtctgctccatttctcattcttgcgttcctggccctgctggatggtgccctccagttgtgcatcctgcagccaagtaaggtatctcccgagagtgcaaagggcactcccctgttcatgcttcttaaggatccatatatcctggtggcagctggccttgcgttcctgccagcaagtgtgtcatatctgatcggaaccaatctttttggagttctcgccaataagatggggcggtggctgtgctctttgataggaatgcttgtggttggcacatcgctcttgtgcgtacccctggcacacaacatattcggcctgatagggcctaacgcgggattaggattagcgatagggatggtggactcctccatgatgccgattatgggtcatttggtggatctcagacatacgtcagtgtacggatcagtttacgccatcgccgatgtcgctttctgcatgggcttcgctatcggccccagcacaggaggagctatcgtgaaggcaattggtttcccttggcttatggtcatcactggagtgattaacattgtttacgcgcccctgtgctattatcttaggtcacccccggccaaagaagaaaaactcgctattctgtcccaggactgccctatggagaccagaatgtacgccacccagaagccaacgaaagagttcccgctgggcgaggattcagatgaagagcccgatcacgaagagtag

SEQ ID NO: 205690 - DNA, 1545 bp, synthetic construct
  misc_feature 1..1545: note = Description of Artificial Sequence: Synthetic coding sequence
  source 1..1545: mol_type = other DNA
atggccctgagcgagctggccctggtgcggtggctgcaggagagccggcggtcgaggaagctgattctgtttatcgttttcttagcactcctccttgataatatgcttctcaccgtggtcgttcccatcatcccttcttacctctatagtatcaagcatgaaaagaatgccacagagattcaaacagctcgccccgtacataccgcatcaatctccgatagcttccagtccatcttttcttattacgacaattcaacaatggtcacaggcaatgccacacgtgacctgacactgcaccagactgccacccagcacatggtcaccaacgcctcggcggtccccagcgactgcccgagcgaagataaagacctcttgaacgagaatgtacaagtcggcttactctttgcctcaaaagctaccgtacagctaatcactaacccgttcattggacttctgacaaaccggatcggctacccaatacccatctttgctggcttctgtattatgttcgtgagcaccattatgttcgccttttccagcagctacgccttcctcctaatcgcaaggagcttacaagggatcggatcatcttgctcttcagttgccgggatgggaatgctggctagtgtctatacagacgatgaggagaggggaaacgtcatgggcattgctctaggcggtctggcaatgggtgtgttggttggccccccattcggatcagtgctatatgagtttgtgggaaagacagcaccttttctggtgctcgccgccctggtgctgctggacggagcgatccaactgttcgtgctgcagccgagccgggttcaacccgaatcccagaagggcacgcccctgactactctgttgaaagacccatatatcctcatcgccgccggaagtatatgtttcgccaatatgggaatcgcgatgcttgagcctgcccttccgatctggatgatggagactatgtgctcccgaaaatggcagctcggagttgcttttctgccagcaagcatatcctatctgatcggaaccaacatcttcggtatcctcgcacataagatgggtaggtggctgtgtgccctgctcggcatgatcatagtgggagtgagtattttgtgcatcccatttgctaaaaatatttatggtcttatcgcaccgaacttcggtgtaggttttgctatcgggatggttgacagttctatgatgcccattatgggctacctggttgaccttcgtcatgtgagtgtttatgggtctgtgtatgccattgccgacgtcgctttctgcatggggtacgccattgggccttcggcagggggagcgatcgccaaggccataggttttccctggttgatgacgattatcggcattattgacatcctgtttgccccattgtgcttcttcctgagaagcccgcctgcaaaagaagagaaaatggccattctgatggaccacaattgtccaatcaagaccaagatgtatacgcagaacaatatacagtcttacccaatcggggaagatgaggaatcagaatcagattag

SEQ ID NO: 205691 - DNA, 1494 bp, synthetic construct
  misc_feature 1..1494: note = Description of Artificial Sequence: Synthetic coding sequence
  source 1..1494: mol_type = other DNA
atggacgtgcccggccccgtgagccggcgggccgccgccgccgccgccaccgtgttattaaggaccgctcgcgtccgcagggagtgctggttcttgcccaccgctcttctttgcgcatatggcttcttcgccagtcttaggcccagcgagcctttcctgaccccgtacctgctcggccctgataagaatctcaccgaacgggaagtctttaacgagatttatcctgtgtggacttattcctatctggtgctgctgttccctgtttttttggctacagattacttgcgctataagcccgttgtcttgctacagggactgtccttgattgtgacatggttcatgctgttatatgcccagggcctattggcgatccaatttctcgagttcttttacggaattgctacagccacagaaattgcttattactcctacatttactctgttgttgacctggggatgtatcagaaagtgacaagctattgtagaagcgctactcttgttggctttacagtgggctctgtgttaggccagatcctcgtcagcgtagctggttggtccttatttagcctgaatgttattagcttaacttgtgtctccgtggccttcgccgtcgcgtggtttctgccgatgccccagaagtccttgttcttccaccacattccctcaacttgtcagcgggtgaacgggatcaaggtccagaatggcggcatcgtgaccgataccccggcaagcaatcatttgcccggctgggaagacattgagtcgaagatccccctgaacatggaagaaccacctgttgaagagcccgagcccaagcctgacagactgctcgtgttgaaggtcctgtggaatgactttctgatgtgttacagcagccgtcccctcctgtgttggtcagtgtggtgggcgcttagcacctgtgggtattttcaagtggtcaattacactcagggtctttgggaaaaggtgatgccttcaaggtacgctgcgatatacaacggcggcgtcgaggccgtgtccacacttctgggcgccgttgccgtttttgctgtgggctatatcaagatatcctggagcacatggggcgaaatgacactttctctcttttcattactcatagctgctgctgtctacattatggatacagtagggaacatctgggtatgttacgcttcctatgtcgtattccgtatcatctatatgctcctgataacaatcgctacatttcagatcgcggcgaacctcagcatggaacggtacgccctggtttttggagtgaataccttcattgccttggctctgcaaacactgctgacccttattgtcgtggatgcctcaggtctagggctggaaatcacgacgcagttccttatctatgcctcttattttgctctcattgcagtggtctttctggcaagcggcgccgtttcagtgatgaagaagtgccggaaactcgaggacccccagagtagtagtcaggtcaccacatcatag

SEQ ID NO: 205692 - DNA, 1380 bp, synthetic construct
  misc_feature 1..1380: note = Description of Artificial Sequence: Synthetic coding sequence
  source 1..1380: mol_type = other DNA
atggacgtgcccggccccgtgagccggcgggccgccgccgccgccgcaaccgtgctgctacgcactgcccgcgttagacgcgagtgttggttcttacctacagcactactgtgcgcttatggtttcttcgcatctctgagaccaagtgagccctttttgacaccatacctattgggcccagacaagaacctgacagaacgagaagtgtttaacgagatctatccggtgtggacctacagctacttagttcttctttttccagtcttcctcgccacagactatctacgctataaacctgtggttctactgcagggattgagtttgattgtgacatggttcatgctgctgtatgcacaaggtctcttagccatccagttcctcgagttcttctatggcatagctactgctactgagatcgcttactactcctatatatattccgtggtggatctgggtatgtatcaaaaagttacatcctattgcagatctgccactctcgtaggcttcactgtggggagcgtcctggggcagatcctggtgagcgtggcagggtggagtttgttcagcctcaatgtaatcagtttgacatgtgtgtctgttgccttcgcagttgcttggtttttgccaatgcctcagaagagtctattttttcaccacattcccagtacgtgccaaagagtgaatggcattaaggaaccaaagccagacaggctgctagtgctgaaagtgctttggaacgattttttaatgtgctatagctcgcgccctctgctgtgctggagtgtgtggtgggctcttagtacttgcggttacttccaagttgtgaactacacccagggcctgtgggagaaggtgatgccttcacgatacgcagccatttacaatggcggcgtggaggccgtgagcaccctgctgggtgccgtagcggtcttcgccgtgggttacatcaaaatatcctggagtacgtggggtgaaatgacgctcagtctgtttagcctcctgatcgccgccgctgtatatataatggatacagtggggaacatttgggtgtgctatgcaagctatgtggtgttccggataatttatatgcttttgatcaccatcgccaccttccagattgctgcaaacctatcaatggaaaggtatgcccttgtattcggtgtgaatacattcattgccctggctctgcaaacactcctgaccctcattgttgtagacgcttctgggcttgggctggagataactacccagtttcttatatacgccagctatttcgcactgatcgcggtagtattcttggcaagtggggcggtgtctgttatgaagaaatgtcgaaaactcgaggatccccaatcctcctcccaggtgacaacgtcttag

SEQ ID NO: 205693 - DNA, 891 bp, synthetic construct
  misc_feature 1..891: note = Description of Artificial Sequence: Synthetic coding sequence
  source 1..891: mol_type = other DNA
atggacgtgcccggccccgtgagccggcgggccgccgccgccgccgccactgttctgttgaggacagcccgcgtgaggcgggaatgttggtttttgcctacagccctgttgtgcgcctatggtttctttgcatcactgagacctagtgagccatttctgacaccttatcttctggggcctgataagaatctcaccgagcgagaggagccaaaacccgaccggctgctggtcctaaaggtgctgtggaatgactttctgatgtgttacagctcacgtcccttactctgttggtccgtttggtgggcgctttcaacatgcggctattttcaagtggtgaattatacccagggcctgtgggagaaagtcatgccaagtagatacgccgccatctacaacggtggagtggaggctgtgtctacgctgttgggagcggtcgccgtcttcgccgtggggtatatcaaaatctcatggtccacctggggagagatgacactgtccctgttcagcctcttaattgcagctgccgtctacatcatggacaccgtcggcaacatctgggtgtgttacgcaagctacgtcgtctttagaattatctatatgctgttgattacaatcgcgacgtttcagatcgctgccaatctatcaatggagcggtatgcactggttttcggcgtcaatactttcattgcgttggcgcttcaaacgctactcactctgatcgtagtggatgcatccggattaggattagagattacgacacaattcctgatctatgcgagttattttgcgttgatcgctgtggtttttctggcctccggggccgtaagcgtgatgaaaaaatgtagaaagttagaagatcctcagtctagctcccaggtgacgacatcctag

SEQ ID NO: 205694 - DNA, 1491 bp, synthetic construct
  misc_feature 1..1491: note = Description of Artificial Sequence: Synthetic coding sequence
  source 1..1491: mol_type = other DNA
atggactgctaccggaccagcctgagcagcagctggatctaccccactgtcatcttatgtctgtttggtttcttcagcatgatgagaccctccgagccctttctgatcccgtacctatctgggcctgacaagaacctgacctctgcagagataactaacgagatattccccgtgtggacttacagctatctagttctgctcctccctgtctttgtacttaccgattacgtcaggtacaagcccgtcatcatattacaggggatttcattcatcattacatggcttctgctgttgtttggacagggcgtgaaaaccatgcaggtcgtggagttcttttacgggatggtaaccgctgccgaggtggcgtactacgcctatatatattccgtcgtttcccctgagcactatcagagggtctctggatattgccggtctgttactctcgcagcatacactgctgggtcagtgctcgctcaactgctggtgagcctggctaacatgagttatttctaccttaacgtcatttccctggcctcagtgtccgtcgcttttctgttctctttatttctccctatgccgaagaagagcatgttctttcacgccaagccgagcagggagatcaagaagagtagctccgtgaacccagtgctggaggagacccacgagggggaagctcccgggtgtgaagagcagaagcctacatccgaaatcctcagcaccagcggtaagctcaataaaggacaactaaattcactcaaaccatcaaacgttaccgtggatgtttttgtgcagtggtttcaggacttaaaggagtgctactcttcgaagcgtctgttctactggtccctatggtgggcttttgctacggcaggatttaatcaggttcttaattacgtccagatactctgggactataaagcccctagtcaagactcctccatctacaacggggctgttgaagctatagctacttttggaggtgccgttgcggcattcgcggtggggtacgtcaaggtcaactgggacctgttgggggagcttgctctggtagtcttctctgtcgtcaatgcggggtctctgtttctcatgcactataccgcgaatatatgggcctgctatgccggatatctgatattcaagtctagctacatgttactaatcactattgccgtgttccagatcgccgttaatttaaatgtcgagcggtatgccctggtattcggaattaacacatttatcgccctggtgatccaaaccatcatgacagtcatcgtagtggaccagcgtggcctaaacttgcccgtgagtatccagttccttgtctacgggagctacttcgcggtcattgctggtattttcctgatgcgctctatgtatattacttattccaccaagtcacagaaggacgttcagtctcctgctccaagtgaaaatcccgacgtctcccatcctgaggaggagagcaatattattatgagcaccaagctctag

SEQ ID NO: 205695 - DNA, 165 bp, synthetic construct
  misc_feature 1..165: note = Description of Artificial Sequence: Synthetic coding sequence
  source 1..165: mol_type = other DNA
atggactgctaccggaccagcctgagcagcagctggatctaccccaccgtgatactttgcctgtttgggttcttctcgatgatgagaccaagcgaacccttccttattccttacctcagtgggccagacaagaacctgacctctgccgagatcaccaatgagtag

SEQ ID NO: 205696 - DNA, 195 bp, synthetic construct
  misc_feature 1..195: note = Description of Artificial Sequence: Synthetic coding sequence
  source 1..195: mol_type = other DNA
atggactgctaccggaccagcctgagcagcagctggatctaccccactgtgatcctctgcctgtttggcttcttctccatgatgaggccgagtgagccatttctgatcccatacctgtcaggaccagacaaaaacctcacatctgcggagatcactaacgaaatttttccggtctggacctacagctacctatag

SEQ ID NO: 205697 - DNA, 1491 bp, synthetic construct
  misc_feature 1..1491: note = Description of Artificial Sequence: Synthetic coding sequence
  source 1..1491: mol_type = other DNA
atggactgctaccggaccagcctgagcagcagctggatctaccccaccgtaatcctttgtctgttcggcttctttagcatgatgcgaccttctgaacccttcttgatcccttacctgtccggccccgacaaaaatttgaccagtgccgaaatcacaaatgagatatttcccgtgtggacatacagttaccttgtgttactgctgccagtgtttgttctaaccgattatgtcaggtacaaacccgtcatcatcctgcaaggaattagcttcatcattacatggcttctcctgctgttcggtcagggagttaagacaatgcaggtggtcgagtttttctacggcatggtgactgccgccgaggtggcctactacgcttacatttacagcgttgtgagccctgagcactaccaacgcgttagcggctattgtagaagcgtgacactcgccgcttatacagctgggtcggttttagcgcagctcctggtgtctctcgccaatatgagctatttctacctgaacgtcatctctcttgctagcgtgtcagtggcattcctgttctctctatttcttccaatgccaaagaagagtatgttcttccatgccaaaccatctagggaaatcaaaaaatcaagttctgtgaaccccgtgctggaggagacccacgagggcgaagcaccaggctgcgaagaacagaaaccgacctccgaaatattgtccactagcggcaagcttaacaagggccaattgaatagcctgaagccaagcaatgtcactgtggatgtgttcgtccagtggttccaggacttgaaagagtgttattcaagcaaaagactcttttactggagcctctggtgggctttcgcaacggcgggctttaatcaggtactgaattatgtgcagatcctttgggactacaaggctccctcacaggactcctccatttacaatggggcagtcgaggctattgcaaccttcgggggcgctgtggctgcgtttgctgttgggtacgttaaggttaactgggaccttttgggcgagcttgctctcgtagttttttccgtagtgaatgctggttcccttttcctgatgcactataccgccaacatctgggcatgctacgcaggctatctgatatttaagtcctcctatatgctcctcattacgattgctgtcttccaaattgccgtaaacctgaacgttgaacgatacgctctggtgtttggcattaacacctttatcgccctggtgatacagacaatcatgactgtgatcgtggtcgatcagaggggtttgaacctgccagtctcgatacaattccttgtgtacggaagctactttgccgtgattgctggcatcttcctcatgcgtagcatgtacatcacttacagtaccaagagtcagaaagacgtgcagtcacccgctcctagcgagaatcccgacgtgtcacacccagaggaggaaagcaacattattatgtcgacaaaattatag

SEQ ID NO: 205698 - DNA, 399 bp, synthetic construct
  misc_feature 1..399: note = Description of Artificial Sequence: Synthetic coding sequence
  source 1..399: mol_type = other DNA
atggactgctaccggaccagcctgagcagcagctggatctaccccaccgtgattttatgtctttttgggttcttctccatgatgagaccaagcgagccgtttttaatcccctatttaagcgggcccgataagaacctcacttcagcagagataacgaacgaaatctttccggtgtggacttatagctatctcgtgctgttgctcccggtctttgtcctgacggactatgttaggtacaaacccgttatcatcctacagggaattagcttcatcatcacttggctgctgctgctgtttggacagggggttaagacgatgcaggtggtggagtttttctacggcatggtgaccgccgccgaggtggcttactacgcctacatctattctgtcgtgagttag

SEQ ID NO: 205699 - DNA, 1479 bp, synthetic construct
  misc_feature 1..1479: note = Description of Artificial Sequence: Synthetic coding sequence
  source 1..1479: mol_type = other DNA
atgaaccccctgggcagcgccagccgggccaccgtggaccagctgacagacctcccctccaaagaacagctcagctgcgtggtgtttgctctctggccacctgctttttcctccaatctgtccgaccccggagttaaaatcaccaatgagatctttcctgtgtggacttacagctatctggtgctgttgcttcctgtctttgttctcaccgactacgtgcgatacaagcctgtcatcatcctgcaagggatctcatttataattacatggttgctgttgctgttcggtcaaggagtgaagaccatgcaagtggtggaattcttttacggcatggtgacggccgcagaagtggcttactacgcctacatttacagcgtggtatctcctgaacactaccagcgggttagcggttattgcagatctgtgaccctcgcagcttatacagctggatcagtcctcgcgcagctgctagtgagcctcgccaacatgagttacttttacctaaacgttatctcattggcgagcgtgagtgtcgccttcctgttcagcttgtttcttcccatgcccaagaaaagcatgtttttccatgcgaagcccagcagggagattaagaaatccagcagcgtcaatcctgtcctggaggaaacacatgaaggcgaagcgcctggctgcgaggagcaaaagcccacttctgagattctttcaacctcgggaaagctcaacaagggccagctgaactcactcaaacccagcaacgtgaccgttgacgtgtttgtccagtggtttcaggacctgaaggaatgctactcttctaagcgtctattttactggtcactgtggtgggcttttgcaactgcggggtttaaccaggtgctgaactacgttcagatcttgtgggactacaaggcaccttctcaggattctagtatctacaacggggcagtggaagcaattgctacgttcggtggagcggtggctgcctttgccgtcgggtatgtgaaggtgaactgggacctcctgggggaactagcacttgtggttttttctgtagtgaatgccggatccctgttcctcatgcactacacagcaaacatctgggcgtgctacgcggggtacctgatatttaaaagctcatacatgctgctcataaccatagcagtattccagatcgccgtgaatcttaatgtagaacgttacgcactggtgttcggcatcaacacttttatagctctagtgattcagactattatgactgtaattgtggtggaccagaggggccttaatttgccagtaagcatacagtttctagtgtacggctcctacttcgcggttatcgctggcatcttcttgatgagatcaatgtatattacatactccaccaagagtcagaaagatgtgcagagccccgctccctctgaaaacccagatgtttcccatccagaggaggaatcaaacatcatcatgtccacaaaactgtag

SEQ ID NO: 205700 - DNA, 1626 bp, synthetic construct
  misc_feature 1..1626: note = Description of Artificial Sequence: Synthetic coding sequence
  source 1..1626: mol_type = other DNA
atgggccacagcccccccgtgctgcccctgtgcgccagcgtgagcctgcttggcggcctcacattcggctacgagttagctgtgattagcggtgcgcttcttcccctgcagctcgactttggtttatcctgcttggagcaggaattcctcgtcgggagcctgttgctgggagccctgctcgcttctttggtgggggggttcctcatagactgttacggaagaaaacaagcaatcttggggtccaacctcgtgctgttagccggcagcctgacactgggtctggcagggtccctggcgtggcttgtgttgggaagagctgtggtggggttcgcgattagtcttagcagtatggcttgttgtatctatgtgtcggagctcgtgggtcctagacagaggggggttctcgtctccctctatgaagccgggatcactgttggcattctgctgtcctatgcactgaattacgctttagcaggcactccatggggttggagacacatgttcggttgggctacagctcccgccgtgttgcagtcattgtctcttctgttccttcctgccgggactgatgagactgccacacacaaagacctgatacctttacagggaggagaggctcccaaactggggcccggtagaccccgatacagctttctggatctatttcgcgctagggataacatgcgcgggcgcacaacagtcgggctcggcctggttctttttcagcagctcacaggccaacctaacgtgctctgctacgctagcaccatcttttccagcgtgggctttcatggcggcagcagcgccgttcttgcttctgtcggactgggcgcggtgaaagtggctgcaaccttgacagctatggggctggtggaccgcgccggccgaagggcactgctcttggccgggtgtgccctgatggcccttagtgtcagcggcatcggattggtgtcctttgcggtccctatggatagtggaccttcttgcttggcagtacccaatgccacaggacaaactggcttgcccggagattccggcttactccaggacagttctttacctcccatacctcgaaccaatgaagatcaacgagaaccaatattatctactgccaagaaaactaaaccacatccgaggagcggcgacccatccgccccgcccagattggctttatcaagcgcccttccgggaccccctctcccagcccgcggccacgccctgctccgctggactgcattgctatgcttgatggtgtttgtctccgcattcagcttcgggttcggccccgtcacatggttggtccttagcgaaatctacccagttgagatcagaggaagagcatttgctttttgtaattcattcaactgggcagcaaatctgttcatttctctctcctttctggatcttatcgggacgattggccttagttggacctttcttctatacgggctgaccgctgtgctgggtctaggttttatctacctcttcgtgccggaaacgaaggggcagagcttagccgagatagatcagcagttccagaaaaggcgttttacattgtcctttggtcaccgccaaaactcaaccggaattccttactctaggatcgagatttccgccgctagttag

SEQ ID NO: 205701 - DNA, 1947 bp, synthetic construct
  misc_feature 1..1947: note = Description of Artificial Sequence: Synthetic coding sequence
  source 1..1947: mol_type = other DNA
atgagccggaaggccagcgagaacgtggagtacaccctgcggagcctatcctctctcatgggagaaagaaggcggaaacagcctgagcctgatgccgcaagcgctgctggcgagtgttccctgctggctgcggccgaatcatccacttctcttcagtccgccggcgcgggtggcgggggtgtgggtgacttagaacgagccgcccgcaggcaatttcagcaggacgaaactcccgctttcgtctacgtggtcgctgttttttcagctctgggtggatttctctttggatacgacactggcgtggtcagtggagcaatgctgctgctgaaacgacagctgagcttggatgcactgtggcaggagctgctagtttccagtacggtgggcgcggctgccgtgtccgcactggcaggcggggcacttaacggcgtttttggtagacgggcggccattctgttggcatctgcgctattcacagctgggagcgcggtcctggccgctgctaataacaaagaaactctgcttgccggaaggctcgtggtaggcctgggtattgggattgcttccatgaccgtgccggtctacatagctgaggtctctcccccaaatctccgaggtagactcgtcactattaacacactgtttattaccggcggccagttttttgctagtgtggtggatggagcgttctcatacctgcagaaggacggctggagatacatgctgggcctggccgctgtgccggcagtcatccagtttttcggatttctcttcctccctgagtctcctcgatggcttatccaaaagggtcagacccaaaaagcacgcagaattttgtctcagatgagaggaaatcagactatagatgaagagtatgacagcattaagaataacatagaagaagaggagaaggaggtcggcagcgctgggcctgtgatatgtcgcatgctgtcttacccgcccacccgaagagccttgattgttgggtgtggcttacagatgttccaacaactaagcggtattaacaccattatgtattattccgcgaccatcctccagatgtcaggagttgaagacgaccgcctggccatatggcttgctagtgtgactgcttttactaactttatctttactttagtcggcgtctggctagtagaaaaagtcgggagacggaaattgactttcgggagcctagctggaacaactgtagccttgataatactggcactcggctttgtgctcagtgcacaggtgtcgcccaggatcaccttcaagcccattgccccttcgggacagaatgcgacatgcacgcgctatagctattgcaatgaatgcatgctggaccctgactgcggcttctgctacaagatgaataagagtactgtgatagactcctcttgcgtgcccgtcaataaagctagtacgaacgaggcagcttggggccgatgcgagaatgagaccaagttcaagactgaagacattttctgggcttacaatttttgccctactccttactcgtggactgccctgctcggacttatattatacctagtattctttgctccaggaatgggcccaatgccatggacagtgaatagcgaaatctaccctctctgggcccggtctactggcaacgcttgttctagtggaatcaattggattttcaatgtgctcgtgtcacttactttcctacacaccgctgagtatttgacttactatggagccttcttcttgtacgcagggttcgcagccgttggacttctgttcatctacggatgtctgcctgagactaaaggtaagaagctcgaagagatcgaaagtctgttcgataatcgtctgtgtacctgtggcacttctgatagtgacgaaggacgctacatcgaatacatcagggtgaaagggagcaattaccacctcagcgacaatgacgctagcgatgtggagtag

SEQ ID NO: 205702 - DNA, 1074 bp, synthetic construct
  misc_feature 1..1074: note = Description of Artificial Sequence: Synthetic coding sequence
  source 1..1074: mol_type = other DNA
atgagccggaaggccagcgagaacgtggagtacaccctgcggagcctgtcctctttgatgggggaacggagaaggaaacaacccgagcccgatgctgcctcggccgccggggaatgtagcttactcgccgctgcggagtctagcacatccctccagtctgcgggggctggcggcggaggggtcggggacctggagcgagccgcacgtcgtcaatttcaacaagatgagacaccagcctttgtgtacgtggtggctgttttttccgccctgggcggctttctttttgggtacgatactggagtcgtaagcggagctatgctactgctcaagcgccagttgtctttagacgcgttgtggcaggaactcctggtgagttccacagtgggcgcggccgccgtgtccgccctcgccgggggcgcattgaacggagtgtttgggcggcgagccgccatcctgctcgcctcagcactgtttaccgctgggtcagctgtcctcgcggccgccaacaataaagagaccttactggcaggacgcctggtcgtggggttgggtattgggatcgcctccatgacagtgccggtgtacatcgcagaggtgagtccgccaaacttgaggggccgcctcgtcactatcaacacattatttatcaccgggggtcagttttttgccagtgtagttgatggcgcgttttcatatctgcagaaggatggctggaggtatatgctgggtctggctgccgtccccgcagttatccaattctttggattcctgtttttacccgaatcccctaggtggctgatccagaagggacagacacagaaagccaggagaatcctcagccagatgagaggtaatcagactatcgacgaagaatacgattctattaaaaataatatcgaagaggaggagaaagaagtgggtagcgccggtccagtcatctgtcggatgttgagctaccctcccacaaggcgggccctgatcgttggctgtggcttgcagatgtttcaacagctgtccggcataaacaccatcatgtacgtgttcctatcaggatttttgttgaaaaggctctag

SEQ ID NO: 205703 - DNA, 1494 bp, synthetic construct
  misc_feature 1..1494: note = Description of Artificial Sequence: Synthetic coding sequence
  source 1..1494: mol_type = other DNA
atggacaaccggcagaacgtgacccccgccctgatcttcgccatcactgtagccaccatcggatcattccagttcggatacaataccggagtaatcaacgcccccgagacaatcatcaaagaatttatcaataaaacactcacggataaggcgaatgctccacccagtgaggtcctgcttacaaacctgtggtcactctccgtggctatatttagtgtgggaggaatgatcggctcttttagcgtagggctgtttgtcaaccgtttcggtcgtaggaactcaatgttaattgtcaatctgctggcggcaaccggtgggtgcctgatgggcctgtgcaagatcgcagaatcagtcgaaatgctgattctcgggaggctggtgatcggccttttctgcggtctgtgcacgggatttgtgcccatgtatatcggggagattagtcccacagccctgcgaggagcttttggcacattgaaccagttaggaatcgtcataggaatcctggtggctcaaatctttggactggagttaatcctgggctcagaagaactgtggcccgtgctcctggggtttaccatcctccctgcaatactgcagagcgccgctctcccctgttgtcctgagtctcctcggttccttctgattaataggaagaaggaagaaaatgccacacgaatattgcagagactgtgggggacacaggatgtgtcacaagatattcaagaaatgaaggatgagtcggcccgcatgtcacaggagaagcaagtgaccgtgctcgaattatttagggtaagcagttatagacaacctattatcatatccatagtgctgcagcttagccagcagctttctggaattaacgctgtattctactattctaccggaatatttaaggatgctggagtccagcagcccatttacgctaccatctcggctggcgtagttaatacgatatttactctcctgtcactattcctcgttgaacgggcgggaaggagaaccctccatatgatcggattgggggggatggccttttgttcgactctgatgaccgttagcttactcctgaagaaccactacaacgggatgtccttcgtttgtataggcgccatcctcgtattcgtggcatgctttgagattgggcccggacctatcccttggttcattgtggcagaactcttcagccaaggtcctcggcctgccgctatggcagtggccggctgcagcaattggaccagcaattttttggtgggcctcctgtttccaagtgccgcctattacctgggcgcttatgtgtttatcattttcacaggctttctcattactttcctcgcctttacgttcttcaaggttcccgagacaaggggacgcacattcgaggacatcacccgcgcctttgaagggcaggcccacggcgccgatcgcagcggaaaagatggcgtcatgggcatgaacagcatcgagcctgcaaaggaaacaactactaacgtctag

SEQ ID NO: 205704 - DNA, 1563 bp, synthetic construct
  misc_feature 1..1563: note = Description of Artificial Sequence: Synthetic coding sequence
  source 1..1563: mol_type = other DNA
atggagttccacaacggcggccacgtgagcggcatcggcggcttcttagtgtctctgacctccaggatgaaacctcatactcttgccgttactccagccctgatatttgccatcaccgtggccactatcggctcatttcagtttgggtacaatactggggttattaacgcccccgaaactataatcaaggagttcatcaataagaccctcacggacaaagcaaacgccccaccttcggaggtcctgctgaccaacctctggtcacttagcgttgccatttttagtgttgggggtatgatcggatccttctctgtgggactgtttgttaaccggtttgggagacggaattctatgttgattgtgaaccttctcgcggccactggcgggtgcttgatgggcctgtgtaaaatcgccgaaagtgttgagatgctcatcctaggccgacttgttattggtttgttttgtgggctatgcacagggttcgtgccaatgtacattggggaaatatccccaacggccttgcgtggtgccttcggtaccctcaatcagctcgggatcgtgattggcattctggtagcacagatttttggcctcgagctgatcctgggatcagaagaactgtggccggtcttgttgggattcacaatcctgccagcaatcctccaaagtgcggccctgccatgttgtcctgagtccccacgattcttattgataaacaggaagaaggaagaaaacgcaacccgtattttacaacggctgtgggggacccaagacgtgagccaggatatacaggagatgaaggatgaatccgctaggatgtcacaggagaaacaggtaacagtcctggagctctttcgtgtgtccagttacaggcagcccattatcatatctatcgtactccagctgagccagcagttatctggaattaacgcggtcttttactactctactggaatcttcaaggacgcaggggtccagcagcctatctatgcgacgatctccgcaggcgtcgtaaacactatatttacactactcagcctgttcctggttgaaagggccggacggcggacactgcatatgatcggtttgggggggatggccttttgtagcacactgatgacggtatcactcctgctcaaaaaccactacaatggaatgtcattcgtatgcataggagctatcctggtgttcgtggcgtgttttgagattgggcccgggcccattccctggttcatcgtggctgagctgttcagtcaaggacccagaccagccgctatggcagtggctggatgtagtaactggaccagcaatttcctagtggggctgctttttccctcagcagcttactacttgggagcctacgtgttcattatctttactgggtttttaatcacttttctagcattcaccttctttaaggtccctgaaacacgagggcgcactttcgaagatataaccagggccttcgagggccaggcacacggcgccgataggtcaggcaaggacggagtcatggggatgaacagtattgagccagccaaggagaccacaacaaatgtttag

SEQ ID NO: 205705 - DNA, 1494 bp, synthetic construct
  misc_feature 1..1494: note = Description of Artificial Sequence: Synthetic coding sequence
  source 1..1494: mol_type = other DNA
atggacaaccggcagaacgtgacccccgccctgatcttcgccatcacggtcgctacaattggatccttccaatttggctacaatacaggcgtgattaatgcccccgaaactattatcaaggaattcattaataaaactttgaccgataaggctaacgcaccaccgtcagaggtgttgctaacaaacctttggtccttgagcgtggctatttttagcgtcggcgggatgatcggctcattcagtgtcgggcttttcgttaatcgttttgggcggaggaactctatgctgatcgtaaacctcctggccgctaccggggggtgcctcatgggcctgtgtaaaatcgccgagtctgtggaaatgctcatacttggccggctggtcatcggtctattttgtggtctctgtactggcttcgtacctatgtacattggggagatcagcccaaccgccctgaggggcgcttttggaacactcaaccaactcggcatcgtcatagggattctggttgcacagattttcggactggagttgattctgggcagtgaagagctctggcccgttctgctggggtttacaatcctgccagccatcctgcagtccgccgctctcccctgctgtccagaatctccgcgctttcttctgatcaacaggaagaaggaagaaaatgctaccaggattctgcagcgattatgggggacccaggatgtgagccaagacatccaagagatgaaggatgaatccgcaaggatgtcacaggaaaagcaggttacggtgttggagctgttcagagtcagctcataccgacagcctattatcatttctatagttttacagctgtcccagcagctatcaggtatcaacgctgtgttctactactccaccggaatatttaaagacgccggggtgcaacagccaatctacgctaccatttccgccggtgtggttaatacgatttttacactgttgtcgctgttccttgttgagagagcaggtcgaagaaccttgcacatgatcggactcggagggatggccttttgctctacccttatgaccgtgagccttctactgaagaaccactacaacggaatgtccttcgtgtgcattggtgcaatcctcgtgttcgtcgcctgtttcgaaattggtcctggacccatcccatggttcatcgtcgctgagcttttttctcagggccctaggcccgccgctatggccgtggctggttgctccaactggacgtcaaactttcttgtaggcctgctcttccccagcgccgcttactatctgggggcctatgtgtttattatttttacaggctttttgataacctttctggcctttacctttttcaaagtcccagagacgcggggccgcacatttgaggatattacgcgagcattcgagggtcaggcccatggagctgaccgtagcggcaaggacggggtgatgggcatgaacagcatcgagcctgccaaagagactaccacaaatgtgtag

SEQ ID NO: 205706 - DNA, 363 bp, synthetic construct
  misc_feature 1..363: note = Description of Artificial Sequence: Synthetic coding sequence
  source 1..363: mol_type = other DNA
atggagttccacaacggcggccacgtgagcggcatcggcggcttcttggtttctttaacatctaggatgaaaccccacactctggctgtgacaccagcgcttatatttgcgatcaccgtagcaaccataggaagcttccaattcgggtacaacacaggtgtgatcaacgcgcccgaaacaatcataaaagaatttattaataagacactgaccgacaaggcaaacgctcctcccagtgaagtattgctcaccaacctgtggtccctgagtgtggccattttttccgtgggcggaatgataggatcattcagcgtgggcctgttcgtgaacaggttcggaagaaggaactcaatgctgatctag

SEQ ID NO: 205707 - DNA, 1236 bp, synthetic construct
  misc_feature 1..1236: note = Description of Artificial Sequence: Synthetic coding sequence
  source 1..1236: mol_type = other DNA
atgctgctgcggcggcggaacagcatgctgatcgtgaacctgctggcagccaccgggggttgcctgatgggcctgtgcaaaatcgccgagagcgtcgagatgcttatcttaggcaggttagtgataggtttgttttgtgggctgtgcaccggattcgtgcctatgtacatcggtgagatttctccgaccgctctccgaggggcattcggtaccctgaatcaacttggcatcgtgattgggatcttggtagcgcagattttcgggctggagttgattctggggagcgaagaactgtggccagtcttgctgggcttcactatcctgcccgccattctgcagagtgcagcacttccctgctgccctgaatctcctcgctttctgttaatcaaccgcaagaaggaggaaaacgctaccagaattctacagaggctttggggcacacaagacgtcagccaggacatccaagagatgaaggacgagtccgccaggatgagccaggaaaagcaggtgacagtcttggagctattccgggtttcttcctatcggcagccgattatcatctcaatagttctgcagctgagccaacagctgtctgggatcaacgctgtcttctactattcaactggcatcttcaaggatgcaggggtgcaacagcccatatacgctacaatcagtgctggagttgtgaacacaatcttcaccctcctgtccctatttctggttgagcgtgccgggagacggacactgcacatgataggactggggggaatggcgttttgcagtactctgatgacagtctctcttctgttaaagaaccattacaatggtatgtctttcgtgtgcattggggcaattctcgtttttgttgcttgtttcgagattggccccggaccgatcccatggttcatcgttgctgaactgttctcacagggcccgcgaccagctgcgatggcagtggccggctgttccaattggacaagcaacttcctcgtggggctgttgttcccatcggcggcatactacctaggggcatacgtgttcataatcttcaccgggtttcttattacgttccttgcgttcaccttctttaaggtgccagagactaggggcaggactttcgaagacattacacgagcatttgagggccaggcccacggcgccgacagaagtggtaaggacggtgtgatgggaatgaactcaatagagcctgctaaggaaacaaccacaaatgtttag

SEQ ID NO: 205708 - DNA, 426 bp, synthetic construct
  misc_feature 1..426: note = Description of Artificial Sequence: Synthetic coding sequence
  source 1..426: mol_type = other DNA
atggacaaccggcagaacgtgacccccgccctgatcttcgccatcaccgtggccaccataggctcattccagtttggatacaacacaggggtaattaacgccccggagaccatcattaaggagtttattaacaagactcttaccgataaagctaatgcacccccaagcgaggtcctgctgaccaatctctggtccctatccgtggccatctttagcgttggcggaatgatcggttccttctccgttggactgttcgtcaaccgattcggccggcgaaacagtatgcttattgtcaatttgctggcggcgaccggaggctgtctgatgggcctgtgcaaaatcgcagagtccgtcgaaatgcttatcctgggccgcctcgtaatcggactcttctgcggcctctgtacgggttttgtaccaatgtag

SEQ ID NO: 205709 - DNA, 144 bp, synthetic construct
  misc_feature 1..144: note = Description of Artificial Sequence: Synthetic coding sequence
  source 1..144: mol_type = other DNA
atggacaaccggcagaacgtgacccccgccctgatcttcgccatcaccgtggccacaattgggagcttccagttcggctacaataccggggtaatcaatgcccccgagactatcataaaggaattcattaataaaacactatag

SEQ ID NO: 205710 - DNA, 69 bp, synthetic construct
  misc_feature 1..69: note = Description of Artificial Sequence: Synthetic coding sequence
  source 1..69: mol_type = other DNA
atggacaaccggcagaacgtgacccccgccctgatcttcgccatcacggtggccacaatcggctcgtag

SEQ ID NO: 205711 - DNA, 426 bp, synthetic construct
  misc_feature 1..426: note = Description of Artificial Sequence: Synthetic coding sequence
  source 1..426: mol_type = other DNA
atggagttccacaacggcggccacgtgagcggcatcggcggcttcctggtcagcctgacctcacgtatgaagccccacactctagctgtcacaccggcactcatatttgccatcaccgtggcgactatcgggtctttccagttcgggtacaacacaggtgtgatcaacgcaccagaaactataatcaaagaatttattaacaagaccctcaccgataaagccaatgcaccccccagcgaagttctgttaaccaacttgtggtcattgtccgtggccatattctcggtcggggggatgattgggtcattctctgtaggtcttttcgttaacaggttcggccggcggaactctatgctgattgtgaatctgctggctgccaccggagggtgtctcatgggtctttgcaaaattgccgagtctgtgtag

SEQ ID NO: 205712 - DNA, 1608 bp, synthetic construct
  misc_feature 1..1608: note = Description of Artificial Sequence: Synthetic coding sequence
  source 1..1608: mol_type = other DNA
atgcagcggctgcagctgctgcgggtggaggtgctgctgggcgtgaagcagggagacgagatgcgtcattttttcttcagctcacagaccagcaccctggagaaatcccagaacggcggagtgggcgaggaggtcacgccagctctcatatttgctataactgtcgcaaccataggctcctttcagtttggctacaataccggggtgatcaacgcccctgagacgattatcaaagaatttatcaacaagacattaacagacaaggctaatgcaccaccatcagaagtgctcctgaccaacctgtggtcactttccgtggcaatcttcagcgtgggcggaatgattggttcgtttagtgtagggctcttcgtgaatagattcggaagacggaattctatgcttattgtgaatctgctagccgctaccggaggatgcttaatgggactttgcaagatcgccgagagtgtggagatgctgattctgggtcgtctggtcatagggctgttctgcgggctatgcacgggtttcgtgccaatgtatataggcgagatctcccctacagccttacgcggagcattcgggaccctaaatcagctcggtattgttatcgggatcttagtggctcagattttcggtctcgaacttatcctgggttcagaagagctttggccggtattattgggattcacgatacttcccgccatcctgcagtccgccgccctcccgtgctgtcccgagtctccacggttcctccttattaataggaagaaagaagaaaacgccactagaatcctgcagcgactgtggggcacacaggatgtctctcaagacattcaggagatgaaggacgagagcgcccgtatgagtcaagaaaaacaagttaccgtgttggagctgtttagggtctcctcgtaccggcaacccataattatcagtatagtgcttcagttgtcccagcagttatcaggaattaacgcggttttctactattctaccggtatctttaaagatgctggcgtgcagcaacccatttacgcaacgatttctgcaggcgtggtgaacaccatctttacactgctgagtctgtttttggtggaaagggccggcaggaggaccctgcacatgataggactgggggggatggccttctgctccactcttatgacagtctcccttctgctcaagaaccactacaatggcatgtcatttgtatgcatcggcgcaatccttgtgtttgtggcttgtttcgagattggtccgggaccaatcccctggttcattgtggcggagctttttagtcaggggcctcgcccagcagccatggcagtggcgggctgcagtaactggacctccaacttcttagtcgggcttcttttcccctctgccgcatactacttgggggcatacgttttcatcatcttcacaggttttctcattacctttctggcttttacattctttaaggtgcctgaaacaagggggcgtacttttgaggatattacacgagcctttgagggacaggctcacggggcagaccgatcaggaaaagatggggtgatgggcatgaattcaatcgagcctgcaaaggagaccacaaccaatgtctag

SEQ ID NO: 205713 - DNA, 486 bp, synthetic construct
  misc_feature 1..486: note = Description of Artificial Sequence: Synthetic coding sequence
  source 1..486: mol_type = other DNA
atgatcggcctgggcggcatggccttctgcagcaccctgatgaccgtgagtctattgcttaagaaccactacaacggcatgtctttcgtctgcatcggcgccatcttggtcttcgtagcctgcttcgaaattggacccggtccaatcccttggtttatcgtggccgagttgttctcccaaggtccgagacctgccgcaatggctgtggccgggtgttctaattggacgagcaatttcctggtgggcctactcttccccagtgccgcctactatctgggtgcctacgttttcatcatttttacaggctttctcataacattcctggcatttactttttttaaggttcctgagacaaggggacgaacattcgaagacatcacgcgggccttcgaaggccaggcccatggcgccgaccgatcaggaaaggacggagttatgggaatgaacagtattgaacctgcaaaggaaacaaccactaacgtctag

SEQ ID NO: 205714 - DNA, 1236 bp, synthetic construct
  misc_feature 1..1236: note = Description of Artificial Sequence: Synthetic coding sequence
  source 1..1236: mol_type = other DNA
atgctgctgcggcggcggaacagcatgctgatcgtgaacctgctggctgctacaggaggatgcctcatggggctgtgcaagatcgcagaaagtgttgagatgctcatactgggaagactcgtgatcgggcttttctgcggactgtgcaccggattcgtcccaatgtatatcggtgagataagccctacagccctgagaggggcctttgggaccttaaatcagcttggtatagtaattggcatcctcgtggcacagatttttggcctggagttgattctcggctccgaagagctgtggccagtgttgctcggattcaccattctgcccgccatattgcagtccgctgctctgccctgttgccctgagagccctcggttcttgctaatcaaccgaaaaaaggaggagaacgcaactcgcatcttacaacggttgtggggaacccaggatgtatctcaggatattcaggaaatgaaggatgaaagcgcacgtatgtcacaagaaaagcaggtgaccgttctggaattattccgagtgtcctcttacagacagccaattattatttcaatcgtcttacagttgtctcaacagctgagcggaatcaacgcggttttctactacagtaccggcattttcaaagatgccggcgttcagcagccaatttacgctacgattagcgccggcgtagttaataccatctttactttactttctctgttcctcgttgaacgtgccggccgccggaccctgcacatgatcgggctgggaggcatggctttttgctctacgttgatgacagtgagtttactgctgaaaaaccattataatgggatgagcttcgtgtgcattggtgcaatcttagtgttcgtcgcatgctttgagataggccccggcccgattccctggtttatagtagcagaattattttcccagggccctcgcccggctgccatggctgtcgcgggctgctctaattggacaagcaattttctcgtcgggcttctgttcccttcagctgcttactacctgggcgcatatgtcttcataattttcactggttttcttattaccttcttggccttcacgttctttaaagtccccgagactcgaggcaggacttttgaagacataacccgcgccttcgagggccaggcacacggtgccgacagatcaggtaaagacggcgtgatgggcatgaatagcattgaaccagctaaggagacaactacaaacgtctag

SEQ ID NO: 205715 - DNA, 459 bp, synthetic construct
  misc_feature 1..459: note = Description of Artificial Sequence: Synthetic coding sequence
  source 1..459: mol_type = other DNA
atggacaaccggcagaacgtgacccccgccctgatcttcgccatcaccgtcgcaacaatcggatctttccagtttggttacaacacaggggttatcaacgcccctgaaaccatcattaaagaatttatcaacaaaacgctcacggataaagccaatgcccccccatccgaagtgctcctgaccaacctgtggtccctgtccgtagcaatttttagcgtagggggcatgataggatctttctctgttggcttattcgttaacagatttggaagacggaacagcatgctaatcgtcaacttgctcgctgcgactggtggttgcttgatgggcctgtgtaaaatcgccgagagcgtggagatgcttattttaggtagattagtgatcggcctgttctgcggactctgtacaggatttgttccaatgtatattggcgagatttccccaacagctctgagatag

SEQ ID NO: 205716 - DNA, 255 bp, synthetic construct
  misc_feature 1..255: note = Description of Artificial Sequence: Synthetic coding sequence
  source 1..255: mol_type = other DNA
atggacaaccggcagaacgtgacccccgccctgatcttcgccatcaccgtcgcaaccattggatctttccagtttgggtacaacacaggggtgattaacgcccccgaaacaatcatcaaagagttcatcaacaagacgctcaccgataaagccaacgctcccccttcggaggtgctgctcactaacctgtggtccttgagcgtggcaatctttagcgtcggcggaatgattggaagcttttccgtgggactgtag

SEQ ID NO: 205717 - DNA, 1563 bp, synthetic construct
  misc_feature 1..1563: note = Description of Artificial Sequence: Synthetic coding sequence
  source 1..1563: mol_type = other DNA
atggagttccacaacggcggccacgtgagcggcatcggcggcttcctcgtctccttgacttctcgtatgaagccccacaccctcgccgtaacccccgctctcatttttgccataacagtggccaccatcggctcttttcaatttgggtataataccggcgtaattaatgccccagagactattattaaggaattcatcaacaagacgctaaccgacaaggccaacgcaccaccatcagaagtcctcctgactaatttgtggtctctctcagtcgcgatattctccgtaggcggcatgataggcagcttttcagtaggtcttttcgtaaaccgtttcggcaggagaaacagcatgttgatcgtaaatctcctggccgccacaggggggtgcttaatgggcctgtgtaaaattgcggagtccgtcgaaatgctgattttggggaggctggtgattggactgttctgcggactctgtactgggttcgtaccaatgtatatcggagagattagcccaacagccctgcggggcgcgttcggcacactgaaccagttaggaattgtcatcggcattctggtggcccagatttttggcttggaattaattctgggctccgaggagctgtggccagtcttactgggatttaccattctccccgcaatcttgcagtccgcagcccttccttgttgccccgaaagtccaaggtttcttttgattaaccgcaagaaggaagaaaacgcaacaaggattttgcagcgactttggggcacacaggacgtcagtcaggatatccaagaaatgaaggacgaatctgcgaggatgtcccaggagaagcaggtgacagtgctagagctcttcagagtctcctcttataggcaacctatcattatttccattgtactgcaactgtcacagcagctatcagggataaacgccgtattttactatagtactgggattttcaaggacgcaggcgtacaacaacccatttacgcaacgataagtgcgggcgtggtcaacaccattttcaccttactcagcttgtttctcgtcgagcgggctgggcgccgtactctccacatgatcggacttggcgggatggcgttttgttccactctgatgacggtatccctgttacttaagaaccactacaacgggatgtcttttgtttgtatcggggcgattctagtctttgtcgcctgtttcgagatcggaccggggcctatcccatggttcatcgtagccgaactgttcagccagggaccaaggcccgcagctatggctgtcgcgggttgcagcaattggacttccaatttcctagtcggactgctgttcccttcggctgcatactacctgggtgcttatgttttcataattttcacagggttcttgatcacgttcctggcattcacattcttcaaagtgcccgagacaagaggacggactttcgaggatatcacccgtgccttcgagggccaggcccatggagccgacaggtctgggaaagacggggtcatggggatgaattcaattgaaccagcgaaggagacaaccacaaatgtgtag

SEQ ID NO: 205718 - DNA, 510 bp, synthetic construct
  misc_feature 1..510: note = Description of Artificial Sequence: Synthetic coding sequence
  source 1..510: mol_type = other DNA
atggacaaccggcagaacgtgacccccgccctgatcttcgccatcacagtcgccaccatcggatccttccagttcgggtacaacacaggggtaatcaacgcaccagaaaccatcatcaaggaattcataaacaaaacccttacagataaagctaacgcgccaccatctgaagtattgttgaccaacctctggtctctctctgtggcaattttcagcgtcgggggcatgatcggctctttctctgtgggtctatttgttaatcggtttggccggagaaactctatgttaattgtcaatcttttggctgctactggcggctgcctgatgggactttgcaaaattgccgaaagtgtggaaatgctgatacttgggcggctggtcattggactgttttgcggcctgtgtaccggatttgtgcctatgtatatcggcgagatttcacccaccgcgctgagaggggcctttggaacactcaaccaactcggcatcgttatcggcatcctggtctag

SEQ ID NO: 205719 - DNA, 1491 bp, synthetic construct
  misc_feature 1..1491: note = Description of Artificial Sequence: Synthetic coding sequence
  source 1..1491: mol_type = other DNA
atgggcacccagaaggtgacccccgccctgatcttcgccatcaccgtggcaaccattggaagtttccagtttgggtataacaccggggtcatcaatgcgcccgagaagattatcaaggagttcataaacaaaactttaacagataaagggaacgcccctccgagtgaggtcctgctgacatctctgtggtcattgtccgtggccatcttttctgttggtggcatgataggctctttctccgtgggattgtttgtgaataggttcggcaggcgcaattcaatgcttatcgtgaatctcctggcagtgaccggaggctgctttatgggcctgtgtaaagtcgcaaagagcgtggagatgctgatcttaggacggctggttatcggcctgttctgcgggctctgcacggggtttgtgccaatgtacatcggggagatttcccctacagccctgaggggcgcgtttggcacattgaaccagctcggaatcgttgtcggcatactggtcgcccagatctttggactggagttcatcctgggatcagaggaactctggccattactactgggtttcaccattctgcccgcgatcctgcagtcggctgccttgccattttgtccggagtctcctcggttcctgttgattaaccggaaagaggaagaaaatgccaagcagattctgcagcgattatgggggacacaggatgttagtcaagatatccaagaaatgaaagacgagtccgctcgcatgtcgcaggagaagcaagtcaccgtcctcgagttgttcagagtgtcctcttacagacagcctatcattatcagtattgttttacagcttagtcagcagctgagtggcatcaacgcagtgttttactacagcactgggatcttcaaggacgctggggtgcaggaacctatctatgcaaccatcggagccggggttgtgaatacaattttcaccgtggtctcccttttcctggtggaacgggctggccggcggacactccatatgataggacttggcggaatggctttttgctcaacccttatgaccgtgagcctcctgctcaaagacaactacaatgggatgtcatttgtatgcataggggcaatcctggttttcgtcgcgtttttcgagatcgggcctggtcccattccctggttcattgtcgccgaactgttctcacaagggcctcggccagccgctatggcagtagccgggtgctccaattggacttccaattttctagtgggcttgcttttcccatctgccgcacactacttaggggcttacgtgtttatcattttcacaggcttcctaatcacattcctggcctttaccttcttcaaggttcccgagacgagaggaaggacatttgaggacatcacccgcgctttcgaagggcaggcccatggggccgataggtctggtaaggatggggtgatggagatgaactctatagaaccagcgaaagagaccaccacaaacgtgtag

SEQ ID NO: 205720 - DNA, 1269 bp, synthetic construct
  misc_feature 1..1269: note = Description of Artificial Sequence: Synthetic coding sequence
  source 1..1269: mol_type = other DNA
atgatcggcagcttcagcgtgggcctgttcgtgaaccggttcggccgaagaaatagtatgctgattgtgaacttactagctgttacaggcgggtgcttcatgggcttgtgtaaggttgcaaagtccgtggaaatgctgatcctcggcagacttgtgattggtcttttctgcggactttgcactgggttcgtccctatgtacatcggggagatttcccctacagccctccgaggtgcgttcggcactctgaaccagctcggaatcgttgtggggatcctggttgctcagattttcggccttgaattcatcctgggcagtgaggagctctggcctttgttgctcggatttactattctgcccgccatactgcaatccgccgccctgcctttttgtccagagtcgccgcgctttcttttgattaaccgcaaggaggaggagaatgcaaagcagatcctacagaggctctggggtacccaggacgtgagccaagacatccaagaaatgaaggacgaaagcgccaggatgagccaggagaagcaggtcaccgttttagagttgttccgtgtcagttcgtatcgccagcccattattatttccattgtattgcagctctctcagcaattatctggcattaatgcagtcttctactacagtaccggaatattcaaagacgcaggtgtgcaggagcctatctatgccaccatcggggcaggggtggttaatacaattttcactgtagtcagtttgttcctggtggagagagctggaagacggacactgcacatgatcggacttggcggtatggccttctgttccactctgatgacggtgtcactcctgctcaaagacaactataacggtatgtccttcgtatgcatcggcgccattctggtcttcgtggctttctttgagatagggcccggcccaatcccatggtttattgtggctgagttattcagtcagggccccaggcctgccgccatggccgtggcgggttgttctaactggacgagcaactttctggtcggcttgctgtttccctcagccgctcactacctcggggcctacgttttcattatcttcacaggttttctgattacatttctggccttcaccttctttaaagtccccgagacacgcggacgaacattcgaagacattacccgggcatttgagggtcaggcccacggagcagaccgctccggcaaggacggcgtcatggagatgaactctatcgagcccgctaaggagaccactacaaatgtctag

SEQ ID NO: 205721 - DNA, 1530 bp, synthetic construct
  misc_feature 1..1530: note = Description of Artificial Sequence: Synthetic coding sequence
  source 1..1530: mol_type = other DNA
atgcccagcggcttccagcagatcggcagcgaggacggcgagcccccgcagcagcgggtcaccgggacgttggtgctggccgtgttcagcgctgtcctgggatcgctccagttcgggtacaacataggagtcatcaatgcaccccagaaggttatcgagcagtcatataacgagacttggcttggtaggcaggggccagaagggccctccagcataccacccggcacactgactacattgtgggctttaagcgtggctatcttcagtgtcggcggaatgatctctagctttctcattggtataatcagccagtggctggggagaaaacgggccatgctggtcaacaacgtacttgcagtccttggcgggtccctgatgggccttgcgaacgcggccgcttcctacgaaatgctcattctgggcaggttcctaattggcgcatactccggactaacaagtggtctggtgcccatgtacgtgggcgagatcgcccctacacacctacgtggtgcgctgggaactctgaaccaattggcaatcgtcattggcatcttaatagcgcaggtcctgggcttggagtctctgctgggcaccgcctcactgtggccactgctgctgggtctcacggtactgcccgctctcctgcaacttgtgctgttacccttttgccctgagagtcccaggtatctctacattattcaaaacctcgaagggcctgctcggaaatccctgaaacggctcacgggctgggccgatgtttctggagtgcttgctgagcttaaggacgaaaagcgaaagttggaacgggagcggcccctgagcctgttgcagctcttgggatctcgtacccaccgacaacccttgattatcgcagtggtgcttcagctgtctcagcagctctctggcattaacgctgtgttctattacagcacttctatcttcgaaaccgccggggtaggccagcctgcttatgcaacgatcggggccggtgtcgtgaatactgtgtttaccctcgtctctgtgttgttagtggaaagggctggtcggcgcaccctccatctcctcgggctggccgggatgtgtggttgcgccatcctcatgaccgtggctctccttctgcttgaacgagtgcccgccatgtcttacgtgtctattgtcgcgatcttcggcttcgtagcttttttcgagattggccctggacccataccatggtttatcgtggccgaactgttcagccagggacctaggccagccgctatggcagtggctggtttttccaattggaccagtaattttatcataggtatgggattccagtacgtggccgaagcaatgggaccatatgtgtttctcttattcgctgtgctgctgctgggcttctttattttcacatttctgcgagtgccggaaacacgcgggcgtacatttgatcaaatttctgcagcttttcatagaacccctagcctcctggagcaagaggtgaaaccctccaccgaattggagtatcttgggcctgacgagaacgattag

SEQ ID NO: 205722 - DNA, 1356 bp, synthetic construct
  misc_feature 1..1356: note = Description of Artificial Sequence: Synthetic coding sequence
  source 1..1356: mol_type = other DNA
atggacggcgagcccccccagcagcgggtgaccggcaccctggtgctggccgtttttagcgccgttctgggatcactacagttcggatataatattggagtaataaatgctcctcaaaaggtcatcgaacagagttataacgaaacctggctgggccggcaggggcctgaaggccccagtagcattccaccgggaacactgaccaccttatgggcgctcagtgtggccatcttctcagtcggcggaatgatatcctctttcctcattggcataatatcccagtggcttggccggaagagagccatgctcgtcaataacgtgctggctgtgttggggggaagcctgatgggcctggctaatgcggccgcttcctacgaaatgttgatactcggcaggtttctcatcggtgcctactcaggactgacctcaggacttgtacccatgtatgttggcgaaatcgcccccacgcacctccggggagctctggggacactgaaccagctggccatcgtgattggcattttgattgcccaggttctgggactggaatctctgttgggtaccgccagtctctggcctcttttgcttgggctaaccgtgctcccagccctgttgcaacttgtgttgctgcccttttgtccagagtcccctcggtacctttatatcatacaaaatttagaaggtcccgctcgcaagtcgctaaaacggctgaccggctgggccgacgtctcaggtgtgcttgcagagttaaaggatgagaaaagaaagcttgaaagagagagaccactgtccctcctgcaattactgggttccaggacgcacagacagcctttaatcatcgcggtggtgctgcagctctcacaacagctgtcgggtattaatgctgtcttttactatagcacatcgatcttcgagactgctggggtcgggcaacccgcatatgctactattggagcaggggtggtgaacaccgtttttacactggtttccgtacttcttgtggaaagagctggccgacggacactccacctgctgggcctcgcaggtatgtgtggatgtgcaatcttaatgaccgtcgcgctgctactgctagaacgtgtgcctgctatgagctatgtgtccatcgtagcaatcttcgggtttgtggcctttttcgagatcggacctggaccaatcccctggttcatcgtcgcagaactgttcagccaggggccccgtcccgctgcaatggcggtggctggtttctccaattggacaagcaatttcattatcggaatgggcttccagtatgtggcagtgggacctccagctcccgcgtcacacacagtgggacagaggtgggctagccatagttag

SEQ ID NO: 205723 - DNA, 1338 bp, synthetic construct
  misc_feature 1..1338: note = Description of Artificial Sequence: Synthetic coding sequence
  source 1..1338: mol_type = other DNA
atgcaggagcccctgctgggcgccgagggccccgactacgacacctttccagagaagccacctccatctcccggggatagagctcgagtaggaactctgcagaacaaaagagtctttctcgcgactttcgccgccgttttgggcaatttttcgttcggatacgccctggtgtacacatctcctgtgattccggccctggaacgatctttggatccagatctgcatttaactaagtcacaggcttcctggttcgggagcgtatttactctcggcgcagccgcaggtggcctctccgcaatgatactcaacgatctgctcggacgaaagttgtcaatcatgttctctgccgttccctctgctgcaggctacgccctcatggctggggcccacggcttgtggatgctcctgttaggccggactctgaccggattcgcaggtggtctgaccgccgcttgtatacctgtgtacgtgtcagagattgcccccccgggggtgaggggagcgctgggtgcaaccccccaattgatggctgttttcggttcgttatcattgtatgctctcggccttctcctgccatggcgatggctggccgtggctggcgaagctccagtcctcatcatgatccttttgctgtcatttatgccaaactctccgcgattcctgctaagccggggccgagatgaggaagcactcagggcattagcatggctgagaggcactgatgtcgacgtccactgggagtttgagcagatccaagacaacgttagaaggcagagttcaagagtgtcatgggcggaggcacgagctcctcacgtttgtcggcctattactgtcgctctccttatgcgactcctccagcagttgacaggcattacgcctatcctggtgtacctccagagtatttttgatagtaccgcggtgctactgccgcctaaagacgacgcggctattgtgggagctgtgagattattatctgttttgatagccgccctgacaatggacctcgcaggacgaaaagttctgctcttcgtctccggatacgcagtgggatggggcccaattacgtggttgctgatgagcgaagtgctccccctcagggccagaggagttgcctcaggactatgcgtgttagctagctggctcaccgcattcgtgctcaccaaatccttcctgcccgtggtgagtactttcggtctgcaagttcccttcttcttttttgcagcaatttgcctcgtgtccctcgtcttcactggctgctgtgtgcccgaaacaaaggggcgtagccttgaacagatagagtcattcttcagaacaggccgtagatcttttctccgctag

SEQ ID NO: 205724 - DNA, 1524 bp, synthetic construct
  misc_feature 1..1524: note = Description of Artificial Sequence: Synthetic coding sequence
  source 1..1524: mol_type = other DNA
atgcaggagcccctgctgggcgccgagggccccgactacgacacctttcctgagaaaccgcctccctctccgggcgacagggcacgagttgggaccctgcagaataaacgtgtcttcctggctaccttcgctgcagtgctcggtaacttttcattcggctacgctctagtttacacttcacctgtgattcccgctctagagaggtcgcttgaccctgaccttcacctaacgaagagccaggctagttggtttgggagcgtgtttacacttggcgcggcggccgggggcctcagtgcaatgattctgaacgatttgctgggccgtaagctttccatcatgttttccgctgtgccttccgcagcaggctacgctttgatggcgggtgcacatggtctgtggatgctactcctggggaggactttaaccggattcgccggcggtcttactgctgcatgtatacccgtatacgtgtccgagatcgctccacccggcgtccggggtgccctgggggctaccccccagctaatggctgtgtttggaagcttaagcttatacgctttgggacttctcctcccttggaggtggcttgcagtcgctggggaagcccctgtcctgattatgatcctcctgttgtcttttatgcccaactctccacggtttcttctcagtcgcggaagagacgaagaggctctgcgggccctggcatggctccgggggacagatgtagacgttcactgggaattcgagcaaattcaggataatgtgaggaggcaatccagcagggttagctgggctgaggcccgggccccccatgtttgcagaccaattaccgtggcgcttctgatgcgcctacttcagcagttgaccggtattacccccattcttgtttatttacagagcatcttcgacagcaccgcggtgctgctgcccccgaaggatgacgcagccatcgtcggcgctgtgcggctgctctcagtgctgatcgccgccctgacgatggatctggccggcagaaaggtgctcctgtttgtgagcgccgcaatcatgttcgctgccaaccttacactcggactgtacatccactttggtcctagacccctcagccccaactcgaccgccggcctggagtctgaaagctggggggatctggcccagcccttggcggctcctgcaggatacctcactctcgtcccattgctggctacgatgctctttatcatgggctatgcggtcgggtgggggcctatcacttggctgttgatgtctgaggttcttccactgcgcgctagaggtgtcgcctccggtctgtgcgtgctggcttcatggttgactgcatttgttctgacaaaaagcttcttaccagtggtttccacgttcggactccaggtgcctttttttttttttgccgccatttgcctcgtttctcttgtgttcaccggttgctgcgtacctgaaacaaaaggaaggagtctggaacagatcgaaagcttcttccgcaccggccggaggagcttcttgagatag

SEQ ID NO: 205725 - DNA, 441 bp, synthetic construct
  misc_feature 1..441: note = Description of Artificial Sequence: Synthetic coding sequence
  source 1..441: mol_type = other DNA
atgatcctgaacgacctgctgggccggaagctgagcatcatgttctccgctgtgcctagcgctgcgggctatgcccttatggcaggggctcacggcttatggatgctgctcctcgggaggacactaacaggttttgccggcggactaacagcagcttgtattcctgggctgactctgccttcccggcctggcctcggtacctccatcttttctaaaacgtggtgcggggggtgcgtacttcaggtttacgtatccgagatagcaccaccgggcgtgcggggggctctcggagcgactccccaattgatggcggtgtttggcagcctctccctttatgcactagggaaggacgaggaggccttgcgggccctcgcgtggttacgcggaactgacgttgacgtgcactgggagttcgaacagatccaggacaacgtcagatag

SEQ ID NO: 205726 - DNA, 660 bp, synthetic construct
  misc_feature 1..660: note = Description of Artificial Sequence: Synthetic coding sequence
  source 1..660: mol_type = other DNA
atgcaggagcccctgctgggcgccgagggccccgactacgacacctttcccgagaagcctccgccatcccccggcgaccgagctcgagtgggaacactgcagaacaagcgtgtgttcctggcaaccttcgccgccgttctgggcaatttcagcttcggatacgccctggtttatacttcgcctgtgattcccgccctggaacggagcttggaccccgacctccacctgaccaagtcacaggcgagttggtttggaagtgtgtttactctaggtgctgcagccggcggcctgagtgctatgattctcaacgacctgctgggtcgaaaactgtctatcatgttttctgctgtgccttccgccgccggatacgcactaatggctggcgcccatgggctgtggatgctcctgctgggaagaacgttgactggattcgccggaggcctgacagccgcttgcatccccgtatatgtaagtgaaatcgctccgccaggcgtgcgaggagcattgggcgccacaccccagctgatggccgtattcggctctctgtctctgtatgccctgggcacgaagaggccatgtggccgttggcctggttgcgtgggacgtacttccatgagcacggggtcaagctcacgttctcgtacaacaagcggagactag

SEQ ID NO: 205727 - DNA, 1539 bp, synthetic construct
  misc_feature 1..1539: note = Description of Artificial Sequence: Synthetic coding sequence
  source 1..1539: mol_type = other DNA
atggagaacaaggaggccggcacccccccccccatccccagccgggagggcaggctccagcctactcttctccttgcaaccctcagcgctgcatttgggtccgccttccagtacggatacaacctaagtgttgtgaacaccccacacaaggtgttcaagagtttctacaatgaaacgtactttgagaggcatgcgacattcatggacgggaagctgatgctcctattatggtcctgcaccgtgagcatgtttcctctgggaggactgttgggttccctgttggtgggcctgctggtcgatagctgtggccggaaaggcaccctactgataaacaacattttcgccataatccctgcaatcctaatgggcgtgtcaaaggttgcaaaggctttcgaactgatcgtgttctccagggtggtactaggcgtttgcgccggtattagctactcagcactccccatgtacctgggtgaactggcacccaagaacttgagaggaatggtgggcaccatgaccgaggtgttcgttatagtgggtgtattcctggctcagatattttccctccaggcaattctcgggaatcccgctggctggcccgttctactcgcactgaccggggtccccgcacttctgcagcttttaacccttcctttttttccagaatcgcctagatactccttgattcagaagggagatgaagcgacagcccggcaggccctgaggagactcagagggcatacagacatggaagccgaactggaggacatgagagctgaggcacgggccgagagagctgagggacatctgagcgtcttgcacctgtgtgccttgaggtctttacggtggcagttgttgagcattatcgtactcatggcgggccaacagttaagtggtattaacgctataaattactatgctgacaccatttacacatctgcaggagtcgaggcagcacactctcaatatgttactgtgggatccggcgttgtgaacatagtgatgacaatcactagcgctgttctggtagagaggcttggccgacggcatctcctgttagccggttacggtatctgcggctctgcttgtctggtgctgacagtggtattactgtttcagaacagagttcccgagctgtcttatttagggataatttgtgttttcgcttacatcgccggccatagtatcgggcctagccctgtgccctctgtcgtcagaaccgagatttttctgcagagctcccggcgtgccgcttttatggttgacggagcagtacattggctcacaaacttcattattggcttcttattcccgtctattcaggaggccatcggagcatacagcttcattattttcgctggtatttgcttgcttaccgccatatacatctatgtagtgataccagagaccaagggtaaaaccttcgtggagataaaccgaatcttcgcaaagcgaaatagggtgaaactccctgaagaaaaggaggaaacaatcgatgccggacctccaaccgccagcccagcaaaagagacgtccttctag

SEQ ID NO: 205728 - DNA, 804 bp, synthetic construct
  misc_feature 1..804: note = Description of Artificial Sequence: Synthetic coding sequence
  source 1..804: mol_type = other DNA
atgacctgcagcctgggcaaggtgtacatcagcgagatcgcctaccctgctgtgcgcggcctcctgggatcatgcgtccaactgatggtggttgtaggaatcctgcttgcctatctggctggttgggtgctggagtggcgctggctggcagtcctgggatgtgtgcccccttccttgatgctgctgctgatgtgcttcatgccagagacgcccagatttttgcttacccagcatcgacgtcaggaagctatggccgcgttgaggttcctgtgggggtcagaacagggctgggaggatcctccaatcggagccgaacagagttttcatcttgctttactgcgtcagccaggtatatataaaccgtttattattggagtgagtttgatggccttccagcaactctccggcgtcaacgcagtgatgttttacgctgagaccatttttgaagaagccaagtttaaagatagcagcctggcgtctgtggtagtcggggtgatccaggtgctattcaccgccgtcgcggccttgataatggatcgcgccggtcggagattactgttagtactgtccggtgtcgtgatggtcttttccacctccgccttcggcgcctactttaagctcactcagggcggtccaggcaattccagccacgtggccatctctgctccagtgagcgcacagccagtcgatgcctccgtgggacttgcatggctcgccgtgggcagcatgtgtctgttcattgccggcttcgcggtggggtgggggcccataccatggctgctaatgtcggaaattttcccgtag

SEQ ID NO: 205729 - DNA, 645 bp, synthetic construct
  misc_feature 1..645: note = Description of Artificial Sequence: Synthetic coding sequence
  source 1..645: mol_type = other DNA
atggccttccagcagctgagcggcgtgaacgccgtgatgttctacgcagagactattttcgaggaagcaaaattcaaagactcatccctcgcgagtgtggtggttggggtcatccaggtcctgtttaccgcggtcgcagctctgattatggaccgcgctggcagaagactcttgttagttttgtccggcgtggtgatggtttttagcacaagcgcatttggcgcttatttcaagttaactcagggcggcccaggaaactcctcccacgtggcgatttccgcccctgtttccgcccagccagtcgacgcgtctgtgggcctggcgtggttggctgtgggcagtatgtgcttatttatagcgggatttgcggtcggatgggggccaatcccatggctgctcatgtctgagatcttccccctccacgtcaaaggggtggctactgggatctgcgtgttaacgaattggttaatggcttttctggtgacaaaggaattctcatcattaatggaggtgctccggccctatggcgcattttggctggctagcgcattttgcattttttctgtccttttcacactgttttgtgtgccagaaactaaggggaagacactggaacagatcaccgctcacttcgagggacggtag

SEQ ID NO: 205730 - DNA, 1236 bp, synthetic construct
  misc_feature 1..1236: note = Description of Artificial Sequence: Synthetic coding sequence
  source 1..1236: mol_type = other DNA
atgacccccgaggaccccgaggagacccagcccctgctgggcccccccggaggtagcgcgcccagaggaaggcgggtctttctggctgcattcgccgccgctttgggcccactgtcttttggctttgccctgggctatagctctccagccattccaagcctccagcgagctgccccaccagctccccgattagatgacgcagccgcatcatggttcggtgctgttgttaccctcggtgccgctgctgggggagttttgggtggatggctcgtggaccgcgccggtcggaaactttcactgctcctgtgttcagtgccctttgtagccgggtttgccgttatcaccgctgcccaggatgtgtggatgcttctcggtggccgtctcctgactgggttagcctgcggtgtggcgagccttgttgctccagtctacatttcagaaatcgcctatccagctgtgcgggggctcctggggagttgcgtccagctgatggttgtggtgggtattctcctggcctacctagccgggtgggtgctcgagtggcgctggctcgccgtgttgggctgtgtacccccttcactgatgttactcttaatgtgtttcatgcccgagacacctcggttcctgttaacacagcatcgcagacaggaggccatggccgcactcagatttctctggggctcagagcaggggtgggaggaccctccgattggagccgagcagtcctttcatctagctctcctcaggcagcctggcatttataagccttttatcataggggtgtctctgatggcgttccagcagctctcaggcgtgaatgcggtcatgttctatgccgagacaatatttgaagaggcaaagtttaaggatagctctctggcgtcagtcgttgttggtgtgattcaggtgcttttcaccgcggtggctgccttaattatggatcgagccggaaggcgattgttgcttgttttgtcgggtgtggtgatggtgtttagcactagcgcctttggcgcatatttcaagctgacccagggaggtccaggaaactccagtcatgtggcaatcagcgcacccgtgagtgcacagccggtggacgcttccgtcggactcgcttggcttgccgtaggcagcatgtgcttgttcattgcaggcggcccccaggccttatggtctctcctggcttgcctgagatttttgcaccttcagtgcccttttcactttgttctctgtccctag

SEQ ID NO: 205731 - DNA, 1434 bp, synthetic construct
  misc_feature 1..1434: note = Description of Artificial Sequence: Synthetic coding sequence
  source 1..1434: mol_type = other DNA
atgacccccgaggaccccgaggagacccagcccctgctgggcccccctggaggctcggctcccagaggacgccgcgtctttttggcggcctttgcagccgcattgggcccactgagcttcggcttcgcactggggtattcttcgccagccataccaagtctgcagcgcgctgcccctcccgcacccaggctagatgacgccgctgcctcttggtttggcgctgtggtgacactgggagccgccgcaggcggggttttggggggctggctggttgaccgcgccggacgaaaattgtctctcctgttgtgttcggtaccattcgtggccgggttcgctgtgatcacggctgcccaggacgtttggatgttgctagggggcaggcttctaacagggcttgcctgtggggtagcctccctggtggcccctgtgtacattagcgagatcgcttaccctgccgtgcgcggtcttttaggctcttgtgttcagcttatggtagtcgtgggtatcctcctggcctatctggctggttgggtgcttgagtggagatggcttgctgtgctgggatgcgtgccaccgtcattgatgctactcctgatgtgtttcatgccagaaacacctagattcttgctgactcagcatcgacgccaggaagctatggcggcattgaggttcctgtgggggagtgaacagggttgggaggaccctcccattggagcggagcaatcattccatctggccctgttacggcagccgggcatttataagccatttataattggcgtcagtctgatggccttccagcagctttcaggagtaaacgcggttatgttttatgccgagacaattttcgaggaggccaagtttaaggactcttcactagccagtgtggttgttggagttatacaagtactgtttactgctgtggctgccctgattatggatagagctggacgaaggctgcttctggtgctttcaggggttgtaatggtattttctacatccgccttcggtgcatacttcaagctgactcagggtggcccaggaaattcttctcatgtggctatctccgctccagtcagtgctcagccagtcgatgcctccgtcggacttgcatggttggcggtggggtctatgtgcttgtttattgccggtttcgctgtgggatgggggcccataccttggttgctgatgagtgaaatctttccactccatgtgaagggcgtcgcaactgggatctgcgtcttgactaactggttgatggccttcctggtgaccaaagagtttagcagtttgatggaagttttgcggccttatggtgccttttggctcgctagcgccttctgcatcttttccgttctgttcacactattttgtgtgccggagaccaaggggaagactctagaacagattactgcgcacttcgagggcagatag

SEQ ID NO: 205732 - DNA, 510 bp, synthetic construct
  misc_feature 1..510: note = Description of Artificial Sequence: Synthetic coding sequence
  source 1..510: mol_type = other DNA
tgaggccggcgggtgttcctggccgccttcgccgccgccctgggccccttaagtttcggtttcgctctcggttacagctctcccgctatccccagcctgcagagggctgccccaccagctccgaggctggacgatgcagcagcgagctggttcggggtgtacatatcagaaatcgcctaccctgcagtcaggggcctcctcggtagctgtgttcagctgatggtagtggtgggcatccttctcgcttatctggccggatgggtgttagaatggcgctggctggctgtactcggttgcgtgccaccctccttgatgttgctcctgatgtgctttatgcctgagacacctcgctttttgcttactcaacacagaaggcaagaggctatggcagctctgcggttcttgtggggcagcgaacagggatgggaagacccgccaatcggcgcggagcagcagctgagcggcgtgaatgctgttatgttctatgcagaaaccatcttcgaggaatag

SEQ ID NO: 205733 - DNA, 771 bp, synthetic construct
  misc_feature 1..771: note = Description of Artificial Sequence: Synthetic coding sequence
  source 1..771: mol_type = other DNA
atgacccccgaggaccccgaggagacccagcccctgctgggccccccgggcggaagtgcccctagagggagaagggtgtttctggctgctttcgctgctgctttagggcccctgagcttcgggttcgctttgggctactcatctccagctattccatcattgcagcgggcagcacctccagcccctcgactggacgatgccgcagcttcctggtttggagtatacatctccgagattgcctatccagctgttcgtggcctactgggttcgtgcgttcagctgatggtggttgtcgggatactgctagcttatttggccggatgggtcctcgaatggcgttggcttgctgttttagggtgtgtacccccgagcttgatgctgctgctgatgtgcttcatgcccgaaactccccgctttttgctcacccagcatcgcaggcaggaggccatggctgctctgagattcctctggggttctgagcagggatgggaggacccacctattggtgccgaacagagcttccacctcgccctgttacggcagcctggaatttacaagcccttcataatcggcgtgagtctgatggctttccagcagctgagcggggtgaacgcagtgatgttttacgccgaaaccatcttcgaggaagccaagttcaaggactcctccttggcaagtgttgtcgtaggcgtgatccaggtcctctttacagccgttgccgcactgattatggaccgagcgggaaggcgtctgctgcttgtgttgtcttag

SEQ ID NO: 205734 - DNA, 804 bp, synthetic construct
  misc_feature 1..804: note = Description of Artificial Sequence: Synthetic coding sequence
  source 1..804: mol_type = other DNA
atgacctgcagcctgggcaaggtgtacatcagcgagatcgcctacccggcagtccgtgggctgctgggcagctgtgtgcaactgatggtcgttgttggcattctcctggcttaccttgctggatgggtgctggaatggaggtggctggcagtgcttgggtgcgtgccgccctccttgatgctgctactcatgtgttttatgcctgaaacaccccgattcttactgacacagcaccgaagacaagaggcaatggctgccttgaggtttttatgggggtctgagcagggctgggaggaccctcccataggcgccgagcagtcattccacctggctcttttgagacaaccaggaatctacaaaccgtttatcattggtgtcagtttgatggccttccagcagttgagtggcgtcaacgccgtcatgttctacgccgaaacaatatttgaggaggccaaattcaaggattccagtctggcgtccgtggtcgttggcgtgattcaggtcctgtttactgcagtagcagctctcatcatggatagagctggacggagactgctcctggtgctttcaggagtcgttatggtcttttcaactagcgcctttggagcttactttaagttgacccaaggggggccaggcaatagttctcatgtcgctatcagcgctccagttagtgcacagcctgtggatgccagcgttggcctggcatggctggccgtgggttcgatgtgtctgttcattgctggctttgctgttggatgggggccgattccttggctcctgatgtcagagatcttcccctag

SEQ ID NO: 205735 - DNA, 831 bp, synthetic construct
  misc_feature 1..831: note = Description of Artificial Sequence: Synthetic coding sequence
  source 1..831: mol_type = other DNA
cagctgatggtggtggtgggcatcctgctggcctacctggccggctgggtcctcgagtggaggtggctggcagtgctggggtgcgtgcctccaagccttatgcttttactgatgtgctttatgcctgaaactccacgtttcctacttacccagcatcgcagacaggaggccatggcggccctgaggttcctctggggctcagagcaaggttgggaagatcccccaatcggcgccgagcagtcctttcaccttgcgttgttaagacaacctgggatctacaagccgtttattatcggagttagcctgatggccttccaacagctcagcggagttaatgccgtcatgttctacgccgagacgatcttcgaagaggcaaaattcaaggactcttctctggcatctgttgttgtgggggtgatccaggtgttgttcaccgcagtggcagctctcattatggatcgggcaggtcggcggctgctgttggtgctttcgggtgttgtgatggttttcagcaccagtgccttcggagcatactttaaattgacgcagggtgggccagggaattccagtcacgtcgccatttctgcccctgtcagcgctcaacccgtcgacgccagcgtaggattggcgtggctggccgtgggctcgatgtgcctgttcatcgcagggtttgctgtggggtgggggcctattccatggttgctcatgagtgagattttcccactgcacgttaagggcgtagctacaggaatttgcgttctcactaattggttgatggcgttccttgtcacaaaagagtttagttcactgatgctgttacttctgctgtag

SEQ ID NO: 205736 - DNA, 726 bp, synthetic construct
  misc_feature 1..726: note = Description of Artificial Sequence: Synthetic coding sequence
  source 1..726: mol_type = other DNA
atgacctgcagcctgggcaaggtgtacatcagcgagatcgcctacccagccgttcggggcctgctgggaagctgtgtgcagctcatggtcgtggtcgggatactgttggcttacctggcaggatgggtcctcgaatggcggtggctggcggtgctggggtgtgtacctccatctctcatgctgttgcttatgtgcttcatgcctgagactccacgcttcttattaacccagcacaggaggcaggaagccatggcagccctgcggtttctgtggggctcagagcaggggtgggaggatcccccaattggcgccgagcagcaattgtccggggtcaacgcagtgatgttctacgctgagacaatctttgaggaggctaaatttaaagacagctctctcgcatctgttgtcgtaggggtgatccaggtactgttcacagcggtggctgccctcatcatggacagagccggaagacgattacttctggtgcttagtggcgtggtgatggtgttctccacgtctgcattcggtgcctatttcaagcttacacaaggcggccccggaaacagcagccatgtggcaatctccgcgcccgtgtccgcccagcccgtggatgcatccgtaggtctggcctggctcgccgtgggctccatgtgcctattcattgctggattcgccgttggctggggccctattccctggctgcttatgagcgaaatttttccctag

SEQ ID NO: 205737 - DNA, 798 bp, synthetic construct
  misc_feature 1..798: note = Description of Artificial Sequence: Synthetic coding sequence
  source 1..798: mol_type = other DNA
atggtggtggtgggcatcctgctggcctacctggccggctgggtgttagagtggcgctggctggcagtgctgggttgcgtccctccatcactgatgctgctactgatgtgtttcatgcccgagactcctcgttttctcctcacacagcataggcgccaagaggctatggccgcactcagatttctgtggggtagcgagcaggggtgggaggacccaccaattggcgcagagcaatccttccacctggcgctactgcggcagcctggaatctataagccattcatcattggagtgagcttgatggcctttcaacagctctccggagtcaatgccgtgatgttctacgccgagactatattcgaggaggccaagttcaaagattcaagtttggcttccgtagtcgtcggcgtcatccaggtactattcacagccgttgccgccttgattatggacagggccggtcgtcgactgttgctggtgttgtccggcgtggtgatggtcttttccacatctgcatttggcgcctatttcaagcttacacagggggggccgggaaattcaagtcacgtggctatttctgcccccgtgtcagcccagcccgtcgatgcttcggttgggctggcatggctggcagtcgggagtatgtgcctgttcatcgccggctttgctgtagggtggggcccgattccatggctgttgatgtctgagatcttccctctgcatgtgaaaggagtcgctactggtatatgtgtattaaccaattggttaatggcgtttctggtcaccaaggaattctag

SEQ ID NO: 205738 - DNA, 1623 bp, synthetic construct
  misc_feature 1..1623: note = Description of Artificial Sequence: Synthetic coding sequence
  source 1..1623: mol_type = other DNA
atggcccggaagcagaaccggaacagcaaggagctgggcctggtgccattaacagacgacacaagccacgctggtcccccagggccaggtagggcattactggaatgtgatcatctccgctcgggtgtacctggcggacggcgccgtaaagattggagttgctccctcctggtcgctagcctcgctggagcatttgggagtagcttcctgtatggctataatctgagcgtggtgaacgcccccacaccctatataaaagctttctacaacgagtcctgggagcgccgccatggacgtcccatcgatccagacacactaactcttttgtggagtgtgaccgtcagtatctttgccattggaggacttgtgggtactttgatcgtgaagatgatagggaaggtccttggacgcaaacacacactgctggccaacaacggtttcgctatttccgcagccctgctaatggcctgttctcttcaagcgggggccttcgaaatgctcatcgtgggtcgatttatcatggggatcgatggtggagtggcactctctgtgctccctatgtacctgtccgagataagccctaaggagattagaggaagcctgggacaggttactgccattttcatctgcattggagttttcacggggcagctgctcggactccctgaactgctgggtaaggagagcacatggccttacctctttggtgtgattgtcgtcccggccgtggtgcagctcctgagcctgccttttctgcccgatagccctagatacctgcttctggaaaagcataacgaagcccgagccgtcaaggcctttcagaccttcttgggcaaggccgacgtgagtcaggaggtggaagaggtactggccgagagcagagtccagaggagcataaggctggttagtgtgctggagctcctcagagcaccatacgtgagatggcaagtagtcacagtgatagtgacaatggcctgctaccaactttgcggactgaacgccatctggttctataccaatagcatcttcgggaaggccgggattcctccggccaaaatcccttacgtgactctcagtaccggaggcattgagacgctggccgcagtcttttccggactagtgattgagcatctaggacggaggccgcttctcatcggtgggtttggcctgatgggtctctttttcggtacactgacaattaccctgactttacaggatcacgctccttgggtgccatacctgtcgattgtgggcattctggccatcatcgcctccttctgctcaggccccggcgggataccatttattctcaccggggaattctttcagcaaagccagcgccccgcagcgttcattatcgctggcacagtaaactggttgtcaaacttcgccgtgggactgctatttccatttatccagaagagcctggacacttactgtttcctggtgttcgccacaatctgcatcacaggggcaatttacctatactttgtacttcctgagactaaaaaccggacatacgcagagatttctcaagctttctcaaagcgcaataaggcctatccacctgaggaaaaaatcgactcagcagtgaccgatggaaaaatcaacggccggccttag

SEQ ID NO: 205739 - DNA, 1536 bp, synthetic construct
  misc_feature 1..1536: note = Description of Artificial Sequence: Synthetic coding sequence
  source 1..1536: mol_type = other DNA
atgaagctgagcaagaaggaccggggcgaggacgaggagagcgactccgctaagaagaagctcgattggagttgctccttgctggtcgcttccttggccggcgccttcggtagtagctttctgtatggctataacttgtccgttgtgaacgctcccactccatatattaaggcgttttataacgagtcctgggagcggcgccacggcagaccaattgaccctgacaccctcaccttattgtggtccgtgactgttagcatctttgccattggtggattggttggaacactgattgttaagatgatcggaaaggtactaggccgaaagcatacgttgttagccaataacgggttcgctatttccgcagcacttctgatggcctgctcgctgcaagcgggcgcgttcgagatgctgatcgtggggagattcatcatgggaatcgacggcggggttgccttgagcgtactgccgatgtacttgagtgagatcagtccaaaggagatccgggggagtctggggcaagtgaccgccatttttatctgtatcggtgttttcacaggtcagttgctcggactgccagaacttctgggcaaagaaagcacatggccttacctcttcggcgtaatcgtggtgcctgctgttgtccagctgctgtcccttccttttctgcccgactcccccaggtatcttttgctggaaaagcacaacgaagctagggccgttaaggcattccagacgttcctggggaaggcagatgtgtcacaagaggtggaagaggtgctggctgaatctcgcgttcagaggagcatccgcctcgtaagcgtcctggagcttcttagggccccctatgtgcggtggcaggtcgttaccgtgattgtgaccatggcttgctatcagctgtgcggcttgaatgctatttggttctacacgaattcaatattcggaaaggcggggatccccccagccaaaattccctacgtcaccctgagcacagggggaattgagactctggccgcagtgttttccggccttgttatagaacacttggggcgaaggcccctgttaatcggcggttttggcctcatgggactgtttttcgggaccctgaccatcactctcaccttacaggaccatgctccgtgggtgccctacctttcaatcgtgggtattctcgccataatcgcatccttttgttctgggcctggaggcataccgtttattctgactggggagttctttcaacaaagccaacgacccgcagctttcatcatagcagggacagtcaactggctgtcaaacttcgcagtgggcctgctgttcccattcatacagaagagccttgacacctactgttttctggtgtttgctacgatttgcataaccggagctatctacctgtacttcgtgctgcctgagactaagaacagaacgtacgccgagatatctcaggcattctccaagcgtaacaaagcttaccctccggaagagaagattgacagcgcggtcactgacggcaagattaatgggcgcccatag

SEQ ID NO: 205740 - DNA, 1536 bp, synthetic construct
  misc_feature 1..1536: note = Description of Artificial Sequence: Synthetic coding sequence
  source 1..1536: mol_type = other DNA
atgaagctgagcaagaaggaccggggcgaggacgaggagagcgactccgcaaaaaaaaagctggactggtcttgctcactgttggtggcctcactggccggggccttcgggagtagttttctctacggctataacttgagtgtagtgaatgcgcctacaccctatatcaaagcgttttataatgagagctgggagagacgtcacggtcggccaatcgatcctgacactctgacactgttgtggtccgtaactgtcagtattttcgctattggcggtctggtcgggaccctgattgtgaagatgataggcaaagtccttggacgcaaacacactctgttggcaaataatggattcgctatctctgccgcactgctgatggcctgttccctgcaagccggcgcattcgaaatgctgatcgtcggtcggttcatcatgggtattgacggcggggtggctctgagcgtactcccaatgtacctgagtgagatctccccaaaggagattagggggagtctgggccaagtgactgcaatcttcatctgtatcggcgtttttacagggcagctcctggggctcccggaactgctcggaaaagagagcacgtggccttatctgttcggagttatcgtggttcctgccgtcgtgcagcttctctcactgccatttcttccggactcacctagatatctcctgctggaaaagcataacgaggcacgtgccgttaaagcattccaaacattcttgggtaaggctgatgtgagccaggaggtggaggaggttctcgcggagtcgagagtccagaggtccattcggttggtcagtgtgctcgaactactccgagccccctatgtacggtggcaagtggtcacagtgattgtcacaatggcatgctaccaactttgcggcctgaatgcgatctggttttacactaattctatttttggaaaggccggaataccccccgcgaagatcccatacgttactctctccacgggaggcatcgaaacactcgccgccgtgttctctggactggtgatcgaacacctgggccggcgtcctcttcttattggcggcttcgggctgatgggcttgtttttcgggacccttactattactctgaccctacaggatcacgccccctgggttccatacttgtctatcgttggtattcttgctataattgcgagtttctgcagtggtccaggcgggattcctttcatcctgacgggagagttttttcagcaatctcagcggcccgctgccttcataatcgcgggtacggtgaattggctttccaacttcgcagtgggccttctgttcccatttatccagaagtcgctcgatacgtactgttttttggtgtttgctacaatatgtattaccggggccatttacctctacttcgtactgcccgagaccaagaacaggacatacgcagagatttcccaggccttcagtaagcgcaacaaggcatacccccctgaagagaaaattgatagcgcagttaccgacggtaagataaatggtcggccctag

SEQ ID NO: 205741 - DNA, 597 bp, synthetic construct
  misc_feature 1..597: note = Description of Artificial Sequence: Synthetic coding sequence
  source 1..597: mol_type = other DNA
atgaagctgagcaagaaggaccggggcgaggacgaggagagcgactcagcaaagaagaaactggactggagctgtagtctcctcgtagcctcgctggcgggggccttcgggtcctccttcctctacgggtacaatctgtcggtagtgaatgcccccaccccatatatcaaggctttctacaatgaatcctgggagagacggcatggtcgcccaattgatccggacactctcaccctgttgtggtcggttaccgttagtatctttgccatcgggggcctcgtgggaaccttgatcgtcaaaatgatcggaaaggtcttaggcagaaaacatacgttactggccaacaatggatttgccataagtgcagctttactgatggcttgttccctccaggccggagctttcgagatgctaattgtggggcgcttcataatgggcatcgatgggggggtggccctcagtgtgctgcctatgtatctttctgagatctctcccaaagaaattagagggtcccttggacaggtgacggcaatctttatttgtattggcgtgttcactgggcagctgctgggtttgcctgaattgctaggcaagtag

SEQ ID NO: 205742 - DNA, 735 bp, synthetic construct
  misc_feature 1..735: note = Description of Artificial Sequence: Synthetic coding sequence
  source 1..735: mol_type = other DNA
atggagcagcaggaccagagcatgaaggagggccggctgaccctggtcctcgctttagctaccttaatcgccgcgttcgggagttccttccagtacggctacaatgtagccgcagtgaatagccccgccctgcttatgcagcagttctacaatgagacctattacgggcgaactggggaattcatggaagacttccctctgactcttctgtggtccgtgaccgtgtctatgttcccatttggcggcttcatcggaagccttctggttggccccttggttaacaagtttggcaggaaaggtgccttactcttcaacaacatcttctccatcgtacctgccattctcatgggatgttcgagggtggcaacaagctttgaattgattatcatttcccggctcttggtggggatttgcgcgggcgtgagttccaatgtagtcccaatgtacttgggcgaactggcacccaaaaacctgaggggggccctgggtgttgttcctcagctgttcatcaccgtgggaatccttgttgctcagatctttggcctgagaaatcttctggctaatgtagatggcgaattccggaccagtagggagcacccccatccattcactactactctgggaccattgttagtttttcagagccatcatcatcgcacagggctgtcagccgattggtctctcctgacaggatggatgagcttgggagggcccagctgccccgagcctacatag

SEQ ID NO: 205743 - DNA, 1506 bp, synthetic construct
  misc_feature 1..1506: note = Description of Artificial Sequence: Synthetic coding sequence
  source 1..1506: mol_type = other DNA
atggagcagcaggaccagagcatgaaggagggccggctgaccctggtgttggctttggctacacttatagctgcgttcggaagctcttttcagtacggctacaatgtcgcagctgtgaatagcccagcattgctgatgcagcagttttataacgaaacttactacggcaggacgggcgaatttatggaagattttccactgacactgctatggtcggtaactgtgagcatgtttccatttgggggctttatcgggagccttttggtcgggcccttggtgaacaagtttggccgtaaaggggccttgctattcaacaacattttttctattgttccagctatccttatgggctgctctagagtggctacatcctttgaactaatcatcattagccggctgctggttggcatttgcgctggagtgtcgtcgaatgtcgtgcccatgtaccttggagaactggcgccaaagaatctgcgaggcgccctcggggttgtccctcagctgttcataaccgttggcatactagtcgcacagatttttggtcttagaaatctcctggccaacgttgatgggtggccaatactcttaggattgactggcgtgccggctgctctccagctgctgctactgcctttcttccctgagagcccccggtacctcttgatccaaaagaaagacgaagcagcagccaagaaagcgctgcagaccctgcgtggctgggatagtgtggatcgagaagtggccgagataaggcaggaagacgaggccgagaaagctgctgggttcattagcgttcttaaactgttccgtatgcgtagccttcgttggcaactcctctctataattgtgctgatgggaggccagcagctttcaggcgttaacgccatttactattatgcggaccaaatctacctgtcagcgggggttccagaagagcacgtgcagtatgttaccgcaggaacaggggctgtcaacgtggtgatgaccttttgcgccgtctttgtggttgaactcttgggacgccgccttctgctcttgctgggcttcagcatctgtctcatcgcatgctgtgtgctgactgccgcccttgccctccaggataccgtgtcatggatgccgtacatctccatcgtgtgcgtcatatcttatgttatcggccatgctctgggacctagccccatccctgctcttctcatcactgaaatttttctgcaaagcagcagaccgtctgctttcatggtcggtggatccgtccattggctgagcaattttaccgtcggtttgatttttcccttcatccaggaaggtctgggcccttattctttcatcgtcttcgctgtgatctgcctgctgaccaccatatacatattcctgatagtcccagaaactaaagcaaagacattcatcgaaattaatcagattttcactaagatgaacaaggtctcagaagtctatccagaaaaggaagagttgaaagagttgcctccagtcacatctgagcaatag

SEQ ID NO: 205744 - DNA, 1455 bp, synthetic construct
  misc_feature 1..1455: note = Description of Artificial Sequence: Synthetic coding sequence
  source 1..1455: mol_type = other DNA
atggagcagcaggaccagagcatgaaggagggccggctgaccctggtcttggccctagcagccgtcaacagcccagccctgctcatgcagcagttttataacgagacatattatgggagaaccggggaatttatggaggattttcccctgacccttctctggtctgtaactgttagcatgtttccgtttggtgggttcataggatctctgctagtaggaccgctggtgaacaaattcgggcggaagggagcattactcttcaacaatattttttctatcgtgcctgctatcctgatgggatgttcccgtgtggccacaagtttcgagctgataattattagccgcctgctggtgggcatctgtgcaggcgtgagctccaatgtggtgcctatgtatctcggagaactagctcctaagaacctgagaggagctctgggggtcgtgccacagctgtttattacggtgggtattctcgtggcacagatatttggcctccgtaatcttctagcaaatgttgatggttggccaatattgctgggacttacgggcgtgcctgctgccctgcagctgctgctgctgcccttctttccagaaagccctaggtacctgcttatccagaaaaaggatgaggctgctgccaaaaaggccttgcagaccttgagaggctgggatagcgtggatagagaggtggccgagataaggcaggaagacgaagcagagaaggcagccggctttatctctgtgctgaaactgtttcgcatgaggtccctgagatggcagctcttgagcatcatcgtgctcatggggggtcagcagctcagtggggtgaatgcaatctattactatgccgaccagatctacttatccgctggagtacccgaggagcatgtccaatatgtgaccgctggcacgggggctgttaacgtggtgatgaccttttgcgctgtgttcgtggtggagctcttgggtcgtagacttctgctgctcttggggttcagcatttgtctgatcgcttgttgtgttctgactgcagccctggctctgcaggatactgtctcttggatgccatatatatcaattgtgtgtgtgatctcatatgtgataggccacgctctcggcccaagcccaataccagcattactcatcactgaaatcttcctccaatcctcccgcccttccgccttcatggttgggggaagcgttcactggttaagcaacttcactgtgggtttgatcttcccatttatacaggaagggctggggccttattccttcattgtgtttgcagtcatctgcctcctaacaaccatctacatctttctcatcgtcccagaaacaaaagctaagacatttatcgagattaaccagatattcaccaaaatgaacaaggtgtctgaggtgtaccccgaaaaagaggagctcaaagaattgcccccagtgaccagcgagcagtag

SEQ ID NO: 205745 - DNA, 1161 bp, synthetic construct
  misc_feature 1..1161: note = Description of Artificial Sequence: Synthetic coding sequence
  source 1..1161: mol_type = other DNA
atgggctgcagccgggtggccaccagcttcgagctgatcatcatctctcgattgctcgtgggaatttgtgccggagtaagcagtaacgtggtgcctatgtatctcggtgagctggcgcccaaaaacctgcggggggccttaggggtggtaccacagctatttattacagtaggcattctggtggcccaaatctttgggcttaggaacctcctggccaatgtggacggctggcctattctgctggggctgactggcgtgccggccgctctgcagttattgcttctgcctttttttcctgaaagtcctcgctacctgcttatccaaaagaaggatgaagctgccgccaaaaaggcattgcagactctaaggggatgggactctgttgacagggaggtcgctgagatccgtcaggaggacgaagccgaaaaggccgccggcttcattagtgtgctcaagctgttccggatgaggtcattgaggtggcagcttctgtcaataattgtgctcatgggagggcaacaactcagtggagtgaatgccatctattactacgcagaccagatttacctgtcagctggtgtgcccgaagaacatgtgcaatatgtcacagccggtaccggcgctgtgaatgtcgtgatgacattttgcgccgtgttcgtggtcgagctgttgggccggcggctgctccttcttctggggtttagcatctgcttgatcgcctgttgcgtgctgacagcagctctggcactgcaggacacagtgtcctggatgccgtatattagcatagtgtgcgtcatctcttacgtcattgggcacgccttggggcctagtcctataccagccctgctgatcacggaaatcttcttacaatccagccgccctagcgcctttatggttggtgggagcgtgcactggctgtctaactttacagtaggcctcatctttcctttcatccaggagggcctgggaccctacagcttcatcgtcttcgctgtcatttgccttcttaccacgatctacatctttctcattgtcccagaaaccaaggccaagacttttatcgaaattaatcagatttttacgaagatgaataaggtgtctgaagtataccccgaaaaggaagaattaaaagagctaccccctgttacttccgagcagtag

SEQ ID NO: 205746 - DNA, 1329 bp, synthetic construct
  misc_feature 1..1329: note = Description of Artificial Sequence: Synthetic coding sequence
  source 1..1329: mol_type = other DNA
atgctggagctgcacagcctgaccgccagcagcatcatgcgggtgttaattatgcgggccccactgcgcgaggctccacccgaaaagtttgcactgctgctgagtggatcccccgggaaaggagccctactgtttaacaacatattttctattgtccccgcaatcctgatgggatgctcccgcgtggcaacctcatttgagctgattataatttcccgcctgctggtgggcatttgcgccggagtttcttcgaacgtggttcccatgtatctaggagagctcgcccccaagaacttacgtggcgcccttggcgtcgtgcctcaactctttatcaccgtcggtattctggtagcccagatcttcggcctgagaaacttgctggccaatgtagatggatggcctatactcctaggcctcaccggtgtacccgccgcactgcaattactgttgttaccttttttccccgagagtccaaggtacttacttattcagaaaaaggacgaggcggccgcaaaaaaggcgctacagactctgcgcggctgggattctgttgaccgcgaagtcgcagagattcgccaggaggatgaagccgagaaggccgcgggctttattagcgtgctgaagctctttcgcatgcgctcactcagatggcagctgttaagcatcatcgtgctcatgggcggccagcagttgagcggtgttaatgctatatattactacgccgatcaaatctatctgagtgctggcgtacccgaggaacatgtgcagtatgtgactgctggcaccggggctgtcaatgtggtaatgacattttgtgctgttttcgtggttgaactgctaggtagaagattgctgctgttactcggcttctccatttgtttgatcgcctgctgtgtgctgaccgctgccctggcattacaggacacagtgtcctggatgccgtacatctcgatcgtgtgtgtaatctcttatgtcatcggccacgcactgggcccgtctcccatcccagctctgcttattactgaaatttttcttcagagctctcgtccttccgcttttatggtggggggatccgttcactggctatccaactttaccgtcggcttaatttttccctttatacaggagggcttgggaccttatagcttcattgtgtttgccgttatatgcctgttgactacaatctacattttcctgatcgtgccggagactaaggctaaaacttttatcgagatcaaccagattttcaccaaaatgaacaaggttagtgaagtctaccccgagaaggaggaactcaaggagctgccacctgtcaccagtgagcagtag

SEQ ID NO: 205747 - DNA, 2040 bp, synthetic construct
  misc_feature 1..2040: note = Description of Artificial Sequence: Synthetic coding sequence
  source 1..2040: mol_type = other DNA
atggccaccctgatcaccagcaccaccgccgccaccgccgccagcggacctctggtggactacctgtggatgctgatcttaggatttattattgcgtttgttctggccttcagcgtgggcgctaacgatgtggccaactctttcggcacagctgtcggctcaggagtggtgacactgaaacaggcctgcattctggcgtcaatcttcgagacagtgggctctgtgctgctaggggccaaggtgagtgaaacaatcaggaagggattaattgatgttgagatgtataactccactcaaggcctgctgatggcagggagcgtttccgccatgttcggctcagccgtctggcagctggtagccagctttctgaaactgcccataagcggcacacactgtatcgtcggtgcgactataggattttcgctggtggctaaaggccaggagggcgtgaaatggtctgaattgatcaagattgtgatgtcctggttcgtcagtcctctcctttctggcattatgagtggcatccttttttttctggtgagagcctttatcctgcacaaggccgatcctgttcctaacgggcttcgggctcttcctgtgttctatgcatgtacggtcgggatcaacctgttctcaataatgtacaccggcgcccccctgctgggtttcgataaattacccctgtggggtactattctgatttccgttggttgtgcggtgttctgcgcactgatcgtttggttttttgtgtgtccgcggatgaagaggaagatcgaacgcgagatcaaatgctcaccgagtgaatctccattgatggagaagaagaattctctaaaggaggaccacgaggagactaagttgtccgtcggggatatcgaaaataaacaccccgtgtctgaagtgggcccagcaactgttcccctgcaggcggttgtcgaagagcgcacagtctcttttaagctcggagacctcgaggaagcgcctgaacgcgaaaggctcccttctgtagaccttaaggaagagaccagtattgactccactgtgaacggcgcagtccagctccctaatggaaacctggtacagttttcccaggccgtttccaatcagattaacagctctggtcattaccagtaccatacagttcataaggacagcggactctacaaagaactcctccacaaactccatttggcgaaggtgggggactgcatgggggactccggcgacaaacctctgcggcgcaataattcctacacatcatatacaatggcgatttgcgggatgcccctggactctttccgcgccaaagagggagaacagaaaggcgaagagatggaaaaactgacctggccaaacgccgactccaagaagaggattcgcatggacagttatacatcctactgtaacgccgtttctgacctacactccgcttccgagatcgatatgtccgtgaaagccgaaatggggctgggagaccggaagggcagcaacggctccctggaagagtggtatgaccaagataagcccgaagttagtttgttgttccagttcctgcaaatactgactgcctgctttggctccttcgcgcacgggggtaatgatgtgagtaatgccattggtccgctggtggccttgtacctcgtctacgacacgggtgatgtttcatcaaaagtagcgacacccatatggctccttttgtacgggggcgtcgggatatgtgtgggtctatgggtctggggacgccgggtcatccagaccatgggcaaggacctcacgcctattacaccctcttcaggtttcagcatcgagcttgccagtgctcttaccgtggtaattgcatccaatatcggtttgccaatttctacgacccattgcaaggttggctcagtcgtgagcgtggggtggctcaggtcaaaaaaagctgtcgactggagattgtttcggaacattttcatggcttggttcgtgacagtgccgataagcggcgtcatatctgccgcaataatggccatattcaggtatgtgattctgagaatgtag

SEQ ID NO: 205748 - DNA, 1137 bp, synthetic construct
  misc_feature 1..1137: note = Description of Artificial Sequence: Synthetic coding sequence
  source 1..1137: mol_type = other DNA
atgggcaaccccagcgtgccccggggcggcttcacccagtactgccggggccttctcccatggggcttccaagatgctccgttctacctgctggtcctggggttcgacaaattgccgttatggggcaccatcctgattagcgtgggatgcgcagttttctgtgctttgatcgtgtggtttttcgtgtgtcccaggatgaagagaaaaatagagcgcgaaataaagtgttccccctcagagtctcccctcatggaaaaaaagaatagcttaaaagaagatcacgaggagaccaaactgtccgttggagacatcgagaacaagcatcccgttagcgaggtgggccctgcgacggtgcccctgcaagctgtcgtggaagagcgtacagttagttttaaattaggggaccttgaagaggctcccgaacgcgaaaggttgccatcagtggatttgaaagaggaaacatccatcgacagtactgtcaacggcgctgtacagcttcctaacggcaatctcgtgcagttctcgcaggccgtctctaaccaaatcaattccagtggacattatcagtatcacacagtacataaagattccggcctgtataaagaactactgcataagctacacctcgcgaaagtaggcgattgcatgggagattctggagacaagcccctccgtcgaaataattcgtacacatcctacacgatggctatttgtgggatgcccctagacagctttcgagctaaggagggtgagcagaaaggagaggagatggaaaaattgacttggcctaatgctgactcgaagaagcggatcagaatggacagctacacatcctattgtaatgcagtgagcgatctgcactcagcgtctgaaatcgacatgtcagtaaaagccgaaatgggcttgggagataggaagggcagcaatgggagtcttgaagaatggtacgatcaagacaagcctgaggtcagcctattgtttcagttccttcagattcttaccgcatgctttgggtctttcgcccacggaggcaatgatgtgtccaatgctattggtccactggtggctttgtacttggtctacgataccggtgatgtgtccagcaaggtggccaccccgatctggctgttgtgttag

SEQ ID NO: 205749 - DNA, 1959 bp, synthetic construct
  misc_feature 1..1959: note = Description of Artificial Sequence: Synthetic coding sequence
  source 1..1959: mol_type = other DNA
atggccatggacgagtacctgtggatggtgatcctgggcttcatcattgccttcatcctggccttttctgtgggcgcaaacgatgtggcaaacagtttcggaacagcggtaggctccggcgtcgtaactctccggcaagcttgcattctggcgagtatctttgagactactgggtctgttctgttgggagcaaaggtgggggagactatacggaagggcattatcgatgtgaacctgtataacgagacagtagaaaccctgatggcgggggaagtctcggctatggtcggctcagcggtgtggcagttaatcgcttcctttctccgcttgccaatcagtggcacgcattgcatcgttggtagcacaattgggttttcgttggtcgccatcgggaccaaaggggtgcagtggatggaactggtgaaaattgttgcttcatggttcatcagccccctcctcagtgggttcatgagcgggctgctgttcgtgctgattcgaatttttatcctgaagaaagaggatcctgtccccaacgggctgcgcgcactgcccgttttttatgcagccactattgccatcaatgtcttctccatcatgtatacaggcgcaccagtcctgggacttgttctccctatgtgggcgatagcattgatcagttttggggtggcgctgctttttgccttcttcgtctggctcttcgtctgtccttggatgaggaggaagataacgggcaagttacaaaaagagggggctctgtctcgagtgtccgatgaatcacttagtaaagtgcaagaagctgagagcccagtgtttaaggaacttcctggcgctaaagccaatgatgacagcacaatcccattgacaggcgccgccggggagacactggggacatccgagggtacatccgcagggtcccatccacgcgccgcatacgggcgcgcactgagcatgactcacggatctgttaaatctccaatttccaacggcacgttcggctttgatggccacactagaagtgacggtcacgtctaccatactgttcacaaagattctggactgtacaaggatctccttcacaaaatccatatcgacagagggccagaggaaaaaccagcacaagaaagtaattaccgactgctgagacgcaacaacagctacacctgttacacggctgctatctgcgggctgcccgtccatgcgacgtttcgagcggctgactccagtgcaccagaagactcagagaaattggtcggggatacagtaagctactccaaaaaacggctcaggtacgatagctatagttcttattgtaatgcagtagctgaggccgaaatcgaggcagaggagggaggagtggaaatgaaactcgcaagcgagttggcggatcccgaccagccccgggaggaccccgctgaggaagagaaggaagaaaaagatgctccagaggtacatctgttattccattttctgcaggttctgactgcgtgtttcgggtccttcgcccatggcggaaacgatgtgtctaatgcaattggacccctcgtggcgctgtggctaatctataagcaaggcggcgttacacaggaagccgccacccctgtgtggctgttgttctatggtggtgtgggaatttgcacagggttatgggtgtgggggaggcgggtgatccaaacaatgggaaaggatctgacgccaattaccccctcatccggattcacaattgaactcgcaagcgcgttcaccgtggtgatcgccagtaatatcggactgcctgtttccaccacccactgtaaggtagggagcgtggttgccgtcggctggatacggagccggaaagctgtcgattggcgcctttttcggaatatcttcgtggcttggtttgttactgtgccagtggcaggcttgtttagtgcagcggtgatggccctcctcatgtatggcatactgccctatgtgtag

SEQ ID NO: 205750 - DNA, 216 bp, synthetic construct
  misc_feature 1..216: note = Description of Artificial Sequence: Synthetic coding sequence
  source 1..216: mol_type = other DNA
atggccatggacgagtacctgtggatggtgatcctgggcttcatcatagcatttatcctggcatttagcgtcggcgcaaacgatgtggcaaactccttcggcactgctgtcgggtccggagtagttacactccgtcaggcttgcattctagcgtccatctttgagaccaccggcagcgtgcttcttggcgccaaggttggcgaaactatcaggtag

SEQ ID NO: 205751 - DNA, 87 bp, synthetic construct
  misc_feature 1..87: note = Description of Artificial Sequence: Synthetic coding sequence
  source 1..87: mol_type = other DNA
atggccatggacgagtacctgtggatggtgatcctgggcttcatcatagctttcatactggcattctcagtcggggctaacgactag

SEQ ID NO: 205752 - DNA, 237 bp, synthetic construct
  misc_feature 1..237: note = Description of Artificial Sequence: Synthetic coding sequence
  source 1..237: mol_type = other DNA
atggccatggacgagtacctgtggatggtgatcctgggcttcatcatagcttttatactcgcctttagcgttggggctaacgacgtggctaattccttcggtaccgctgtcggctctggggtcgtgaccttaaggcaagcctgtatcctggcctccatctttgaaacaacaggctcagttcttctgggcgcaaaagtgggtgaaaccatccgcaaggggattatcgatgtgaattag

SEQ ID NO: 205753 - DNA, 1959 bp, synthetic construct
  misc_feature 1..1959: note = Description of Artificial Sequence: Synthetic coding sequence
  source 1..1959: mol_type = other DNA
atggccatggacgagtacctgtggatggtgatcctgggcttcatcatcgccttcattctggccttttccgtgggagctaatgacgtcgctaactccttcggcacggccgtcgggtccggcgtggtgactctgcgacaggcttgtattctggccagcatatttgagactactggcagcgtactcctgggtgctaaggtcggtgagaccatcagaaagggaatcatcgacgtgaatctgtacaacgaaactgtggaaacactgatggcaggagaagtaagtgcaatggtgggtagcgcagtgtggcagctgatcgccagttttctgcgattacctatatccgggacacattgcatcgtgggatcaaccattggcttctcactggttgctatcggcacaaaaggagtgcaatggatggagttggtgaagatcgtggcctcctggttcatttccccactgttaagcggttttatgtctgggctcctgttcgtcttgatcaggatcttcatccttaagaaagaggatcctgttcccaacgggctgcgggctctcccagtgttctatgccgcgacgatcgccatcaatgttttctcgattatgtatacaggcgcgcccgtactgggcctagtattacctatgtgggcaatcgccttgattagtttcggtgtggctctcctgttcgctttctttgtgtggcttttcgtgtgtccatggatgcgtaggaagataactgggaagctccagaaggaaggtgctttgtcccgtgtgagtgacgaaagcctcagtaaggtacaggaggcagagtccccagtgtttaaggagctgcccggagccaaggccaatgatgacagtactattccccttaccggtgcagccggcgaaaccctaggcacatccgaggggaccagcgccggttcccacccacgagcggcatatggcagagctctgtcaatgacccacgggtctgtcaaaagcccaatctctaacgggaccttcggcttcgatggccacactcggagcgatggccatgtgtaccataccgtacataaagattccgggctctacaaggatctgttacacaagatccacatcgacagaggccccgaggaaaaacctgcccaagaatctaactatcggttacttcgccggaataattcgtacacgtgctacacagctgccatttgcggcctccccgtccatgccacgtttagggctgccgattcatcggcccctgaggatagcgagaagctggtcggggacacagtgtcttacagcaaaaagaggctaaggtacgatagctattcaagttactgcaatgcagttgctgaggctgaaatcgaggcagaggagggcggagtggagatgaagctggccagtgaactggctgatcctgatcaaccaagagaggaccccgctgaggaggaaaaggaagaaaaggatgcccctgaagtgcacctgcttttccactttctgcaagttctgaccgcctgtttcggcagttttgcccatggtggcaatgacgtgtcaaatgcgattgggcccctggtggccctctggctaatatacaagcaggggggggtaacccaggaggcagccaccccggtgtggctgttgttttacggtggcgttgggatctgtaccgggctgtgggtatgggggagacgcgtcattcaaactatggggaaggatcttacacccatcacgccaagttcgggatttactatcgagctggccagtgccttcaccgtggtgatagcgagtaacataggcttacccgtgtcaacaacacactgtaaggtcgggagtgtggtcgctgttggatggattagaagcagaaaagcagtagattggagactattcaggaatattttcgtcgcatggtttgtgactgtgcccgtggcgggcctttttagtgctgcggtgatggcccttcttatgtatgggattctcccttacgtatag

SEQ ID NO: 205754 - DNA, 1959 bp, synthetic construct
  misc_feature 1..1959: note = Description of Artificial Sequence: Synthetic coding sequence
  source 1..1959: mol_type = other DNA
atggccatggacgagtacctgtggatggtgatcctgggcttcatcatcgctttcatcctggcattttccgtcggcgccaacgatgtggccaactcctttggtacggcagtaggctctggggtagtcacacttaggcaggcctgtatccttgcatcaatttttgagacaacaggcagtgtccttctcggcgctaaggtcggcgagactatcagaaagggcatcattgacgtgaacctttacaacgagaccgtggagactctgatggctggggaggtgtcagctatggtagggtcagccgtctggcagctcattgcttctttccttcggctcccaatatccggcacccattgcatcgtcggaagtacaataggctttagtctcgttgccattggcaccaagggggtccagtggatggaactggtgaaaattgtggcaagctggtttatcagcccattactttccgggttcatgtcgggtcttctctttgtgctgatccgaatcttcattctgaaaaaagaagaccctgtccccaatggcctcagggctctccccgtgttttatgctgcaacaatcgcgattaatgtcttttctataatgtataccggcgcccccgtgttaggtctggtattacccatgtgggcaatcgcactcataagctttggcgtcgccctactttttgcgtttttcgtttggttgtttgtgtgcccttggatgcggagaaaaatcaccggaaagttgcaaaaagaaggcgcgctgagtcgggttagtgatgagtcactttctaaggtgcaggaggcggagtcgcccgtttttaaggaactgccaggtgctaaagctaacgacgactcaacaataccactgactggtgcggccggtgaaaccctgggcacctccgaaggaacatccgctggctcccacccacgggcggcctatggacgtgccctgtcaatgacccacggatcagtcaagtctcccatcagcaatggcacctttggatttgacggccacactaggtctgatggccacgtgtaccatacagtccacaaggattccggcctgtacaaagatcttctacataaaattcacatcgacagggggccagaagagaagccagctcaggagtctaattatcgattgctacgtaggaacaatagttacacatgctataccgcagccatttgtggcttgcctgtgcacgctactttccgcgctgctgactcgtctgcacccgaggattctgaaaagttagtgggggacacggtgagctactctaaaaagcgtctgagatacgacagctactcctcatactgcaatgccgtagccgaggccgagatcgaagccgaagagggaggcgtagaaatgaagctcgcttctgagctggctgatcccgatcagccacgggaggatcctgcggaggaggaaaaggaggagaaagacgctccagaagtgcatctgttgttccactttctgcaggtattaactgcctgttttggatcatttgcccatggggggaacgatgtgagcaatgccattgggccgctggtggcattgtggctgatctacaaacagggaggcgtgacccaggaggccgctactcctgtttggttgttattctacggtggagtaggcatatgcacgggcctatgggtgtggggaaggagagtgattcagaccatgggaaaggatctgactccaattactccatccagcggtttcaccatcgagctcgctagtgcgtttaccgtcgtgatcgcgagcaatataggacttccagtatcaaccacacactgcaaggtggggagcgtggtcgcagtgggatggatcaggagcaggaaggcagtggactggcgcctgtttaggaatatctttgtggcatggttcgtcacagtgcccgttgccggcctgtttagtgccgcagttatggccctacttatgtacggcatactcccttacgtgtag

SEQ ID NO: 205755 - DNA, 144 bp, synthetic construct
  misc_feature 1..144: note = Description of Artificial Sequence: Synthetic coding sequence
  source 1..144: mol_type = other DNA
atggccatggacgagtacctgtggatggtgatcctgggcttcatcattgccttcattctagcctttagtgttggggcgaacgatgttgctaatagttttggcaccgccgtgggcagcggagtggtcaccctgagacaggcctag

SEQ ID NO: 205756 - DNA, 1260 bp, synthetic construct
  misc_feature 1..1260: note = Description of Artificial Sequence: Synthetic coding sequence
  source 1..1260: mol_type = other DNA
atggcccagagcatcttcatggccggcatcctgatcggcggcctggtactgggagatctgtccgatagattcggcaggagacccatcctgacatgtagctacctgttgctggccgcatcaggcagcggtgccgccttcagcccgacctttcccatttatatggtcttcagattcctgtgtggctttggaatctctgggatcactcttagcactgtgattctgaacgtggaatgggtccctacccggatgcgtgccattatgtcaactgcattaggttactgctacacctttggtcagtttatactcccggggctggcctacgcaatcccgcagtggaggtggctccagctcacagttagcatccccttctttgtgttctttctcagctcctggtggacaccagagagtatcaggtggctggttctgagtgggaagagttcaaaagccctaaaaatcctgagacgggtcgcagtatttaacggcaaaaaagaggagggtgagcgactttctctggaagaactgaaattgaatttgcagaaagagatttctctcgccaaggcaaagtatactgcatcggatttatttcgtattcctatgctccgccgaatgacgttttgtctcagtttagcttggtttgcaactggattcgcctattatagcctggccatgggcgttgaggaatttggcgttaacttgtacatactccagattatcttcgggggggtcgacgtgcctgcaaaattcatcacgattcttagcctgtcatacctggggcgtcatacaacacaggctgctgctcttttactggcagggggggcaatcttggccttgactttcgtaccattggatctacaaacagtgagaaccgtgcttgccgtatttgggaaaggctgcctgtcatcctccttcagctgcctattcctttacacttccgagctttaccccactgtcattcgccaaaccgggatgggagtttctaacttatggaccagggtgggtagcatggtgtctcccctggtgaaaattaccggcgaggtacagccttttatccctaatatcatctacggtatcacagccctgctcggtggctcggccgccttattcctgccagagaccctaaaccagccactgcccgaaaccattgaggacctcgaaaactggagtctgagggccaagaagcctaagcaggagccagaggtcgaaaaggccagccagagaatcccactgcagcctcacggacctgggttgggaagctcgtag

SEQ ID NO: 205757 - DNA, 1356 bp, synthetic construct
  misc_feature 1..1356: note = Description of Artificial Sequence: Synthetic coding sequence
  source 1..1356: mol_type = other DNA
atggagccctgcctggacggctgggtgtacaacagcaccaaggacagcattgtgaccgaatgggacctggtctgtaatagtaacaaactaaaggaaatggcacagagcatcttcatggctgggattctcatcggtgggttggtcctaggagacctgagcgataggttcggaagaaggcctatcctgacctgctcctatctgctgttagctgcctctggatccggtgctgccttcagtcccaccttccccatttacatggtttttagatttttgtgtggattcggaatttccggtatcacactgtctacagttatactcaatgtagagtgggtacccacacggatgcgagctataatgtcgactgcattggggtattgttacaccttcggtcaattcatactgcccggactggcgtacgcaatccctcagtggcggtggcttcagctcaccgtatcgattccgtttttcgtatttttcttatcttcctggtggacgcccgaaagcattagatggctggtcctgtccgggaagtcctcaaaggcgttaaaaatcttaagaagagttgcagtgtttaacgggaagaaggaagaaggcgagcgcctctcattagaggaactcaaactcaatctacagaaggagatatccttggctaaggccaaatatacagcgagtgatctttttaggatcccaatgcttagacgcatgacgttttgtctcagcttggcttggtttgcaactggattcgcgtattatagtttggcaatgggagtggaggagttcggcgtgaacctttacatacttcaaattattttcggcggagtagatgtgccggccaagtttattactatactgtctctgtcttacttgggtagacatacgactcaagccgccgcacttctgctggctgggggagccatcctggctctcacgttcgtaccactggaccttcagacagtgcgcactgttcttgcagtgttcggaaaagggtgtctctcctctagtttttcctgcttgttcttatacacttccgagctgtaccctaccgttattcgccagacaggaatgggcgtgagcaacctgtggacacgtgttggttctatggttagcccactcgtcaagatcaccggcgaagtgcagcccttcatacctaacatcatatatgggattacagccctccttgggggttctgcagcactgttcttacccgaaacgttgaaccagccactgcctgagaccattgaagacctggagaactggtccctccgggcaaagaaaccaaagcaagagcctgaggtggagaaggcctcccagaggatcccactgcagccccacggccccggcttgggctctagctag

SEQ ID NO: 205758 - DNA, 1653 bp, synthetic construct
  misc_feature 1..1653: note = Description of Artificial Sequence: Synthetic coding sequence
  source 1..1653: mol_type = other DNA
atggccttcaacgacctgctgcagcaggtgggcggcgtgggccggtttcaacaaatacaggtgacacttgtggtcctgcctctgctcctgatggcttctcataatactcttcagaatttcaccgccgctatacccacgcatcattgccgacctcctgctgacgccaacctgtccaagaatggtggactggaggtatggctaccccgcgaccgccagggtcagcccgagagctgccttagattcacgtcgccacagtggggccttccctttctgaacggaactgaggccaatggcaccggtgctaccgagccttgtacagacggttggatctatgacaactctactttcccctcaaccatcgtgactgagtgggatctcgtgtgtagtcaccgggcactgcgtcagctcgcccagagcctgtatatggtgggagtgttacttggggccatggtcttcgggtaccttgcagataggctggggcgaaggaaagtgctcatacttaattatctgcagaccgccgtgtctggcacttgtgcggctttcgcacccaatttccccatctactgcgccttccgactccttagcggcatggcattagcaggaatctcccttaactgcatgacccttaacgtagaatggatgccaatccacaccagagcctgtgtgggaacccttattggatatgtgtactccctcggtcagttcttgcttgccggcgtagcctacgccgtccctcattggcgccacctgcagctcctcgtgagcgcccctttcttcgcattttttatttattcctggtttttcatcgaaagtgcccgatggcactcttcgtcaggccgactcgacttgacacttagggcattgcagagagtggcccgaataaatggcaagagggaagagggggccaaactgtctatggaagtactgcgggcctctttgcagaaagaattaacaatgggtaaaggccaagcatcagcgatggaactacttaggtgcccaacacttcggcatctctttttgtgtctgtctatgctgtggttcgccacctcattcgcttactacgggctggtgatggacctgcagggattcggagtgagcatctaccttatccaagtgatatttggggcggttgacctgcccgccaaactcgttggattccttgttatcaatagcctgggtcgcagacctgcacaaatggctgcacttctgttagctgggatctgcatcttgctcaacggcgtaataccacaggatcagagcattgtgcgaacgtccctggcagtgctggggaaagggtgtttggccgcctcttttaattgcatttttctttatacgggtgaactataccctactatgatcagacaaacaggaatgggcatggggtctacaatggctcgggtgggtagcatagtcagcccactggtttcgatgacagctgaactgtatccttctatgcccctgtttatctacggcgccgtgcccgtagctgcctcagccgtgactgttctgctgcctgagaccttggggcaaccgcttcccgacacagtccaagacctcgagagccggaaagggaaacagacaagacagcagcaggaacatcagaagtatatggtgcccttgcaggctagtgcccaggagaaaaatggtttgtag

SEQ ID NO: 205759 - DNA, 1692 bp, synthetic construct
  misc_feature 1..1692: note = Description of Artificial Sequence: Synthetic coding sequence
  source 1..1692: mol_type = other DNA
atggccttcaacgacctgctgcagcaggtgggcggcgtgggccggtttcagcagattcaggtaaccctagtggtactccccctgttgctaatggcgagtcacaacaccctccaaaactttacagcagcaatccctactcatcactgccgcccgcctgccgatgccaacctctccaagaacgggggccttgaggtgtggcttccccgcgacaggcagggacagccagagtcatgcctgagatttactagccctcagtggggcttaccctttctgaatgggacagaggcaaatggcactggcgccactgagccttgcaccgacgggtggatatacgataacagcacattcccatctacaattgtgaccgaatgggacctggtatgttcgcacagggccctgcgccagttagcacaatcattatacatggtcggagtgctcctgggggcgatggtcttcggctacctcgccgatcggctcggacggcggaaggtgcttattctaaactacctgcagactgcggtctctggcacttgcgccgcattcgctccaaactttcctatctactgcgctttccggcttctgagtggcatggctctcgcagggattagcttgaattgcatgacactcaacgtagaatggatgcccatccatacaagggcttgcgtcggcactttaatcggctatgtgtactcacttggacaattcctcctggcgggcgtggcctatgcggtgcctcactggaggcacctacaactgctcgtttctgcaccattcttcgcctttttcatctattcctggttctttatcgaatcagcacggtggcacagttccagtggtcgcttggacttaacattacgagcgcttcagcgggtggcaaggataaatggaaaacgagaagagggggccaaacttagcatggaagtacttcgtgcatctctgcagaaggagctcaccatgggcaaaggccaggcctccgctatggagcttcttagatgtcccacgttgaggcacctgtttctgtgtctgtctatgctttggtttgccacctctttcgcctactatggcctcgtgatggatctccaggggttcggagtttccatctatttaatccaggtgatcttcggggcggttgatctccctgcaaagttggtgggctttcttgtgatcaacagcctggggcgtagacctgcacagatggcagccctgctccttgcagggatctgcattctgttgaacggagttatcccacaggaccaatctatcgtaagaacctcccttgccgtgctgggaaaagggtgcctcgctgccagctttaattgtatattcctatacacaggagagctgtaccctaccatgatacgccagacagggatgggcatggggagcactatggcacgcgtggggagcattgtttcccccctggtgtccatgactgcagagctgtatcccagtatgcccttatttatttacggcgccgtacccgttgcagcctccgccgtgaccgtgctcctgcccgagactctcggccagccactgccagacaccgtacaggacctggagtcccgctgggcacccacccagaaggaagcgggcatttacccaaggaagggaaaacagaccaggcagcagcaggaacaccaaaagtacatggttcccctgcaggccagtgcccaagagaagaatggcctatag

SEQ ID NO: 205760 - DNA, 1590 bp, synthetic construct
  misc_feature 1..1590: note = Description of Artificial Sequence: Synthetic coding sequence
  source 1..1590: mol_type = other DNA
atggccttcaacgacctgctgctgctgatggccagccacaacaccctacagaactttactgctgccataccaacccatcactgtaggcctccagccgatgcaaatctgtccaagaacgggggcctggaagtgtggctccctagagacaggcaggggcaacccgagtcatgcttgcgctttacttcgccccagtggggtcttccatttctcaacggaaccgaagcaaatgggactggcgcaacagaaccttgtaccgatgggtggatttacgacaattccactttcccctccaccatagtgactgagtgggacctggtgtgctcacaccgggccctgcgccagctcgcccaatctctctacatggttggggtgctgttgggtgctatggtttttggatacttggctgacagactcggaagaaggaaggtgctaatactaaattacctacaaaccgccgtatcaggcacctgtgctgctttcgcacctaactttcccatctactgtgcctttaggttactgagtgggatggccctggcaggcatatcccttaattgcatgaccctcaatgtagagtggatgcccatacacacccgagcatgcgtggggacactgatcggctatgtctacagcttgggtcagtttctcctggcaggggtcgcgtacgccgtaccccactggcgacacctgcagctcctggtctctgcacctttctttgcattctttatctactcttggttttttattgaaagtgcaaggtggcacagttctagtggccgtctagatctgacccttagggctctgcagcgagtggcacgtattaacgggaagcgggaagagggcgctaagcttagcatggaggtgctgcgcgccagtctccagaaggagctcaccatgggtaaaggccaggccagcgcgatggaactgttgagatgtcccacactgaggcacctcttcctgtgtttatcaatgctgtggtttgccacctcttttgcctactacgggcttgtgatggaccttcagggtttcggcgtcagtatatacctgattcaagtcatctttggtgccgtcgacctgcctgccaaattggtagggttcctcgttattaattccctaggaagacgccccgctcaaatggccgctctgcttttagcgggaatatgcattttactgaatggcgtcattccacaggaccagtcaatagtgcggacttccctagcagtcctaggcaaggggtgcctggcagcttctttcaactgtatattcctttacaccggcgagctgtaccccaccatgatccgccagacaggcatgggcatgggatccaccatggcacgagtgggatccatagtgtccccactggttagcatgacagctgaactctatccgtccatgcctctttttatttacggggccgttcccgtcgcggctagcgccgtgacagtgctgctccctgaaaccctgggtcaaccactgcctgacactgtccaagacttggaatcaaggaaaggtaagcaaacgcggcaacagcaagagcaccagaaatacatggtgcctttacaggcttccgcccaagagaagaatggactgtag

SEQ ID NO: 205761 - DNA, 1560 bp, synthetic construct
  misc_feature 1..1560: note = Description of Artificial Sequence: Synthetic coding sequence
  source 1..1560: mol_type = other DNA
atggccttcaacgacctgctgcagcaggtgggcggcgtgggccggttccagcagattcaagtcactctggtggttctgcctttacttctgatggcaagtcacaatactctacagaacttcactgcagccattcccactcaccattgtcgcccacccgctgatgctaatctctcaaagaacgggggcttggaagtctggcttcctagagaccgccagggacagccggaatcctgtctgagattcacctcccctcagtggggtttaccctttttgaacggaactgaagccaatggaactggcgctactgaaccgtgcacagatgggtggatctacgacaattccactttcccctccacaatagtgactgagtgggatctggtgtgtagccaccgcgctctgcgtcagttggctcagtccttatatatggtgggggtgctccttggagctatggtgttcggatatctggctgacaggttaggccgacggaaagtcctcattctgaactacctccagaccgcagtgtcgggaacgtgcgcagccttcgctcccaacttccctatatattgtgcattccgtcttttgtcgggcatggctttagccggaattagcttgaactgtatgacactcaatgtcgagtggatgcctatacacactcgtgcatgtgtgggcactcttatcggctacgtgtatagtctgggacaattcctgctggccggagtggcctacgcagtgcctcactggagacacctccagttgctggtgagcgccccattttttgcattttttatctactcatggttcttcatcgaatcagcccgctggcacagcagttccggcagattggatcttacacttcgggccctccagagggtcgcgaggataaacggcaaaagggaagagggagctaagctaagcatggaggtgctgcgtgcttccttacagaaggagctgactatgggaaagggccaagcaagcgccatggaacttctcaggtgcccgaccctgcgtcatctgtttttgtgtctttctatgctgtggtttgctacaagtttcgcatactatggtctggtgatggacctacaagggtttggagtgagcatctatctgatccaggttatttttggagctgtggacctgcccgctaaacttgtcggatttctggtgatcaattcactggggagacgcccagctcaaatggccgccttgcttctggcgggcatttgcatcctcctgaatggcgttatcccacaggaccagagcattgtgcgtacgtcgctcgcggtgcttggcaagggctgtttagccgcaagtttcaattgcattttcttgtataccggcgaactatatcctaccatgattagggcagtcacagtgcttctgcctgagaccctggggcagcccttgcccgatactgttcaggatctggagtctcgctgggctcccacacaaaaagaggcgggaatttatccccgtaaaggaaagcaaacgcgccagcagcaagagcaccagaagtacatggtacccctgcaggcaagcgctcaagaaaaaaacggcctgtag

SEQ ID NO: 205762 - DNA, 1521 bp, synthetic construct
  misc_feature 1..1521: note = Description of Artificial Sequence: Synthetic coding sequence
  source 1..1521: mol_type = other DNA
atggccttcaacgacctgctgcagcaggtgggcggcgtgggccggttccagcaaattcaagtgaccttagtggtgctgccgttgttgctcatggcctctcacaatacgctgcagaacttcacagcggctataccaacccatcattgtcgccctcccgctgatgctaacctctcaaagaatggtggcctggaggtctggctccccagggatcgtcagggccagcccgagtcctgtctcaggttcacgagcccacaatgggggctcccatttctgaacggcaccgaagccaacggcactggagcaaccgaaccctgtaccgatgggtggatctatgataactctaccttcccctcaaccattgtgaccgagtgggatctagtttgttcccacagagccctgcgtcagctggcccagagcctttacatggtgggcgttttgctgggtgccatggtgttcgggtacttggcagataggctgggcaggagaaaggtacttattttgaattacctacagacagctgtgagcggcacatgcgcagcgttcgcccccaattttccaatctactgtgccttcagacttctcagcggaatggctctcgcagggataagtctcaattgtatgacactgaatgtggagtggatgcccattcatacacgagcctgcgtcgggactctgattgggtacgtgtactctttgggacaattcctgttggctggggttgcttacgcggtccctcactggcgacacttgcagcttttggtgagtgcccctttctttgccttctttatttatagctggtttttcattgagtccgcaaggtggcactcttcttccggacgtttagatctcacactccgggctttgcagcgcgtagccagaattaacggtaaaagggaagaaggcgcaaagctgtcaatggaagttctgagggcatccctgcagaaagaacttactatgggaaaaggccaggcaagtgcaatggaattgctgaggtgccccaccctccgccatctattcctctgtctaagcatgttgtggttcgcaactagctttgcatactacgggttggtcatggatctgcaagggtttggcgttagtatttacctcatccaggtcatatttggggccgttgaccttcctgctaaattggttggattcctggtgatcaactccttggggagacggcctgcccagatggctgcactcctgcttgcgggcatctgcattctcctgaatggagtgatccctcaggaccagtctatagtcagaacttcacttgccgtgctcggtaagggttgtctcgctgccagtttcaattgtattttcctgtataccggtgagttgtaccccaccatgatccgcgccgttacagtattactgccagagacactcggacagcccctgcctgacacagtgcaggatctggagagcaggaaaggcaagcagaccaggcagcagcaggagcatcagaaatacatggtgcctctccaagcaagcgcgcaggagaagaatggactgtag

SEQ ID NO: 205763 - DNA, 1620 bp, synthetic construct
  misc_feature 1..1620: note = Description of Artificial Sequence: Synthetic coding sequence
  source 1..1620: mol_type = other DNA
atgggcttcgaggagctgctggagcaggtgggcggcttcggcccctttcaattgaggaacgtagcactgcttgccctgcccagagtactcctcccattacacttcctgctgcccatctttctggccgccgtgccggctcatcgatgtgctctccctggcgccccagcgaacttctcacaccaggatgtgtggcttgaagcccacctgcccagagagccggacggaaccctgagctcctgcctgcgatttgcctatccccaggcactgcccaatacgactttgggcgaagaacggcagagccggggcgagctcgaggacgagcctgctacggtgccttgtagtcagggctgggaatacgatcactctgaattcagtagtaccatagccactgaatgggaccttgtgtgcgagcagaaaggtctgaaccgcgctgcatcaacgttttttttcgccggagtcctggtgggtgccgtggccttcggctatctgtcggatagattcggacggagacgcttgttgctcgtggcttatgtttccactctggtgcttggtttagcttctgccgccagcgtgagctacgtcatgttcgccattacccgcacacttaccggttctgccctggccgggttcacaatcatcgttatgcccctggagcttgagtggctggatgtggagcaccgaacagttgcgggagtcttgtctagcactttctggaccggaggagtaatgctgctcgcgctggtcggctatctaataagagactggagatggcttctattggcagttactctcccctgtgcacctggtatcctgtccctctggtgggttcccgagagtgcccgatggcttctgacacagggacacgtcaaggaggcacatcgctacctactccattgcgccaggttgaatggacgccccgtgtgcgaagacagcttcagtcaggaggcagtttctaaggtagcggctggcgagagagtggtccggcgcccctcctaccttgatctttttaggaccccccgcctccgacacatttccctgtgttgcgtggttgtatggttcggagttaacttttcttattacggactatccttggacgtatcaggcttgggactgaatgtgtatcagacccagctgctgttcggcgctgtcgaactgccctcgaagcttctcgtctacctgagcgtgcgttatgcaggtaggcgcctgactcaggccgggacactgctcggcacggctctagcatttggcactcggcttctggtgtctagcgatatgaaatcttggagtacagtactggccgtaatggggaaagcctttagcgaggcggcctttacgactgcttacctcttcacatccgaactttaccccacagttctgcgtcagaccggaatgggcctgaccgctctggttgggcgcttagggggatcactcgctcctctcgcggccttactggatggtgtgtggctgagcttaccgaaactgacatacggtggaatcgctttgctggcagccggcaccgccctcttgctgccggagaccaggcaagcccagctacccgaaacaatacaggacgttgagaggaagagatgcgtgcaccggacagttagcgtatacgtttag

SEQ ID NO: 205764 - DNA, 1647 bp, synthetic construct
  misc_feature 1..1647: note = Description of Artificial Sequence: Synthetic coding sequence
  source 1..1647: mol_type = other DNA
atgggcttcgaggagctgctggagcaggtgggcggcttcggcccctttcagctgaggaacgtggccctgttagctctgcctagggtgcttctgcccttgcactttctgctgccaattttcctggccgcagtccccgcccacaggtgcgctctgcccggtgcacccgctaatttttcacaccaggatgtgtggcttgaggctcacctcccccgcgagcctgatggaactctctcaagctgcctgcgatttgcctacccccaggccttgcctaatacgacattgggggaggaaagacagagcaggggagaactggaagacgagcccgccactgtcccatgcagccagggttgggagtacgaccatagtgagttcagttccaccatcgcgaccgaatcacagtgggacctggtgtgcgagcagaaagggctgaaccgggctgcctcaaccttttttttcgctggcgttcttgtgggagcggttgctttcgggtatctaagcgatcgctttggccggcgccgactgctgttagtcgcctatgtgtctacgctcgtattaggcctcgcgagtgctgcgtctgtctcatacgttatgtttgcaatcacccggaccctcacgggcagcgcacttgctggcttcacaattatcgtgatgcctctagaactggagtggctggacgtagagcacagaacagtagctggtgtgctgtcctcaactttctggaccggtggagtcatgttgctggccttggtaggttatctgatcagggattggagatggcttttactcgcggtgacactgccatgtgctcctgggatactgtccctgtggtgggtgccagaaagtgcccgctggcttctcacccaaggccatgtgaaggaggcccaccggtatcttcttcactgcgcacggctgaatgggcgccccgtttgcgaggattcctttagccaggaggcagtgtccaaggtggctgccggagaaagggtagtgcgacgcccatcgtaccttgatttgtttaggacgccaagactccgtcatatctcactgtgctgtgtcgtcgtctggtttggagttaatttctcttattatggactaagcctggatgtaagtgggcttggtctaaacgtgtatcagactcaactgctgttcggcgctgtggagttgcccagtaaactgctcgtatacctcagtgtaaggtacgccggacgcagactgacacaggcgggcacgctcctgggtaccgcactggcgtttggcactaggctgctggttagctcggatatgaagtcatggtctacagttctggcagttatgggtaaggccttcagcgaggcagcatttaccaccgcctatctctttacaagtgagttgtaccccaccgtacttagacagaccgggatgggccttaccgctttggtcgggcgcctaggtggaagtctcgctcccctggcagctctgctggacggcgtgtggctctcgctccctaaactcacctatgggggaatcgcattactggcggctggtacggcactgctgttgcccgagacccgccaggcccagctgcctgaaactatacaggacgttgagcggaagagcgcccccacttccctgcaggaagaagagatgcccatgaagcaggtccagaactag

SEQ ID NO: 205765 - DNA, 1641 bp, synthetic construct
  misc_feature 1..1641: note = Description of Artificial Sequence: Synthetic coding sequence
  source 1..1641: mol_type = other DNA
atgggcttcgaggagctgctggagcaggtgggcggcttcggcccctttcaattgaggaatgtcgcactgctggccctcccaagggtcctgctgccattgcacttccttcttccaatcttcctcgccgctgttcctgctcatcgttgcgcgctgcctggcgctccagcaaacttctcccatcaggatgtgtggttggaggcccacttgccaagagaaccggacggcaccctgtcctcctgcctgaggttcgcatacccgcaggccctgcccaatacgactctcggtgaggaacgccagtcgcgaggagaactggaggatgaacccgccaccgtgccctgttctcaaggctgggagtacgatcattcagaattttcgtccaccatagcaactgaatgggacctggtgtgcgaacaaaaaggccttaaccgagctgcaagtacctttttctttgccggggtgctggtgggtgccgtagccttcgggtatctcagcgatagattcgggcggcgcaggctgctgctagttgcttacgtgagtactcttgtgcttgggctagcttctgctgcctctgtcagctacgttatgttcgccattactcgtaccctgactggcagtgccttggctggtttcactataattgtcatgcctttagagctcgaatggttagatgtcgagcaccgcaccgttgccggagtcctcagttccacgttctggaccggcggcgttatgctattagcgctggtggggtaccttattcgggactggcgatggctgcttttggccgtcacactcccttgcgccccaggtattctgtctctttggtgggtgccagagagcgctagatggctcctcactcagggacatgtgaaagaggcacaccggtacctcctccattgcgcccgcctgaacgggcgaccggtgtgcgaggactcgtttagtcaagaggccgtttccaaagttgctgccggggaacgggtggtaagacgaccttcctacctggatctgtttcggacaccgcgtttaaggcatattagtctgtgttgtgtggtagtgtggtttggcgtgaacttctcttactatggactgtccctggatgtatccggtctcggcctgaatgtctaccaaacccaactgctctttggcgctgttgagctgccctccaaactgctcgtgtacctgagcgtgagatacgctgggcgcagactgactcaggctggcactctcttggggaccgccctggcttttgggactcggctccttgtatcttcggacatgaaatcatggtctacagtgctcgcagtgatgggaaaggcattcagtgaagccgcattcacaacagcctacttgtttacctctgagttgtaccctaccgtgttaaggcagactggaatgggtttgaccgcactagtcgggaggttgggtggcagcctggcccctcttgcagctctcctggatggtgtgtggctgtcacttccgaaattaacatacgggggcattgcactgctggccgccggcacagccttactcctgccggagacaagacaagcccagctccctgagacgattcaggatgttgagcggaaatcagctcctacttccctgcaggaggaggaaatgcccatgaagcaagtccagaactag

SEQ ID NO: 205766 - DNA, 636 bp, synthetic construct
  misc_feature 1..636: note = Description of Artificial Sequence: Synthetic coding sequence
  source 1..636: mol_type = other DNA
atgctgcagccccacctgctgccctaccaggccgtgagcaaggtggcagccggggagcgggtcgtgcgtaggccatcgtacctggatctgtttcggactccccgactccggcacatcagcttatgttgtgtcgttgtctggtttggtgtcaacttttcatattacggcttgagtctggatgtgagcggtttggggctgaacgtctatcagacacagctcctgttcggggccgtcgagttaccatctaaactcctggtctatctgagtgtcaggtacgcgggcaggcgacttacacaggccggcaccttgctgggcacagctctggcctttggtacccggctgttggtatcctctgatatgaagagttggtctacagtgctcgctgtcatgggcaaagcgttttcagaagctgcctttacaacggcttatctctttacaagtgagttatatccgacagtgctacgccaaacaggcatgggcttgacagcattagtggggagactgggaggcagtctcgccccactggcagccctgctggatggtgtttggttgagtctgcccaaactaacttacggaggcattgccctccttgccgcagggactgctctgttattacccgaaaccaggcaggcctag

SEQ ID NO: 205767 - DNA, 837 bp, synthetic construct
  misc_feature 1..837: note = Description of Artificial Sequence: Synthetic coding sequence
  source 1..837: mol_type = other DNA
atgggcttcgaggagctgctggagcaggtgggcggcttcggccccttccaattacgcaacgtggccctgctcgcgctaccgagggttcttcttcccctccactttctgcttcccattttcctcgcggctgtcccggcacacagatgcgctctccctggggcgcctgcaaacttttcacatcaggacgtctggttagaggcacacctgcctagggaacccgacggcactctgagcagctgtctaaggttcgcctacccccaggctctccccaataccaccctgggagaggagcgccagtcccggggagagctggaggatgaacctgcaactgttccatgctcacaaggttgggaatatgaccatagcgagttcagctcaactatagcaacagaaagccaggtcgggatctatataatccacctggaggtagaatgtcgatggagacagagtccttgggaggctgccgggagaggcctgccttgggaagaggcagaggccgctggacttggtcgtgacaaagtctcctattctccttcatggagagaatcactgggcggtctgctgagcggaatggaatgggatctggtctgtgagcagaaaggactgaacagggccgccagcaccttcttttttgcaggagttctggtaggagcggtggcattcggctatcttagcgatcgatttggccgtcgccgcctacttctcgtggcctatgtgagcactctagtgctgggactcgcaagcgcagccagtgtgtcctacgtgatgttcgctattacccgcactcttacaggcagcgctctggccggattcaccatcatcgttatgcccctatag

SEQ ID NO: 205768 - DNA, 444 bp, synthetic construct
  misc_feature 1..444: note = Description of Artificial Sequence: Synthetic coding sequence
  source 1..444: mol_type = other DNA
atggagtgggacctggtgtgcgagcagaagggcctgaaccgggccgctagtaccttcttttttgccggtgtcctggtcggcgctgtcgccttcggctacctgagtgatcggtttggaagaaggcgcctgctgctggtggcctacgtcagtactctggttttgggactagcatccgctgcctccgtgagctatgtgatgttcgccataactcgcaccctaaccggcagcgctttagcaggctttactatcatcgtaatgccgctaggggaggccgaacttgaatggctggatgtggagcatcggaccgtggccggcgtcctgtccagcacgttctggacagggggagtgatgctccttgccctggtgggatacttgatcagggattggaggtggcttctgctggctgtaaccctgccgtgcgcaccaggaattctttcactctag

SEQ ID NO: 205769 - DNA, 1629 bp, synthetic construct
  misc_feature 1..1629: note = Description of Artificial Sequence: Synthetic coding sequence
  source 1..1629: mol_type = other DNA
atgaccttcagcgagatcctggaccgggtgggcagcatgggccactttcagttcctgcacgtggccatcttgggcctgccaatcttgaacatggccaaccataatctgctccagatctttactgcagcaacacccgtgcaccactgcaggccgcctcataatgcctctactgggccgtgggtcttgcctatgggtcccaacggaaagcccgagaggtgtctgagattcgtgcacccccccaatgccagtttaccaaatgacactcagagggccatggagccgtgcctagatggatgggtctacaatagtaccaaagattccattgtcacggaatgggacttagtgtgtaattctaacaagcttaaggagatggcacagagtatatttatggccggcatcctgattggtgggctagttttgggtgacttgtcagaccggttcggaaggcgccccattctgacctgctcatatttgcttctagcagcctctggaagtggcgctgcattttcccccacatttcccatctacatggtctttagatttctgtgcggctttggaattagtggcatcactttatccactgtgatcttaaatgtagagtgggtcccaaccaggatgcgagcgatcatgtcgaccgctctaggctactgctatacgtttggccagttcatcctgcccggcctggcctacgctatcccccagtggagatggctacagctgaccgtgtcaattccattctttgtattcttcttgagctcttggtggacacccgagagcatacgctggttagttttatctggcaaatccagcaaggcactaaagatcctcagaagagtggcagtttttaacggcaaaaaggaggaaggagagaggctaagcttggaggaactgaagctcaacctccaaaaggaaatcagtctagccaaagccaaatatactgcgtccgacctctttcgaatcccaatgctgcgacgaatgacattctgtctgtcccttgcctggtttgctaccggattcgcctactattcactagccatgggcgtagaggagtttggagtgaacctttacatcctccagataatcttcgggggtgtggatgtgcctgctaagtttataaccatcctgtcactgtcctacttgggccggcatactacgcaggctgctgcgctgctgctagctggaggagcgatattagcccttacatttgttcccctagatttacagaccgtgcgtacggtgctggccgtgttcggtaaggggtgtctgtctagctctttcagctgcttgtttctctatacctccgaactctatccaacagtcattagacagaccggcatgggggtcagtaatttgtggacccgagtcggcagcatggtgagcccattggtgaagataaccggtgaagtgcagcctttcattcccaatattatatatggaataaccgccttgcttggaggctctgctgcccttttcctgcctgaaacactgaaccagccactcccagagactatcgaggatctggagaattggtccttgagagccaagaaacctaaacaggaaccagaggtcgagaaggcctcccagcggattcccctccagcctcacggccctggcctggggtcctcctag

SEQ ID NO: 205770 - DNA, 1629 bp, synthetic construct
  misc_feature 1..1629: note = Description of Artificial Sequence: Synthetic coding sequence
  source 1..1629: mol_type = other DNA
atgaccttcagcgagatcctggaccgggtgggcagcatgggccacttccagttcctgcacgtcgctatcctcgggctgcccatactgaacatggccaaccataatctcctccaaatcttcaccgccgccacacccgttcaccactgtcgaccaccccacaacgcctctacgggtccctgggtgctgcctatgggcccaaacgggaagccagagaggtgcctcagattcgtgcacccaccaaacgcttccctgcccaatgatacacagcgcgccatggaaccttgcctggacggatgggtttataactcgaccaaagattcaattgtgacagagtgggacctagtgtgtaattctaataagctgaaggagatggctcagtctattttcatggcagggattttgatcggcggtctggtgttgggtgatctatccgatcgatttggacgaaggcccattctgacctgcagctaccttctcctggccgcgtccggctcaggtgccgccttcagcccgaccttccccatatacatggttttccggtttctgtgtggctttggcattagcggaatcaccctgtctaccgtgattttaaatgtagagtgggtgccaacccgcatgcgcgccattatgtccaccgccctcggctactgttatactttcgggcaattcattcttcccggactggcctacgccatcccacagtggcgctggcttcagttaacagtgagcattccatttttcgtttttttccttagctcctggtggactccagaatctattagatggctggttctcagtggtaaaagttccaaggctctcaagattctgagacgggttgcagtgttcaatggcaaaaaagaggagggcgaaagattgtcccttgaggaactgaaactgaacctgcagaaggagatttcccttgcaaaggctaagtatacagcctctgacctgtttagaatccccatgcttcggcgcatgaccttctgcttgagtttagcatggtttgctaccggctttgcttattactcactggcaatgggggtggaagagtttggagtaaatttatacatcctgcagatcatttttggcggtgtggacgtgcccgccaagtttatcactatcctcagcctgagctatctcggccgccacaccactcaagctgccgcccttctactggccggaggggctattctcgcactaactttcgtgcctctggatctgcaaactgtgcgcaccgttttggctgtgttcgggaagggatgtcttagcagttcattcagttgcctttttctgtacaccagtgagttataccctacggttatcagacagacaggcatgggtgtttctaatctttggaccagagtaggatctatggtctctcctctggtgaagataactggagaggtccaaccctttatccctaacatcatttatgggataactgctctcctgggcggatccgccgctctttttctccctgaaactttaaatcaacctctgcctgaaacaattgaggatttggagaactggagtttacgtgcaaagaaaccaaagcaggagccagaggtggagaaagctagtcagagaatacctctgcagccccacgggcctgggctgggatccagctag

SEQ ID NO: 205771 - DNA, 1587 bp, synthetic construct
  misc_feature 1..1587: note = Description of Artificial Sequence: Synthetic coding sequence
  source 1..1587: mol_type = other DNA
atgaccttcagcgagatcctggaccgggtgggcagcatgggccactttcagttcctgcatgtggcgattctcggcctgccgatactcaacatggctaaccactgtcgcccaccccacaacgcaagtacgggcccatgggtcctccctatgggacctaatggcaagccagaacgttgtttacggtttgtccatcccccaaatgccagtctgccaaacgacacacagagagccatggagccctgccttgacggatgggtttacaatagtactaaggacagtattgtcaccgagtgggatctggtctgtaacagtaataaactgaaggaaatggctcaatcgatttttatggccggaatccttattggaggactggtgcttggggacctgagtgatcggtttggcaggcgcccgatcctcacctgtagttacttattgcttgccgcatccggctctggagcagcatttagtcccaccttccccatctacatggtttttcggtttctctgcggatttggcatcagcgggatcacgcttagtactgtcatcctgaacgtggaatgggtccccacccgtatgcgcgctatcatgtcaaccgccctgggctactgctacacattcggccagtttatccttcccgggcttgcttacgcaatccctcaatggcgctggttgcagctgacagtgagcatccctttcttcgtgttcttccttagctcctggtggacgcctgagagcatacgttggcttgtgctcagcggcaagtcctcaaaggcactcaagatcctgcgtcgggtggctgtgttcaatgggaaaaaagaagaaggcgagaggctgtcgctcgaggagctgaagctcaatctccagaaagagatcagccttgcgaaggccaaatacaccgctagcgacctttttagaatccccatgttgaggaggatgactttttgcttatcacttgcgtggtttgctacaggctttgcttattatagcttggccatgggcgtagaagaattcggggtgaatctctacatccttcaaattatcttcggaggcgtggacgttcctgctaagtttataactattctgtccttatcctacctggggaggcacacaacacaggcagctgctctgctcctggccggaggggccattcttgccctaacctttgttcctttggatcttcagacagtgaggaccgtcttggcagtgttcggtaagggttgcctcagcagcagcttctcatgtttatttctctatacaagcgaactgtatcccacagtgattagacagaccggcatgggagtcagcaatctttggacgagggtcggatctatggtgtcccccctggttaagatcaccggcgaggttcaaccatttattccaaacattatatatggaattaccgctctcctggggggatctgcagccctgtttttgccagaaaccctaaatcagccattaccagaaactatcgaagatcttgagaattggtccttgagagcaaaaaaacccaagcaagagcctgaagtcgaaaaagcatctcagcggattcccctccagcctcacgggccaggcctggggagcagttag

SEQ ID NO: 205772 - DNA, 1653 bp, synthetic construct
  misc_feature 1..1653: note = Description of Artificial Sequence: Synthetic coding sequence
  source 1..1653: mol_type = other DNA
atggccttcagcaagctgctggagcaggccggcggcgtgggcctgtttcaaacgctgcaggtgctgacctttatcctcccgtgcctgatgattcccagccagatgctcctggaaaacttttcggccgccatccctgggcaccggtgttggactcatatgctggacaacgggtccgcagtgtctaccaatatgacccctaaggcgctactaactatttccatccctccggggcccaaccagggaccacaccaatgcaggcggtttcggcagccccagtggcagctgctcgacccgaacgctacagctactagctggagtgaggcagataccgagccctgtgtggacggctgggtctatgatcgtagcgtgttcacttcaacaatcgtagcaaagtgggatctggtatgcagcagccagggactgaagccactctcccaatccatctttatgagcggcattctggtcggatccttcatttggggactactttcataccggttcggcagaaagccaatgttgtcttggtgctgcttacaactggccgttgccggtacctctaccatctttgcacctactttcgttatatactgtggccttcgcttcgtggctgcattcggcatggcaggcattttcctgtccagtctgacactgatggtggaatggactaccacctcccgccgcgccgttacgatgaccgtggtgggatgcgctttctctgctggccaggcggccctgggcggtctcgccttcgccctgcgagactggcgcacgttacagttagccgcctcagttcctttttttgctatctctctgatttcatggtggctaccggaatccgcaaggtggctcatcataaaagggaaacccgaccaggctctgcaggaattaagaaaggtggcacgcatcaacggtcacaaggaggccaagaaccttaccatagaggttctgatgtctagtgtgaaagaggaagtggcgagcgccaaagagcctcggtctgttctcgacttgttttgtgttcctgtcttgagatggcgctcctgtgctatgctcgtggtcaactttagtcttttaatcagctactatgggttagtctttgacctgcaaagcctagggcgggacatattcctgctgcaggctttatttggtgctgtggatttcctggggcgagctactacagcactgctgctgagtttcctgggcaggcggactattcaggctggctcacaagccatggccggactggccatactagcaaatatgcttgtaccacaggatctgcaaacactgcgagtggtttttgctgtcttgggtaaaggttgcttcggcatctctctcacttgtctgaccatctacaaagctgaactgtttccaacgccagtgagaatgactgccgatggcatcctgcacacagttgggcggttaggcgctatgatgggccctcttatccttatgtctaggcaggcactgccactcctgcccccgctgctgtacggtgtgatcagtatcgcgagcagtctggtggtattgttcttcctcccagagacacaaggactgccactgcccgacaccatccaggacctcgagtcccagaagtcgaccgccgctcagggcaatcgtcaggaggccgttacagtcgagagtacctcactgtag

SEQ ID NO: 205773 - DNA, 1338 bp, synthetic construct
  misc_feature 1..1338: note = Description of Artificial Sequence: Synthetic coding sequence
  source 1..1338: mol_type = other DNA
atggccttcagcgagctgctggacctggtgggcggcctgggccggttccaggtgcttcaaacaatggcactgatggtgagcatcatgtggctgtgtacccagtcgatgttggagaatttttccgctgctgtgccctcacaccggtgttgggcacctcttctcgataattccactgcccaagcttcaattctgggttctctgtcccccgaagcacttttggccatcagtatcccccccggcccaaaccagaggcctcatcaatgtcggaggttccgacagcctcagtggcagttactagaccccaatgctaccgccacctcctggagcgaggccgacaccgagccttgcgttgacgggtgggtctacgatcggtctatttttacttcaaccattgttgcaaagtggaatttggtctgcgactcccatgccttgaaacctatggcccagtcaatctacctggccggcattcttgttggggctgccgcgtgcggaccagcttccgaccgctggttggctgagtcagctagatggctcctgaccactggtcggctcgactggggacttcaagaactgtggcgggtggccgcaatcaatgggaaaggggccgtgcaggacaccctaacaccagaggtattgttgtcagctatgagggaggagctgtcaatgggacagccccccgcgtcactcgggactctgcttaggatgccaggtctgaggttccgaacctgtatctctacactgtgctggtttgccttcggtttcaccttcttcggcttggcgctagatctgcaggctctgggctctaatatctttctgttgcaaatgttcataggagtggtggacattccagccaagatgggcgctctcctattgctctcccacctagggaggaggccgacgctggctgcgtccctgttgctggctggcctatgcatccttgctaatacgttagtcccccacgagatgggcgcccttagatccgctctggccgtactcggactgggaggggtaggagctgcctttacctgcattacaatctattccagcgaactatttccgacggttctgcggatgaccgcggttggccttgggcagatggccgctaggggcggagccatccttggcccactggttcggctgctcggggtccacggcccttggctgcccctgctggtgtacggaacggtgcccgtcctgagtggactagcggccctgctgctgccggaaacacagagcctgcccctccccgatacgatccaggacgtgcaaaatcaagctgtcaaaaaggcgactcacggaacattgggaaactcagttcttaaaagcactcagttttag

SEQ ID NO: 205774 - DNA, 1662 bp, synthetic construct
  misc_feature 1..1662: note = Description of Artificial Sequence: Synthetic coding sequence
  source 1..1662: mol_type = other DNA
atggccttcagcgagctgctggacctggtgggcggcctgggccggttccaggtcctccaaactatggctttgatggtcagtatcatgtggctctgcactcaaagtatgctggagaattttagcgccgctgtgccaagtcatcgctgttgggccccattgctggacaacagcacggcccaggcatccattctaggaagcctgtcccccgaggctttgctggcgatctctattcctcccgggcctaaccaacggccacatcagtgccgtcgctttaggcagccgcagtggcagttattagaccctaacgctaccgccactagctggagcgaagccgatacagagccatgtgttgatggatgggtctatgatcggagtatttttacatctaccatcgtggcaaagtggaacctggtgtgtgattctcatgcgctcaagcccatggcccagagcatctatctcgcaggtattctggtcggcgccgctgcctgcgggcccgcctctgatcgattcggccgccgactggtcttgacatggtcttacttgcagatggccgtaatgggcaccgcggctgcatttgccccagcattccccgtgtactgtctgttccgattcctgctagcattcgccgtcgccggcgtcatgatgaacactggcacgctcctgatggagtggactgccgcccgcgcacgccccctcgtgatgactctgaacagtctggggttcagcttcggccacggactgaccgctgcagttgcatacggtgtcagagactggactctgttgcagctggtggttagcgtacctttctttctgtgcttcctttattcatggtggctggcggagagcgcaaggtggctgctgaccacggggcggctcgactggggactccaagaactctggagagtggctgccattaatgggaagggggcagtacaggacacccttacgccagaagtactgctgtctgccatgagagaagaactcagcatgggacagcccccagcgtcactggggactcttctgagaatgccaggcttgagattccgtacgtgtatcagcactctgtgctggtttgccttcggctttaccttctttgggctggccctggacttacaagctctaggaagcaacatcttcctcctacagatgttcatcggggtggtcgatattcctgcgaagatgggagcgctgcttctcttgagccatctgggtagaaggcccaccctggctgcctctcttctactcgctggcctctgcatcctggctaacacgcttgtgcctcacgagatgggggcgctgcgaagcgcactcgccgtgttggggctgggaggggtcggtgccgcttttacctgtatcactatctacagcagtgaactgttccccactgtgctgcgcatgactgccgtgggtctggggcaaatggcagctcgtggcggcgctattttgggtcctctcgttaggttattgggcgtgcacggcccttggctccccctgctggtttatggcacggtcccagttttgtcaggtctggcagcgcttctgcttcctgagacccagtctctccctcttccggacactatacaggacgtccaaaaccaagccgtgaagaaggcaacacacggaactttggggaacagcgtgctaaaatctactcagttctag

SEQ ID NO: 205775 - DNA, 999 bp, synthetic construct
  misc_feature 1..999: note = Description of Artificial Sequence: Synthetic coding sequence
  source 1..999: mol_type = other DNA
atggagtggaccgccgcccgggcccggcccctggtgatgaccctgaactccctgggtttctcctttgggcacggcctcacagccgctgtagcctatggagtcagagattggactttgctgcagctggtggtgtccgtgccattttttctgtgctttttatatagctggtggctggccgaaagtgccagatggttgctcaccactggccgcctggattggggtctgcaggagctttggcgagtagctgccatcaatggaaaaggagccgtccaggacactctaacacccgaagtcttgctgagcgcgatgagagaggagctttccatgggccagccccccgcaagtctcgggaccctgctacgcatgcctggactgaggtttagaacctgcatttctaccttgtgctggttcgctttcggatttaccttttttggcttggcccttgacctccaggcgttggggagtaatatctttctgctgcagatgttcattggagtggtggacatccccgctaagatgggtgcacttttgctgctttctcacctggggagacgtccaacgctcgcagcatccttactcctggctggcctgtgtattctggcaaacaccctggttccccatgagatgggagcattgcgaagcgctctggctgtactggggttaggcggagtaggggctgcttttacctgtatcacgatttatagcagtgagcttttcccgacggtcctcaggatgaccgccgtggggcttggtcagatggcagcgcgcggaggtgccattctgggaccactcgtgcgtctactaggagtgcatggcccctggctgcccctcctcgtctatgggaccgttcccgttctgtcaggcttggccgcattactgttacctgagacccaatcactgcctctccctgatacaattcaggatgtgcagaaccaggccgtgaagaaggccacccatggcaccctcggcaatagcgtcctcaagagtacgcagttctag

SEQ ID NO: 205776 - DNA, 1665 bp, synthetic construct
  misc_feature 1..1665: note = Description of Artificial Sequence: Synthetic coding sequence
  source 1..1665: mol_type = other DNA
atgcccaccgtggacgacatcctggagcaggtgggcgagagcggctggttccagaagcaggcttttctgattctgtgtctactttctgcagcatttgcccctatctgcgtgggaatagttttcctcgggtttacccccgatcaccattgtcagtcacccggggtagcggagctgtctcaacgctgtgggtggagccccgctgaggagctgaactatacagtccccggcttgggacctgccggtgaagcctttcttggccaatgccgaaggtatgaggtggactggaaccagtctgccctgagctgtgttgatcccctagcatccctggctactaaccgtagtcacctgccactcggtccatgccaggatggttgggtctacgacacccctggcagctctattgttaccgagtttaatctggtgtgtgccgattcttggaagctggatcttttccagagctgcctgaacgcaggattcctattcggttccctgggcgtgggatatttcgccgaccggtttggccgcaaactgtgtctgcttggcactgttctggtgaatgccgtcagtggcgttctgatggcttttagtccaaattacatgtccatgttactatttagactccttcagggactggtatcaaaaggtaactggatggcaggatacactctgattaccgaatttgtcggatctgggtcaaggcggacggtcgccatcatgtatcagatggccttcactgtgggattggtcgcactgaccggactcgcttatgcactaccccattggcgctggctgcagttagcagtgagccttcctacctttctgttcttgctgtattactggtgtgttccagagagcccgaggtggcttctgagccagaagagaaatacagaggctatcaaaataatggaccatatcgcacagaagaacgggaagctgcctcccgcggatcttaagatgcttagtctcgaggaagatgttacggaaaaattgtcacctagctttgccgacctattccgaacgccccgcttacggaaacggacctttattctgatgtatctatggtttaccgacagtgtgctgtatcaaggtctcattctgcacatgggcgcaaccagtggaaatctctacctcgatttcctgtattcagccctggtcgaaatacctggggcattcattgctttgatcaccatcgaccgcgttggacgcatctaccctatggcaatgagcaatctgctggcaggcgctgcatgcctggtgatgatatttatctccccagatcttcattggctgaacatcatcatcatgtgcgtgggaagaatgggaatcacaattgctattcagatgatttgcctggtgaatgccgagctgtatcccacgtttgtgagaaaccttggggtgatggtttgttcctcactgtgcgacatcggcggcattatcactcccttcattgtcttcaggctacgggaggtgtggcaggcactccctttgattctctttgccgtcttaggattgctggccgccggcgtaacactgttgctacccgagacgaagggagtagccctgcccgagacaatgaaagatgccgaaaacctggggcgcaaagcaaagcctaaggagaacactatttacctcaaagtgcagactagcgaaccttcagggacatag

SEQ ID NO: 205777 - DNA, 1005 bp, synthetic construct
  misc_feature 1..1005: note = Description of Artificial Sequence: Synthetic coding sequence
  source 1..1005: mol_type = other DNA
atgttcttcctgctggccctgctgagcgccaccttcgcccccatctacgtgggaattgttttcctggggtttacccccgaccaccgctgcagatcccctggagtggccgaattgagcttgcgctgcggctggtctccagcagaagagctgaactatacagtgccagggcccgggccagccggcgaagcctctccccgccagtgcaggcggtacgaggtcgactggaaccaatccaccttcgattgcgtggaccccctggcttctttggataccaatcggtcccgactccctttggggccatgtagggacggttgggtttacgaaacccctggcagctccatcgtgacggaattcaacttggtctgcgccaattcatggatgcttgacttatttcagagcagtgtcaatgtcggattctttattggttctatgtccatcggctatattgctgatagatttggtcggaagctctgtctcttaacgaccgtactgatcaacgcagctgcgggagtgttgatggccatatcccctacatacacctggatgctgattttcaggttgattcagggcctggtcagcaaggcaggttggctgatcggctatatactgataaccgagttcgtcggtcgtcgatacagaagaacagtgggcatcttctatcaggtggcctataccgtcggtcttttggtcctagctggcgtagcttacgccttacctcactggcgatggctgcagttcacagtgtcccttcctaacttttttttccttctctattattggtgtattcctgagtccccacggtggctcatctcgcagaacaagaacgccgaggccatgaggattatcaagcacatcgcaaagaagaatggtaaaagcctaccggcatcgctgcagagactgcgcctcgaggaggagacaggaaaaaagctgaatccatcttttctcgacctggtaagaacacctcagattcgaaagcacaccatgatactgatgtacaattggtag

SEQ ID NO: 205778 - DNA, 1668 bp, synthetic construct
  misc_feature 1..1668: note = Description of Artificial Sequence: Synthetic coding sequence
  source 1..1668: mol_type = other DNA
atgcccaccaccgtggacgacgtgctggagcacggcggcgagttccatttttttcagaaacagatgttcttcttgctggcgctgctcagtgctacgttcgcaccaatctatgtggggattgtatttttggggtttacacccgaccatcggtgcagaagcccaggcgtcgcagagctgtccctccggtgtggctggtcacccgcggaggagctgaactatacggtacctggacctgggccggccggcgaggccagcccccgtcagtgtcggaggtacgaggtagactggaaccagtccacgttcgattgtgtggatcccctggcttctctggatacaaacagatcacgactcccactcggcccctgtcgagatggatgggtgtacgaaacgcccggcagcagcattgtgactgagttcaacctggtttgcgcaaactcatggatgcttgacctcttccaatcgtccgtgaacgtcggcttttttataggatcaatgtccatcgggtacatcgctgatcggttcgggaggaagctgtgcctgcttactactgtactgattaatgccgccgctggtgtgcttatggcaatatctcccacgtatacatggatgcttatctttaggttaattcagggactggtctccaaggcgggctggttgattggctacattctcattaccgagttcgttggacgccgatacaggagaactgtgggtatattctaccaggtggcatacacggttggactgctggtgctggccggagtagcatatgctctgcctcactggcggtggttacaatttacagttagcctccctaactttttctttttgctgtactattggtgcatccccgagtccccacggtggctgatctctcagaacaagaatgccgaagccatgcggataattaaacatatagccaagaaaaacggcaagtcgctcccagcctctctgcagcgcctgcgtttggaagaagagaccggaaagaagctgaacccttctttcttggatttggtccgcaccccgcaaattagaaagcatactatgattctgatgtataattggtttacctcaagcgtactctaccaaggcctgattatgcacatggggctcgccggcgataatatctacctcgatttcttttacagtgccctcgtcgaatttccagcagcttttatgataatcctgaccattgaccgaatcggacgtcggtacccttgggccgcctctaatatggtcgcaggggccgcctgtctcgctagcgtctttatccccggggatctgcagtggttgaaaataatcattagttgtctggggcgtatgggcatcaccatggcctatgagatcgtgtgtctcgtaaacgccgagctataccctacattcatcaggaacctgggtgtccacatttgtagctctatgtgcgatatcggaggcatcataactccctttctcgtgtacagactgactaatatatggctcgagctgcccctcatggtgtttggcgtgcttggcctggtggctggcggactggtcctgctgctccccgagaccaagggtaaagccctaccagaaaccatcgaggaggcggagaatatgcagagaccaaggaaaaacaaagaaaaaatgatatatctgcaagtccaaaaactcgacattccattaaattag

SEQ ID NO: 205779 - DNA, 1632 bp, synthetic construct
  misc_feature 1..1632: note = Description of Artificial Sequence: Synthetic coding sequence
  source 1..1632: mol_type = other DNA
atgcggaccctgcacgccgtgagccacccctacagcaacagcatgaggtttcagagagtgctgtatttcatatgtgcatttcagaatatatcttgcggaatacattaccttgccagcgtgttcatgggcgtgacacctcatcacgtgtgcaggccccccggaaatctccagaatggagagatttgggaattatctaggtgtagtagaaacaaaagggagaacacatcatcccttggctacgaatataccggaagcaagaaagaattcccttgtgttgacgggtacatctacgaccaaaacacctggaagtctactgcagtcacccagtggaatcttgtgtgcgacaggaagtggctcgcaatgctaatccagccactgtttatgtttggcgtgctgcttggctcagtcactttcgggtacttctccgaccggctgggcagacgtgttgtgctctgggcaacctcaagcagtatgtttctttttggaattgcagctgcatttgcagtcgactattatacttttatggccgcccgcttcttcctggccatggttgcaagtggatatttggtggttggatttgtatatgttatggagtttatcggaatgaagagtcggacatgggcctccgttcacctgcattcgtttttcgctgtgggaacacttttggtagccctgacaggctatctggtcagaacttggtggttataccagatgatcctttcaactgtgaccgttccgtttattctttgctgctgggtactaccagagactccattttggctcctgtccgagggcagatacgaggaggctcagaagattgttgatataatggccaagtggaatcgtgcctccagctgtaagttaagtgagctgctgtcattagatctgcagggcccagttagcaactctcccacagaggtccaaaagcataacctgtcctacctgttctacaattggagcattaccaaacggaccctaaccgtgtggctgatctggtttacaggttccttaggattctatagtttctccctgaacagcgtgaacctcgggggaaacgaatacctcaatctttttctccttggcgtggtggagatcccagcttataccttcgtttgtattgctatggacaaagtggggcgccgcaccgtgttggcttactccctgttctgtagcgctcttgcttgcggagttgtgatggtcatcccacagaaacattacattctgggcgtcgtgactgccatggtggggaaattcgcaataggcgccgcattcggcttgatttacctatatacagcagagctgtacccaacaatagttaggtctctggcggtgggatcaggtagcatggtctgcaggctggctagcatcctggcgcccttcagtgtggatctgtcctccatatggatcttcatccctcagctgtttgttggcactatggccttgctgagcggagtgctgacgcttaagctgccagaaactctgggcaaacggctggctaccacttgggaggaggctgccaagttggagtccgagaacgagtctaagtcctccaaactacttctcactacaaataattctggactcgagaagaccgaagccattacaccacgagattccgggctgggagaatag

SEQ ID NO: 205780 - DNA, 1734 bp, synthetic construct
  misc_feature 1..1734: note = Description of Artificial Sequence: Synthetic coding sequence
  source 1..1734: mol_type = other DNA
atgggcagccggcacttcgagggcatctacgaccacgtgggccacttcggccgctttcaacgagtactctattttatttgtgcgtttcagaacatatcctgcggcatccactatttagcaagtgtgtttatgggcgtcaccccccaccacgtctgtaggcctccgggaaacgtaagtcaagtggtttttcacaaccacagcaactggagtctggaagacacaggtgcgctgctgtcctctggacaaaaggactacgtgacagtccagttgcagaacggcgagatctgggagctgtcaaggtgtagccgcaataagagggaaaacaccagcagtctgggatacgagtatactggctcaaagaaggagttcccatgcgtggacggctacatatacgatcaaaatacctggaagtctactgctgttactcagtggaacttagtgtgcgatagaaaatggttggctatgctgatccagcccctgtttatgttcggagtattgctgggttcagttacatttgggtacttctcggatagacttggtaggcgcgtggttctttgggcaacatcatcctccatgtttctgttcggcatagcggctgcttttgcagtggattactacacgttcatggctgcgcgttttttcctggctatggtggcctcagggtatctcgttgttggttttgtttatgtgatggagttcatcggcatgaagtctcgcacttgggctagtgtgcaccttcactcattttttgctgtggggaccttgctggtggcgctgaccggctaccttgtgcgcacgtggtggctatatcagatgattctatcaacagtcacagtgcctttcattttgtgctgctgggtactgcctgagacccctttttggctcctcagtgaggggcgatatgaggaggcccaaaagatcgtcgacatcatggccaagtggaatcgcgcaagctcatgtaagctgagtgagttgctgagtttggacttacaaggtcctgtgagcaacagtcctacggaggtccaaaagcataacctatcgtatctcttttataattggagtataaccaagcggactctcaccgtgtggctgatctggttcactggatctctgggcttttattccttctccctcaacagcgtcaatttaggcggaaatgaatacttgaatttgtttctgctgggggttgtagagatccccgcttataccttcgtgtgcattgccatggacaaggtcggtcggagaactgtgctggcttactccctgttctgctcagccttagcatgcggagtggttatggtcatcccccaaaagcactatatactgggggtggtgaccgctatggttggaaaatttgcgattggtgctgcctttgggctcatttacctttataccgcagagctgtatcctaccatcgtgcgctctttagcggtcgggtcaggttctatggtctgccgcctggcgtctattctcgcccctttttccgttgacctctcttctatatggatcttcataccacagctgtttgtaggcaccatggccctgttgtcaggagtgttgaccctgaaactgcccgaaacccttgggaaaagattggcgacaacctgggaggaggcagctaagctggaaagcgagaacgagagcaagtcatcgaaactgctgctcactaccaacaattcaggactggagaaaaccgaagctataacgccgagagattccggtctgggggagtag

SEQ ID NO: 205781 - DNA, 525 bp, synthetic construct
  misc_feature 1..525: note = Description of Artificial Sequence: Synthetic coding sequence
  source 1..525: mol_type = other DNA
atgggcgtgaccccccaccacgtgtgccggccccccggcaacgtgtcccaggtcgtgtttcataaccactccaactggagcctggaagacacaggcgccctactgtcctccggtcagaaagattatgttacagttcagcttcagaatggtgaaatctgggaattgtcaaggtgctccaggaacaaaagggagaacacatcctcgctggggtacgaatataccggtagtaaaaaggagtttccttgtgttgatgggtacatctacgatcagaacacttggaaaagtaccgccgtgacccagtggaatctggtctgtgatagaaagtggttagcaatgctcatacagcctttgttcatgttcggggtgctgctcggctctgtgacttttggatacttctccgataggcttggaaggcgggtggtcctgtgggccacctcgtccagcatgtttctgttcggaattgctgcggctttcgcagtggattactatactttcatggcagctagattctttctggctatgtag

SEQ ID NO: 205782 - DNA, 804 bp, synthetic construct
  misc_feature 1..804: note = Description of Artificial Sequence: Synthetic coding sequence
  source 1..804: mol_type = other DNA
atgagcgccggcccccaggccatgctgggccggcgggtggtgctgtgggccacctcctccagcatgttcctgtttggtatcgccgccgctttcgcagttgattactatacgtttatggctgccaggttcttcctggctatggtcgcaagcgggtatctggtggtggggttcgtgtatgtgatggaatttattggcatgaaatcccggacttgggccagtgtgcacctgcattctttctttgccgtgggcactctgcttgtggcgctcacaggttacctcgtgcgcacctggtggttatatcaaatgatcctttctacagtgactgtgcccttcatcctctgctgttgggttttgcctgaaacccccttttggctgctttccgagggcagatacgaagaggcccagaagatcgtagatatcatggcaaagtggaatagagccagttcatgcaagctttccgaactgctcagcctggatctgcagggtcctgtgagtaatagtcctactgaagtacagaaacacaatcttagctacctcttttataactggagcattaccaaaagaactcttaccgtctggctgatttggtttacggggtcccttggcttttattctttctctttgaattccgttaacctaggtggcaatgaatacctgaacctgttcttgcttggcgtagtggagatcccagcctacactttcgtttgcattgcaatggacaaagtgggcagacggaccgttcttgcctacagcctcttctgttccgctctggcatgcggcgtggttatggtaattcctcagtag

SEQ ID NO: 205783 - DNA, 1056 bp, synthetic construct
  misc_feature 1..1056: note = Description of Artificial Sequence: Synthetic coding sequence
  source 1..1056: mol_type = other DNA
atgggcgtgaccccccaccacgtgtgccggccccccggcaacgtgtctcaagttgttttccacaatcattcaaactggtcgctggaggataccggggcattactctctagcggtcagaaggattacgtaactgtgcagctccagaatggagagatttgggaacttagcagatgttctcggaataaaagagagaacacttcctccctgggttatgaatatactgggtccaagaaggaattcccttgcgttgatggctacatttacgatcaaaacacctggaaatcaacggccgtcactcagtggaacttggtttgtgataggaagtggttggctatgctaattcagcccttattcatgtttggagtgctgcttggctccgtcacatttgggtacttcagcgaccgactggggagaagagttgtcttatgggccacaagcagcagcatgttcttatttggaatcgccgccgccttcgcagtggactactataccttcatggcagcccggttcttcttggctatggtggccagtggctatctagtggtaggcttcgtatacgtgatggagttcatcggaatgaaatcaaggacttgggccagcgtccatttacattcgtttttcgcggtcggcaccctcctggtcgcactgactggctacttggtaagaacctggtggctttatcaaatgatcctctcaactgtgacagtgccgttcattctatgttgttgggttctccccgaaacacctttttggcttctgtcggagggccgatacgaggaggcgcaaaagatagtcgatattatggcaaagtggaatagagcctcaagctgcaagctttcggagctgttgagcctcgacctgcagggccccgtgtcaaattctcccactgaggttcagaagcacaatctttcctacctcttctataactggtctataacaaaacgcactttaaccgtctggcttatctggttcacaggttccctgggcttctactctttttctttaaacagtgtaaacctgggaggaaatgagtatctgaacttgttcctgctttag

SEQ ID NO: 205784 - DNA, 1548 bp, synthetic construct
  misc_feature 1..1548: note = Description of Artificial Sequence: Synthetic coding sequence
  source 1..1548: mol_type = other DNA
atgggcagccggcacttcgagggcatctacgaccacgtgggccacttcgggagatttcaacgggtcctctactttatttgtgcatttcaaaatattagttgcggcatccactatttggcaagtgtgtttatgggggttactccacatcacgtatgcagaccccctggcaatgtctcccaggttgtgtttcacaatcacagcaactggtccctggaagacaccggtgctttactgtctagcggtcagaaagactacgtgaccgtgcagctccaaaacggagaaatatgggaactcagtcggtgttccaggaacaagcgggaaaacaccagctctctggggtatgagtatacgggatctaaaaaagaatttccctgcgtcgacggatacatttacgatcagaacacatggaagagtaccgctgtcacgcagtggaacctggtgtgtgacaggaagtggctggctatgctgattcagcccctgtttatgtttggggtgcttctgggaagcgtgacgttcggctatttcagtgaccgcctcggacgacgcgtcgttctctgggccacaagtagttcaatgttcttgtttggaatagcagctgcgtttgccgtcgattattataccttcatggctgcccgattctttttagctatggtcgcttccggatatttagtagtcggatttgtttacgttatggaattcattggtatgaaatcacgaacatgggctagtgtgcaccttcattcctttttcgccgtgggcactctgttggtggccctcacaggttatcttgttcgtacctggtggctgtaccaaatgatcctgtcaaccgtgacagtcccatttatcttatgttgctgggtcctgcctgagacaccattctggcttttgagcgagggaagatatgaagaggcccagaagatcgtcgacattatggctaaatggaatagagcgagttcatgtaagctctcagagttgctctccctcgacctccaggggccggtctcgaactccccaacggaggtgcaaaagcacaacctctcatatctattttacaactggagcattacgaagcggacacttaccgtgtggttgatttggtttaccggtagtttgggcttttatagcttcagtcttaactccgttaacctcggcggcaatgaataccttaacttgttcttgttgggcgtcgtggaaattcccgcttacacctttgtgtgtattgctatggacaaggtaggccggcgaacggtgctcgcctactctctattctgtagtgcactcgcctgcggcgtggtcatggtgattccacaaaagcattatattttgggcgttgtgactgccatggtgggaaagtttgccattggcgccgcttttgggttgatctacctctacaccgccgagttgtaccccaccatcgtgagatctctagcagtgggctcaggcagcatggtgtgtcggctagccagcatactcgcaccattttcagttgacctgtcaagcatttggattttcattcctcagttactaggacagcacctccaggaatag

SEQ ID NO: 205785 - DNA, 1299 bp, synthetic construct
  misc_feature 1..1299: note = Description of Artificial Sequence: Synthetic coding sequence
  source 1..1299: mol_type = other DNA
gactacgtgaccgtgcagctgcagaacggcgagatctgggagctgtcgcgctgctcgcggaacaagagggagaatactagcagcctggggtatgaatacaccggtagtaaaaaggaattcccctgcgtcgacggctacatatacgatcagaatacgtggaagtctacagccgtcacacagtggaatttggtctgcgataggaagtggctcgcaatgctaatccagccattgtttatgtttggcgtactgctcggttctgtgaccttcggctatttctccgacagactaggccggagggttgtactctgggccactagctcttccatgtttctctttgggatcgccgccgcattcgctgtggattattacactttcatggctgctcggttcttcctggccatggtggcctcgggatatctggtggtcgggtttgtgtacgtgatggagttcatcggcatgaaaagccggacatgggcatccgtgcatttacatagcttctttgccgtgggaacgttgttggtggcactcaccggttatctcgtcagaacctggtggctataccagatgatcctgagcaccgtgacggtgccctttatcttgtgttgctgggtgctgcctgagacccccttctggctgttaagtgagggcagatatgaagaggctcagaagattgtggatataatggcgaagtggaaccgcgcgtcatcatgtaaactatccgagttattgagcctagatcttcagggtcccgtatctaattcaccaaccgaagtccagaagcataatctcagctacctgttctataattggtctataactaaacgaaccctcactgtatggctcatttggttcactggctccctcggtttttattctttcagtttgaattcggttaatctgggcgggaatgagtatctgaacctcttcctcttaggagtggtcgagatccctgcttacactttcgtatgcattgccatggataaggttggacgcaggactgtactcgcctattcactcttctgttccgccctggcgtgtggcgtggttatggtgattcctcagaagcattatatccttggcgtcgttaccgccatggttggcaaattcgccataggtgctgcatttgggctcatctatctctacactgctgagctgtaccccaccatcgtccgatccttggcggtaggcagcgggtccatggtttgccgcttggcatcaatcctggctccctttagcgtcgacttatcttcaatctggatcttcatcccacagctgctgggacagcacctgcaggagtag

SEQ ID NO: 205786 - DNA, 600 bp, synthetic construct
  misc_feature 1..600: note = Description of Artificial Sequence: Synthetic coding sequence
  source 1..600: mol_type = other DNA
atgggcagccggcacttcgagggcatctacgaccacgtgggccacttcggtaggttccaacgagtgctctacttcatctgtgccttccagaacattagttgcggaattcattacttggcatccgtgttcatgggagtgacaccccatcacgtgtgtaggccccctggtaacgtgagtcaggtagtgttccataatcactccaactggtccctagaagacacaggtgccctgctgtcttctgggcagaaggattacgtgaccgttcagctgcagaatggagagatctgggaactatccagatgttctcggaacaagagggaaaatacctccagccttggttacgaatataccggatccaaaaaggagtttccatgcgtggacggatacatttatgaccagaatacatggaagagcaccgccgtgacccagtggaatctcgtgtgcgatagaaaatggttggccatgctgattcagcccctattcatgtttggagttcttctgggaagtgtaaccttcgggtactttagtgacagggtaggattcttgaccgcctggtacaagacctcaggctttcctacaagttcagcccccccgttgtag

SEQ ID NO: 205787 - DNA, 1674 bp, synthetic construct
  misc_feature 1..1674: note = Description of Artificial Sequence: Synthetic coding sequence
  source 1..1674: mol_type = other DNA
atgcgggactacgacgaggtgaccgccttcctgggcgagtggggcccatttcagcgattaatcttcttccttctgtcagcatctatcatccccaacgggttcactggattgtcaagtgtgttcctgatcgcaacacccgagcatcgctgccgggtcccggatgccgctaacctttcaagtgcctggaggaaccatacagtaccactgcgcttgagggacgggcgggaggtgccccacagctgtcggcgctacaggcttgccacaatagccaatttttccgccttgggcttagagcctggccgggacgtagatctgggccagttagagcaggagagttgcctcgatggctgggagtttagtcaagatgtctacttatcaaccatagtcacagagtggaatttggtctgcgaggatgattggaaggcccctcttaccattagcctgttctttgttggggttctcctcgggtccttcatctctggccagctgtctgatcgttttggtcggaaaaacgtactgttcgtgacaatgggaatgcaaacagggttctcgtttctgcaaatcttttcaaagaatttcgagatgtttgtggtattatttgtgctagtgggtatgggtcagatatctaactacgttgccgcattcgttttggggactgaaatcctgggcaagagtgtccgtattattttttccactctaggagtatgcatcttctacgctttcggatatatggtactgccgctgttcgcatactttattcgggactggaggatgctcttggtcgctcttaccatgccgggagtcctttgtgtggcactctggtggtttatccctgaatcccccaggtggctgatctcacagggccgctttgaagaggccgaggtgattattaggaaggctgccaaggccaatgggattgtggttccaagcacaatttttgacccatctgagttacaggatttgtctagtaagaagcagcagagccacaacatcctggacttgctccgcacatggaacattagaatggtcactataatgtccatcatgctgtggatgactattagcgtggggtactttggactgagcttagacactcccaacctccacggagacatttttgtgaattgcttcctgagtgcaatggtggaggtccctgcttacgttctggcgtggttacttctgcagtatcttcccagaagatactccatggccactgccctgtttctggggggatccgtgctcctttttatgcagctagtccctcctgacctctactacctcgccactgtgctggtaatggtgggtaagttcggcgtgactgcagccttttccatggtctatgtgtacactgctgagttgtaccctacggtcgttaggaatatgggcgttggcgtcagttcaacggcctcaagacttggcagcatcttaagcccctactttgtgtatctcggggcctacgatcgatttcttccttacatcttgatgggtagtttgaccattctgacagctatattaaccctgttcctgccagagtcgttcgggaccccactgccggacaccatcgaccagatgttacgcgtcaaaggcatgaaacaccgaaagaccccgagtcacacgcgaatgttgaaagatgggcaggaacgacccacaattctcaagtcaaccgcattttag

SEQ ID NO: 205788 - DNA, 1746 bp, synthetic construct
  misc_feature 1..1746: note = Description of Artificial Sequence: Synthetic coding sequence
  source 1..1746: mol_type = other DNA
atgcgggactacgacgaggtgaccgccttcctgggcgagtggggcccgtttcagcgcctgattttcttcctgctcagcgcctccatcatcccgaacggatttactggactttcctcagtgttcttgattgcaacccccgaacaccggtgcagagtacctgatgccgctaatctctcatccgcgtggcgaaaccataccgtgccactacgactccgggatggaagggaagtccctcattcttgtagacgttaccggctcgccaccattgctaacttcagcgcattggggttggagcccggccgtgatgtcgatcttgggcagctggaacaggagagttgccttgatggttgggagttttcccaggatgtataccttagcaccatcgtgacagagcaggacagcggcgcttacaacgcgatgaagaatcgcatgggtaaaaaacccgcactctgcctgccagcacagtggaacctggtatgcgaggacgattggaaggctcctctcacaatcagtctgttctttgtgggagtgctgctgggttctttcatttcaggacagttaagtgacagatttggtagaaagaatgtgcttttcgtgaccatgggcatgcagaccgggttcagctttctgcagatttttagtaagaactttgaaatgttcgtggtgttattcgtactggtgggaatgggccagatttcgaattacgtggctgccttcgtcttggggactgagatcctcggtaaaagtgttcgaattattttctccaccctgggcgtttgcatcttttacgcatttggatatatggtgctacctctgtttgcttacttcatacgcgattggcggatgctgctggtggcacttactatgcccggcgtcctgtgcgtagccctgtggtggttcatcccagagagtcctaggtggctgatttctcagggaaggttcgaagaggccgaggtcatcattcgtaaggctgccaaggcaaatgggatcgtcgtcccctcgacaatcttcgatccaagcgagctccaggacctctcctctaagaagcagcagagccacaacatcctcgacctcttgaggacctggaatattcgcatggtgactattatgtctataatgctctggatgactattagtgttgggtattttggcctatctcttgacacccccaatctacatggtgatatttttgtgaattgctttctgagtgccatggtggaggtgccagcgtatgtcctggcttggctgcttctgcaatacctgcctcgcaggtatagcatggctactgctctgttcctgggcggctctgtgttgctttttatgcagcttgtgccgcccgatctctactatctggctaccgtgctagtgatggtcggaaagttcggggtcactgctgcattttcaatggtgtacgtttacacagctgagctgtatcctaccgtcgttcggaatatgggagtaggcgtgtcaagtacagcttcacgactagggtcaatattgtccccatacttcgtttacctgggtgcatacgaccggttcctcccttacattctgatgggatctctaaccattctgacagctatcttaactcttttcctgcccgaatcctttggcacccctttgcccgacaccatcgaccagatgttaagggtcaagggaatgaagcatcggaagactccctcacatacccgaatgctgaaggatggccaggagagacctaccattttaaaaagcacagctttttag

SEQ ID NO: 205789 - DNA, 1656 bp, synthetic construct
  misc_feature 1..1656: note = Description of Artificial Sequence: Synthetic coding sequence
  source 1..1656: mol_type = other DNA
atgcgggactacgacgaggtgatcgccttcctgggcgagtggggcccgtttcaacgcctgattttcttcttactatccgcctccatcatcccaaatggattcaacggcatgtctgtggtgttcctcgctggcacaccggaacatcggtgtagggtgcccgacgcagccaatttaagctccgcctggagaaacaacagcgttccgttgaggttacgcgacggcagagaggttccacactcttgtagccgctacaggctggccactattgctaatttcagcgcactcggactggagcctggccgagatgtcgacttggggcaacttgagcaagagtcctgtctggatggatgggaattttcccaagacgtgtatctgtctaccgttgtcactgagtggaatctggtttgcgaggacaactggaaggtgcctttgactacctctctgttctttgtgggggtactactgggatcttttgtcagcggtcagctctctgacaggtttggtcggaaaaacgttctctttgccacgatggcagtacagactggcttttcctttttacagatattttccattagctgggagatgtttaccgtactcttcgtcatagtgggtatgggccaaatttctaactatgtggtggctttcatcctgggcaccgagatattgggcaaatcagtccgcatcatttttagcaccctgggagtctgcacattcttcgctgtaggctacatgctgctgccattatttgcatatttcatacgcgactggaggatgctcctgctggcgctgactgtgccaggtgttttgtgcgtgcccctgtggtggtttattcccgagtctcctagatggctgatttcgcagaggcgcttccgcgaggctgaggatattattcagaaggccgccaaaatgaacaatatagctgtgccagctgtaatttttgactccgttgaggagctgaatcccctgaagcaacagaaggccttcatcttggacttatttcgcacccgaaatatcgctattatgacaatcatgtccctactgctgtggatgctcacctctgtaggctactttgccctgagtctggacgcccccaacctgcacggcgatgcatatttgaactgttttctctcagccttgattgaaataccagcatacattaccgcttggttattgctcaggactctgcccaggaggtacattatcgcagctgtcctcttctggggcggaggagtcctgttgtttattcagctcgtgcccgtcgactactactttctgtcgataggactggtcatgctcgggaaatttggaatcacctctgctttctctatgctgtatgtgtttacagccgaactatatcccactttggtgcgcaacatggccgtgggcgtaactagcaccgcttctcgcgtcgggtctataattgccccctattttgtgtacctgggcgcctacaatagaatgctaccctatatcgtcatgggctccttgactgtgctgattggaattctgaccttattttttcctgagagtcttggaatgactttacccgagacccttgaacagatgcagaaggtgaaatggttccgttccggtaagaaaaccagggattccatggagaccgaggagaatcccaaggtgctgatcactgccttctag

SEQ ID NO: 205790 - DNA, 1656 bp, synthetic construct
  misc_feature 1..1656: note = Description of Artificial Sequence: Synthetic coding sequence
  source 1..1656: mol_type = other DNA
atgggcttcgacgtgctgctggaccaggtgggcggcatgggccggtttcagatctgcctcatcgcctttttctgcataactaacattctcctgtttcctaacattgtgctggagaactttaccgcatttacgccatcccaccggtgctgggttccactgctcgacaacgacactgtctctgataacgacaccggtacgctcagcaaagatgacctcctgcggatctcgatcccactggattcaaacttgcggccacagaagtgccagaggtttatccaccctcagtggcaactccttcaccttaacggtaccttccccaataccaacgaacccgacacggagccctgtgtggacggttgggtgtatgatcggtcatcctttttgtctacaatcgtgactgagtgggacctggtgtgtgagagccagtctctcaagtctatggttcagtctctgtttatggcgggcagcctcctaggcggtctcatttatggtcacttaagcgaccgggtgggacgcaagattatatgcaaactgtgtttcttacagctggctattagcaatacctgtgctgcttttgcccccacttttcttgtttactgtatactgcgtttcctggctggctttagcactatgacaatcttaggtaacacatttatcctctccctcgagtggacccttcctaggtctcgctcaatgacgataatggtgctcttgtgttcctattctgtgggtcagatgctgcttggaggcttggccttcgccatccaggattggcacatcctacagctgaccgtgtcaacaccaatcatcgtgctcttcctgagctcctggaaaatggtagagtctgccagatggttaattattaacaaccagttggacgaggggctgaaggaactccggagagtggcccacattaacggaaaaaagaacacagaagaaacgctcactaccgagctggtgcgctcaactatgaaaaaggagctggacgctgtcagaatcaaaacttcaattttctccctttttcgtgcgcccaaactgcgtatgcgagtctttggcctctgctttgtgcgatttgcgataaccgtgccattttacgggcttatcttgaatctgcaacacctgggctcaaatgtttcactattccagatactctgtggcgctgtgacattcactgctcggtgcgtctccttgctcaccctaaatcacatgggaagacggatctctcagatcctcttcacttttcccgtaggtttatttattctggtgaataccttcctgccacaggaaatgcagatcctgcgggtggtactggccaccttaggaattggcagcgtatcagccgcatcgaacagcgcatcggtccaccataacgaacttgtgccaaccatactgagaagcacggtggccggtatcaatgccgtatcaggtagaaccggcgccgccctggcgccgctgttaatgaccctgatggcctattcaccccacctgccgtggatcagctacggggtgtttcccattcttgccgttccagtgatccttctcctgcccgagacccgggatctccccttaccaaatactatccaggacgtggagaatgagaaggactccaggaacattaaacaggaagatacatgcatgaaagtgacacagttttag

SEQ ID NO: 205791 - DNA, 738 bp, synthetic construct
  misc_feature 1..738: note = Description of Artificial Sequence: Synthetic coding sequence
  source 1..738: mol_type = other DNA
atggaggtggaggaggccttccaggccgtgggcgagatgggcatctaccagatgtacctctgcttccttctggctgtgttgctgcaactatatgtcgccacagaagccattttaatcgctctcgtcggagcaacaccgagttaccactgggatctggctgagctcctccccaatcagtctcatggaaaccagtctgccggcgaggatcaggcctttggcgattggctgctgacggcaaacggaagcgaaatacataaacacgtacactttagcagcagctttacctccatcgccagcgagtggtttctaatagccaaccgttcttacaaagtttcagccgccagtagcttttttttcagtggggtctttgtcggggtgattagctttggccagctttccgaccgttttggcaggaaaaaagtgtacctgactggctttgccctagacatcctgtttgcaatagctaacgggtttagtccgagctatgaattcttcgccgttacacggttcctggtgggtatgatgaacgggggcatgagcctcgtggcctttgtgctgttaaacgagtgcgtggggactgcgtattgggcactggccggcagcatagggggactgttcttcgccgtggggattgcccaatatgccctccttgggtattttatccggtcctggaggactctggccattctcgttaacttacagggaacagtcgttttcctgctgtcactagtggactag

SEQ ID NO: 205792 - DNA, 1644 bp, synthetic construct
  misc_feature 1..1644: note = Description of Artificial Sequence: Synthetic coding sequence
  source 1..1644: mol_type = other DNA
atggaggtggaggaggccttccaggccgtgggcgagatgggcatctatcagatgtacctgtgtttcctgctggccgtgctgctgcagctgtatgtggccaccgaagcaatactgatcgcactggtaggggctacgccaagctaccattgggatcttgccgaactgctgcctaatcagagccacgggaaccagagcgctggcgaagatcaggccttcggcgactggcttttaacagctaatggtagcgagatccataaacacgtccatttcagctcatcatttaccagcatcgcttcagagtggtttttaatagcgaacagaagctacaaggtgtccgctgcaagctccttcttttttagcggcgtgttcgtgggcgtgatctcattcggtcaacttagcgaccggtttggtaggaagaaggtctatctgacaggttttgccctggatattctgttcgccatcgcaaacggtttctcaccgtcatacgagttttttgcagtcaccagatttcttgtcggaatgatgaatggggggatgtccctcgtagcttttgtcttgttgaatgaatgcgtgggcaccgcttactgggccctcgcaggaagcatcggcggactgtttttcgccgtgggcattgcccagtatgctctccttggctattttattcggtcttggcgtacattggccatcctcgtgaacctgcagggcactgtagtgttccttttaagcctatttatccccgagagcccgagatggctgtactcgcaagggcggctttcagaagctgaagaggcattatatctgatcgctaagcgtaatagaaagctgaagtgtactttttccctgacccatccagcgaaccggtcttgccgcgagacagggtctttcttagatctcttccgttatcgggtactgctagggcatacactcatcctgatgtttatctggttcgtgtgctctctggtttactacgggctgacactctcagcaggcgacctcggagggagcatctatgcaaatctggcattatctgggctgatcgaaataccatcatatccgctctgtatctacctcattaaccagaagtggtttggccggaaaaggactttgtccgctttcttgtgcttaggaggccttgcttgcctgatcgtgatgttcctgcccgagaaaaaagacactggagtattcgccgtggtgaactcacatagcctttccttattgggcaaactgaccatctccgcggcctttaacattgtctacatatatacaagcgagctgtacccaacagtcattcggaacgttgggctcgggacttgctctatgtttagtagagtcggaggcatcatcgcgccctttattccgagccttaagtatgttcagtggagcctgccgtttattgttttcggtgccacaggactcacatccgggctgctctccctgttattaccagaaacactgaattccccactcctagaaaccttttctgatctgcaagtgtatagctataggagactaggggaagaagctctgagtctccaggccctcgacccacaacaatgcgtggataaggagtcttcactagggagcgagtctgaggaggaagaagagttttacgatgccgatgaagagacacagatgatcaaatag

SEQ ID NO: 205793 - DNA, 1008 bp, synthetic construct
  misc_feature 1..1008: note = Description of Artificial Sequence: Synthetic coding sequence
  source 1..1008: mol_type = other DNA
atgcccgccgtgctgggcttcgagggcagcgccaacaagatcggcgtgggggtcgttcgggacgggaaggtactggccaatccacgacggacatacgtgactccccccggaaccgggtttctgccgggcgatactgcccgccatcatagagccgtcatcctagatttactgcaggaggcgcttacggaaagcggactcacgagccaggacatagactgtattgcatacacgaagggtccaggcatgggcgccccccttgtgtctgtggcggtggtcgcacgaacggtggcacaactgtggaataaacctcttgttggagtgaatcactgcatagggcatatcgagatgggaaggctgatcactggcgcaacctcacctacagtgctatatgtgtcaggtggcaatacccaggttatcgcttactcagaacacaggtataggatcttcggcgagaccattgacatcgccgtgggcaattgcctggaccggttcgctcgggtcctgaagatctccaatgacccatctcctggctacaatatcgagcaaatggcaaagagaggcaaaaagttggtcgagcttccatacaccgtgaaaggcatggacgtgtcattttccggaatcctgtctttcatcgaggacgtcgcacatagaatgctggccaccggagaatgtacacctgaagacctgtgcttctcccttcaggaaacagtgttcgccatgctggttgagatcaccgaacgtgctatggctcattgcgggtcccaggaggcacttattgtgggaggagtggggtgtaacgtgcggctccaggagatgatggcaaccatgtgtcaggagcgaggggccagattgttcgccacagacgagcgcttctgtatcgacaacggcgccatgattgctcaggcaggatgggagatgttcagagccggtcacagaaccccactctcagactccggtgtcacacagcgttataggactgacgaggtggaggtgacatggagggactag

SEQ ID NO: 205794 - DNA, 1563 bp, synthetic construct
  misc_feature 1..1563: note = Description of Artificial Sequence: Synthetic coding sequence
  source 1..1563: mol_type = other DNA
atggccagcgaccccatcttcaccctggccccccccctgcactgccattacggggcattcccgcctaacgctagtggctgggaacaaccgcccaacgccagtggtgtgagtgtagcaagtgcggctctcgccgcctcagctgcctctagagtggcaactagtacagacccctcctgcagcggcttcgcaccccctgattttaatcattgcttgaaggattgggactacaatgggctaccagtgctgaccaccaacgctattggacaatgggacctggtttgtgatctcggatggcaggtcatcctggagcagatcctttttatcttgggtttcgcgagcgggtacctgtttctcggataccccgccgaccgcttcggcaggagaggaattgtgctgttgactctcggcctcgtggggccatgcggggtgggaggtgctgccgcaggttcgtctaccggggtgatggccttgcgtttcctgctcggcttcctactggcaggtgttgacctgggtgtgtatttgatgaggctcgaactttgtgaccctacccaaaggttacgcgtcgcgctcgccggggaacttgttggggtaggcggccattttctgtttctgggtctggctctggtctctaaagattggaggtttctccagagaatgatcacagccccctgcatactgtttctgttttacggctggcctggactcttcctggaaagcgcccgttggctgattgtcaagaggcagatcgaagaggcccagagcgtcctcagaattctggcggaacggaatcggcctcatggccagatgctaggggaggaagcgcaagaggcactgcaggatctcgagaatacatgtccgctgccagcaacttctagttttagcttcgcctcactactgaattaccgaaacatctggaaaaatcttctcatccttggcttcacaaacttcatcgctcatgccattagacactgctatcagccagttgggggaggcggctccccttccgacttttatctatgttctctgctggcctccggaactgctgctttggcctgcgtgttcttaggagtgactgtggaccgttttggcaggagaggtattcttctgttatccatgaccttgaccggcattgcatcgctcgtgctgctcgggctgtgggattatctgaacgaggcagccatcacaacattctccgtgctgggcttgttctctagccaggctgcagccatcttatccacactattagctgccgaagtgatccccaccacggtgcgcggtaggggcctggggctgattatggcattaggcgctctagggggtctatccgggccggctcagcggctccatatgggccacggggccttccttcaacacgttgtgctggccgcctgcgctctcctatgtatcctgtctataatgctgttgcctgaaacaaaacgaaagcttttacctgaagtgttgcgagacggggagttgtgccggcggccatcactgctgaggcagcccccacctaccaggtgtgaccatgtcccccttctcgccacccctaatccagccctctag

SEQ ID NO: 205795 - DNA, 1617 bp, synthetic construct
  misc_feature 1..1617: note = Description of Artificial Sequence: Synthetic coding sequence
  source 1..1617: mol_type = other DNA
atggccagcgaccccatcttcaccctggccccccccctgcactgccattacggagctttccctcccaacgcaagtggatgggaacagcctcctaatgcctctggcgtctctgtggcctcggccgctctggcagctagcgccgcttcacgagtggcaacaagtaccgacccttcgtgcagcggattcgctccacctgattttaatcattgcctgaaggattgggactacaacggcctacctgtgttgacaaccaatgcaatcggacagtgggatttagtctgcgatcttgggtggcaagtgatactggagcagattttgtttatcctgggcttcgcaagcggctatttgtttctgggctatcccgccgataggttcggaagacgggggatagtgctgcttactctcgggcttgtcggtccttgcggcgtgggaggcgccgctgccgggtctagtactggagtcatggcgctccgcttcctgctggggttcctcctggcgggggtggatttgggcgtctacctgatgcgtcttgaactctgtgacccaacccagagacttcgcgtcgccttagcaggggaactggtgggagtgggtggccatttcctgtttcttggcctcgccctcgtcagtaaggattggaggttcctccaacgtatgatcacggccccctgtatcctctttctattctacggatggcccggactgttcctcgagagcgcccggtggcttattgtgaaaaggcaaattgaggaggctcagtctgtactgcgcattctggcagagcgaaatagaccccatggacagatgctgggggaagaggcacaggaggccctgcaggatcttgagaacacatgcccactcccagccacatcctcattttcgtttgcttcgctgctgaactacaggaatatatggaagaacttgctgatcctcggctttactaatttcatcgcccatgccattcggcattgctaccagccagttggtggtggtggatccccctcagacttttatttgtgttcgctcctagccagcggtacagcagcactggcctgcgtgttcctgggggttacagttgataggtttgggagacgcgggattctgctactgtccatgaccttgacggggatcgcctctctagtgctcctgggcctttgggattgtgagcatcccatttttccaaccgtttgggcacaacaaggcaaccctaatagggacctcaacgaagcagctattaccaccttctcagttttaggtttgttttcaagccaagctgctgccatcttaagtaccctgctggcagctgaggtgattcctaccacggtgcgcgggcgaggactgggcctaattatggcgctcggagccctgggaggcctgtcgggtccagcgcagcggttgcatatgggccatggggcctttcttcagcatgtggtcttggcagcgtgcgcactgctttgcatcctttcgattatgctattgccggagacaaagaggaagctcctccccgaggtactccgggacggagagctctgccgtaggccgagtctgctgagacagccaccacccacgcgatgtgaccacgtccctctcctggcaacacccaatcctgctctgtag

SEQ ID NO: 205796 - DNA, 1086 bp, synthetic construct
  misc_feature 1..1086: note = Description of Artificial Sequence: Synthetic coding sequence
  source 1..1086: mol_type = other DNA
atggccatcgaccggcggcgggaggccgccggcggcggccccggccgacaaccggcccccgcggaggagaacggatccctgccgccaggggacgctgcagcatctgctccattaggtgggcgagccggtccggggggaggtgcagagatccagccacttcctcctctgcacccaggaggaggaccacatccaagctgttgtagcgccgccgccgccccctcactgctgctcctggattacgacgggagtgtactgcccttcctgggtggtttggggggcgggtaccagaagactttagttcttcttacgtggatccctgcactgtttatcggtttctcccagtttagtgactcgttcttacttgatcagccgaacttctggtgtcggggggcagggaaaggaactgagctggccggcgtgactacaaccgggaggggaggggatatgggcaattggacttcactcccaacgacgcccttcgcaacggcaccatgggaagctgcgggaaatcgttctaattcgagcggagccgacggcggtgacaccccccccctaccttctcccccagacaaaggcgacaatgcttccaactgtgattgcagggcttgggactacggtataagagccggactcgttcaaaatgtagtctccaagtgggacctggtgtgtgacaatgcatggaaggttcacatcgcaaagttctctttgttagtgggcctgattttcgggtaccttatcactggctgcattgctgactgggtcggcaggagacctgtcttgctgttttctattatctttattttgatctttggactgaccgtggctctgagcgtgaatgtcaccatgttctcgacattgcgcttcttcgagggtttctgccttgctggcatcatcttgaccctttacgccttacggatagagctgtgccctccaggaaaacggttcatgattaccatggtcgctagttttgtcgccatggcaggccaatttctgatgcctggcctcgccgccctgtgtagggattggcaggtcctacaggctctgataatctgtcccttcctgttgatgctgctttactggagctag

SEQ ID NO: 205797 - DNA, 1218 bp, synthetic construct
  misc_feature 1..1218: note = Description of Artificial Sequence: Synthetic coding sequence
  source 1..1218: mol_type = other DNA
atgttcagcaccctgcggttcttcgagggcttctgcctggccggcattatactcaccttgtacgctttgcgcatcgaactgtgcccacctggtaagcgctttatgattactatggttgcttctttcgtggcgatggcaggccagttcctcatgccgggcctggcagcactgtgccgggactggcaggtgctgcaagccctgattatttgcccatttctgttgatgcttttgtactggagcatcttcccagaaagcctgaggtggttaatggcaacccaacagttcgaatcggctaaaaggctcatcctccacttcacccagaaaaatcggatgaaccccgagggagatataaagggagtgattcctgaacttgaaaaagaacttagcaggcgaccaaagaaagtttgtattgttaaagttgtgggaacacgcaatctctggaagaacatagtggttctgtgtgttaattccctgacggggtacggaatccatcactgcttcgctcggtctatgatgggccatgaggtgaaggtgcctctattggagaacttctatgcagactattacacaaccgctagcatcgccctcgtttcgtgtttagctatgtgtgttgtcgtgcgatttctgggcaggcgaggaggcttgctcctgtttatgattctgaccgctctagcgagtctgctgcagttaggtctcctcaaccttattgggaaatattctcaacaccccgactccggaatgagcgacagtgtgaaagataaattcagtatagcattctcgatcgtagggatgttcgcctcccatgcggttggctcactgtcagtgtttttttgtgccgaaatcacccccactgtgatacgatgcggcggactcggcttagtcctcgccagtgccggattcgggatgctgacagcacccatcattgaactgcataaccagaagggatatttcctgcaccacataattttcgcttgctgtaccctgatttgtataatttgcatactgctcctccctgagtctagagaccagaaccttcccgagaatatttctaatggagagcactatacacgacagcctcttcttccacacaagaaaggtgagcaacccctcctcctgaccaatgcagagctcaaggactactctggccttcacgatgccgccgccgcaggggatacactgcctgagggggctaccgcaaacggcatgaaagcaatgtag

SEQ ID NO: 205798 - DNA, 2061 bp, synthetic construct
  misc_feature 1..2061: note = Description of Artificial Sequence: Synthetic coding sequence
  source 1..2061: mol_type = other DNA
atggccatcgaccggcggcgggaggccgccggcggcggccccggccgccagccagcccctgccgaggaaaacgggtctctcccgccaggcgacgctgcagcttcagcaccactgggcgggcgggccggcccaggcggaggtgctgagattcagcctctcccccccctgcacccaggtgggggccctcatcctagctgttgtagcgctgcagccgctccatctcttctgctcctggattacgacggcagtgtgctcccgtttctgggcgggcttgggggaggctaccagaagacattggtacttcttacttggatccccgccctctttatcggcttctctcagttctcagatagtttcttgctggaccagcctaatttttggtgcaggggcgcggggaaggggacagagttagccggggttactaccacaggtcggggtggcgacatgggtaactggacctcacttccaaccaccccctttgccactgccccgtgggaggccgctgggaaccgatcaaacagcagcggcgctgatggcggagatacgccacccctccctagtccccccgacaaaggcgacaacgcctcaaactgcgactgccgagcatgggattacgggattcgcgccggtctcgtgcagaatgtggtatcaaaatgggatctggtgtgtgataatgcctggaaagtccacattgctaagtttagcttgttagtggggttgattttcgggtacctcatcaccggctgtatcgcagattgggttgggcgccgccccgttttgctcttcagcatcattttcatcctgattttcggcctgacagtggccttgtcagtcaacgtgactatgtttagcaccttaagattctttgaaggtttttgtctagcgggcatcattctgactctgtacgctttgcggattgaattgtgtccaccaggtaagcggttcatgataacgatggttgcttctttcgtggctatggccggtcagttccttatgccaggactagccgcattatgccgcgactggcaagtcctccaagccttgatcatttgtcctttcttactgatgcttctgtattggagcatctttccggagagtcttagatggctgatggccacccagcagtttgagtccgccaaacggttaatcctccactttacacaaaaaaatcgcatgaacccggagggcgacattaagggtgtgattcccgagctggaaaaagagctgtcccggaggccaaagaaagtatgcattgtcaaggtagtgggcacaagaaatctgtggaagaatatcgttgtgctgtgcgttaacagcctgactggctatggaattcaccactgtttcgctcggtctatgatgggccacgaggttaaagtgcccctcctcgaaaacttctatgcagactattacacgacggcctccattgcattagtgtcatgccttgctatgtgtgtcgttgttaggttcctggggaggcggggcggactgctgctttttatgatcctgaccgctctcgcgtcactgctgcagctgggactgctcaacctgatcggcaagtactcccagcatcctgattctggcatgtccgattctgtgaaggataaatttagcattgcatttagtatagtcgggatgttcgctagtcacgcggtgggaagcctgtcagtcttcttctgcgccgagattacaccaaccgtgattagatgcggaggtctgggtctagtgctggctagcgccgggttcgggatgttgaccgcccccatcatcgagctccataatcagaagggctacttcctgcaccacatcatctttgcatgctgcacactgatttgtattatttgcatcctcctgctgcccgagagtagggatcagaatttgcccgagaatatctctaacggagagcactacaccaggcaaccattgctgccgcacaagaaaggagagcaacccttgctgctgactaatgcagaactgaaggactacagcggcctccatgatgctgccgccgctggggatacgctgcccgagggtgccaccgcaaatggaatgaaggcgatgtag

SEQ ID NO: 205799 - DNA, 1218 bp, synthetic construct
  misc_feature 1..1218: note = Description of Artificial Sequence: Synthetic coding sequence
  source 1..1218: mol_type = other DNA
atgttcagcaccctgcggttcttcgagggcttctgcctggccggcatcatattgaccttgtacgccctacgcattgagctgtgcccacccggcaagaggttcatgattacaatggttgcatcgttcgtggcaatggccggacagttcctaatgcctggccttgccgcactgtgtcgggattggcaggtcctacaagcactcattatttgcccttttctcctaatgttgctgtattggagcattttccccgagagccttcggtggctgatggccacccagcagttcgagtctgcgaaacggctgatcctgcacttcacccagaaaaaccgcatgaatcccgagggtgacatcaaaggggtgattccagaactggagaaggaactgagtcgtcgaccaaaaaaggtatgtatcgtaaaggtagtcggtaccagaaacctttggaagaatatcgtcgtcttatgcgtaaactccctcactggatacggcattcaccattgtttcgcccggagcatgatggggcacgaggtgaaagtgccactgttagagaatttctatgcagactactacaccaccgcttccattgcgctggtgtcttgcctggccatgtgcgtagtggtgcgctttctcggtcgacgtggaggcctgctgttattcatgattctgacagcccttgccagccttttacagctgggacttctgaacctgatcggaaaatatagccagcatcctgactccggaatgtctgactcagtgaaggacaaattcagtatcgctttttccatcgtgggcatgttcgctagtcatgcagtcggaagtctctcagtgtttttttgcgcagagatcacacctacagttataagatgcgggggcttgggactggtactcgccagcgctgggttcggcatgcttacggcacctataatcgagctacacaaccagaagggttactttctgcaccacattattttcgcatgctgtactctgatttgtattatatgtatccttctactgcccgagtctagagaccagaatttgcctgagaacataagcaacggagaacattacacgcgccagcctctgctaccgcacaagaagggtgaacagcctctgctactcaccaacgcggagcttaaggactactccggcctgcatgacgctgcagcagctggtgacaccctgccagagggagctacagccaacggaatgaaggccatgtag

SEQ ID NO: 205800 - DNA, 969 bp, synthetic construct
  misc_feature 1..969: note = Description of Artificial Sequence: Synthetic coding sequence
  source 1..969: mol_type = other DNA
atgggcttcgacgtgctgctggaccaggtgggcggcatgggccggtttcaaatttgcctgatcgccttcttttgtattacgaacatcctcctgtttccaaacattgtgctggagaactttacagcgtttaccccctcacaccgctgttgggttcctttactggataacgataccgtgagcgataatgataccgggactctgagtaaggacgacctactgcggatctcaatccccctggactcaaacctccgaccccagaaatgtcaacggttcatccacccacagtggcagttgttgcacctgaacggcactttccccaatacgaatgagcctgatacggagccatgcgtggatgggtgggtctatgacagaagctcctttttgagcactattgtcaccgagtgggatctcgtgtgtgagtctcagtctctcaagtcaatggtacagtcactgtttatggcgggcagtctcttgggtggtttgatatacggccatctgtctgatcgcgtcgggcgcaagataatctgcaaactatgtttccttcagttggcaatcagtaacacatgtgccgcgttcgcgcctactttcttggtatattgcatcctgcggttcttggcaggttttagcaccatgaccattctcggcaacacttttatcctcagcctcgagtggaccttgcccagatctaggagtatgacgattatggtgctcctgtgttcttatagcgtgggccagatgctcctcggcggattagcctttgcgattcaggattggcacatcctgcaacttaccgtttcgacaccaatcatcgtcctcttcctgtcatcctggtacgagcagtccccccattcgcttcctgtcagtgaagctatggtagacattgagcgtaagatcctgacgcctggaatctgttccgtgagcggactggttctgagccatgatgtccattcgacttactgcgtgacctag

SEQ ID NO: 205801 - DNA, 780 bp, synthetic construct
  misc_feature 1..780: note = Description of Artificial Sequence: Synthetic coding sequence
  source 1..780: mol_type = other DNA
atgcgggcccaggaggacctggagggccggacccagcacgagaccacacgggacccaagcacgccccttcctaccgaacctaagtttgacatgctgtacaagatcgaggacgtgcccccttggtacctctgcatattattgggattccaacattatctgacctgtttctccgggactatcgcagtcccgttcttgcttgcagaagctctgtgcgtgggtcacgaccaacatatggtgtctcaactgattgggacgatcttcacctgcgttggaatgttctgcactctcttcgggatgatcaccgccgtgggtctgagcaacctccagttcgtagacatgaactcttcacgcaatttgttcgtactcgggttttccatgttttttggattgaccttgccgaattacttagagtctaacccaggtgcaataaatactgggatcctggaggtcgaccagattctgatagtgctcctgactaccgaaatgttcgtgggtggatgccttgcattcatcttagacaatactgtcccagggtcacctgaggaaagaggacttatacagtggaaagcgggggcccacgcgaatagtgacatgtctagctctctcaagtcatacgactttcccatcgggatggggattgttaagagaatcacttttttaaaatatattcctatctgcccagtattcaaagggttctcaagctctagtaaggatcagattgcgatacccgaggatacacctgagaacacggaaaccgcatccgtgtgtacaaaggtgtag

SEQ ID NO: 205802 - DNA, 1797 bp, synthetic construct
  misc_feature 1..1797: note = Description of Artificial Sequence: Synthetic coding sequence
  source 1..1797: mol_type = other DNA
atgcgggcccaggaggacctggagggccggacccagcacgagaccacacgcgaccctagcacacctcttcccaccgagccaaagtttgacatgttgtacaaaatcgaagatgtcccaccatggtacctttgcattctcctgggattccaacactatttgacctgcttttcaggaaccattgctgtcccatttctcttagccgaggctttgtgtgtggggcacgatcaacacatggtatcgcagctgataggaacaattttcacatgcgtgggcattacaacacttatccagacaacggtaggtatccggctcccccttttccaggcttccgcattcgccttcctcgtgcccgccaaggcaatactggccctggagaggtggaaatgtccacccgaggaagagatttatggaaattggtctcttcctctaaacaccagtcatatatggcaccctcggattcgggaggttcaaggcgctatcatggtctcctcagttgttgaggtggtgattggacttctcgggctgcccggagcactcttaaactatattgggccactcacagtgacccctactgtttccctgattgggctgagtgtgttccaggccgctggtgacagggcggggtcccactggggcatcagtgcatgtagtatccttctcatcatcctgttttcgcagtatctgcgcaacctcacctttttgcttcctgtatatcgatgggggaagggattgaccctgttaaggattcagatcttcaaaatgtttccgataatgttggcgattatgacggtctggctcctgtgctacgtgttgactctcacggacgtactgcccacagatcccaaggcctacggttttcaggccagaacggatgcgcgtggagatattatggcaattgccccctggatacggattccatacccctgccagtgggggttgcccacagtaaccgcagctgccgtcctaggaatgttctccgccaccctggcagggattattgagagtataggagactattacgcctgcgctagactcgccggagcacctccccctccagtgcatgcaattaatcgggggattttcaccgaaggaatttgctgtatcatcgcaggccttctggggaccggcaacggctctacttcatcaagccccaacatcggcgtcctggggataacaaaagtcgggagccgtagggtggtgcaatacggcgctgctattatgctcgtgctaggcactattggaaagttcaccgccttgttctcatccctaccagacccaattcttggcggcatgttttgcactttgttcggcatgatcactgccgttggcctctcaaacctccagtttgtggacatgaatagctcacgcaacctgttcgtgttaggcttttcaatgttttttggattgacacttccaaactacctggagtcaaatcctggcgcaatcaacaccgggattcttgaggtggatcagatactgattgtgttgctgactactgagatgtttgtcggagggtgcctggcatttattctggataataccgtcccagggtctcccgaggagcggggacttattcagtggaaagcaggtgcccacgctaactcagacatgtcctccagccttaagagctatgattttccaataggaatgggcatcgtcaagcgaatcacgttcctaaagtacatcccgatctgccccgtttttaagggctttagtagttcttcgaaagaccagatcgctatccctgaggacacgcctgagaatacagaaacggcttcggtgtgtactaaagtatag

SEQ ID NO: 205803 - DNA, 1809 bp, synthetic construct
  misc_feature 1..1809: note = Description of Artificial Sequence: Synthetic coding sequence
  source 1..1809: mol_type = other DNA
atgcgggcccaggaggacctggagggccggacccagcacgagaccacacgggatccctcaacaccactaccaaccgagcctaagttcgacatgttgtacaagattgaggacgtaccgccctggtacctctgtattttgctggggtttcagcactacctgacttgcttttccggtactattgccgttccttttctgctcgcagaagcactgtgcgtcggacacgatcagcatatggtgagccagttaatcggaacgatattcacgtgcgtgggtattacaactctgatccaaacgaccgtggggataagacttccattatttcaggcctccgcattcgccttcttggttcccgcaaaagctatcctcgcgttggagagatggaaatgccccccagaggaggagatttatggtaattggagcttgccgctgaacacatcacatatatggcatcccaggatccgcgaggtgggtctgcacgtacagggcgctatcatggtgagctcagtggttgaggtcgtaatagggctgttggggcttcctggggcactgttgaactacatcgggccacttaccgtgacccccacagtgtctctcattgggctttccgtattccaagctgcaggcgatagagcgggctcacattggggaatctctgcgtgctcaattctcctaataatccttttttcccagtaccttaggaatttgacctttcttcttccagtataccgctgggggaagggactcaccctgctcaggattcagatattcaagatgttccctatcatgctggccatcatgaccgtctggctattatgctatgtcctgacactaacagacgtgctccctactgacccaaaagcatacggcttccaagcgaggacagacgcccgaggagacatcatggccatcgcaccctggattagaattccttacccttgccaatggggcctgcccaccgtgaccgccgctgcagtactcggcatgttctctgctaccctcgcagggatcattgaatcaatcggagattattacgcctgcgctaggctagcaggcgctccccccccacccgtgcacgctatcaaccgcggtattttcaccgaaggtatttgctgtattatcgccgggttgctcggaactggcaatggaagtactagttccagtccaaatataggggtccttggcattacgaaggttggttcacgcagggttgtacagtatggagccgcaatcatgctggtcctgggcacgattgggaagtttacggcactcttctcctcccttccagatccaatcctgggggggatgttttgtactttattcggcatgatcaccgctgtcggcctctctaatctgcagttcgtggacatgaactcatcacggaacttgtttgtgctcgggttcagcatgttttttggtctcacactccctaattacttagagtccaacccaggggcgatcaacacgggcatccttgaagtggaccagatattaatagtgttgctgaccacagaaatgtttgtcggggggtgtctggcattcatcctcgacaacacagtgcctggcagcccagaggagagggggttgatccagtggaaggctggagcacatgcgaactccgatatgtcctcgtccctgaaatcctacgatttcccaatcggtatgggtatagtgaagcgcatcaccttcctgaagtatatccccatttgccccgtgttcaagggcttttcgtccagtagcaaggatcaaatcgccatccccgaggatacgccagaaaatacagagacagcaagtgtgtgtaccaaagtgtag

SEQ ID NO: 205804 - DNA, 1179 bp, synthetic construct
  misc_feature 1..1179: note = Description of Artificial Sequence: Synthetic coding sequence
  source 1..1179: mol_type = other DNA
atgcgggcccaggaggacctggagggccggacccagcacgagaccacacgcgatccctcgacccccctccctacagaacctaagtttgacatgctgtataagatagaggacgtgcccccttggtatctgtgtattcttttgggttttcagcattacctgacatgtttctccggcaccattgctgtgccattcttactcgcagaggcactgtgcgtggggcacgatcagcatatggtctctcaactgattgggacaatctttacttgtgtgggcattacgactcttattcagaccaccgtaggtatacgattacctctcttccaagcgtctgccttcgcgtttctcgttccggccaaagcgatcctcgccctggaaaggtggaagtgcccaccagaggaggagatctatggcaactggagtctgccccttaatacctcacatatttggcacccaaggatccgggaggtgggtctgcacgtgtccattgaggaggccggaggctatatgggtgtcagggtagccgccgagttcggcgacctgaggcggtggtcccgttcttttgtcccagccagcagcagccaagtccagggggccatcatggtgagcagcgtggtggaggtggttattggcctgttggggctgccaggagcactcctaaattatatcgggccattgactgtgacaccaaccgtgtctctaattggcctgagcgtgttccaagctgccggcgatagggccggcagtcattggggtatctcagcatgcagcatcttgctaatcatcctgttcagccagtatttgcgtaatctgaccttcctattaccctgcgcccaacagtccgcacctctctggcaggcatccctctccccatcagagatcaccacaccggttcctgcctggttggttcaccacccactccagtatatgctgtctacgggagcctcctctcctaaagcatttgctgccagttcccgaggatactgggcacgtgctactggtcctcctcgccccgtgccaacgctcgcctcctgggagctacctcggtgggcagcgggcgcttggtgtagtatggtcaggctcagttgttggagctgggccccaagcgcatcatcccggccttcatccccacggtcattgaccccaagttggggagcgtgttcagccctctcactggcatag

SEQ ID NO: 205805 - DNA, 1953 bp, synthetic construct
  misc_feature 1..1953: note = Description of Artificial Sequence: Synthetic coding sequence
  source 1..1953: mol_type = other DNA
atgatgggcatcggcaagaacaccaccagcaagagcatggaggccggatcctcaaccgagggcaaatatgaggacgaggcgaagcaccccgcattcttcacacttcccgtcgtaatcaacggtggggctacgtcttcaggtgagcaggataacgaggacacagagctgatggccatatacactacagaaaatggtatcgccgagaaatcaagtctcgctgaaacactggatagcacagggtctctggatccacaaaggagtgacatgatttataccattgaggatgttcccccctggtatctttgcatctttctcggcttacagcactatctgacctgtttctccggaacgatcgctgtcccgttcttacttgccgacgccatgtgtgtcgggtacgaccagtgggcaacttcccaactcataggcactatctttttttgcgtcggcattacaaccctgctgcagacgacgttcgggtgcagacttccattattccaggctagtgcgttcgcatttctcgcaccggcccgagctatattgtctctcgataagtggaagtgtaatacaacggatgtcagtgtggctaatggcactgcggaattgctgcacactgaacacatctggtatcccaggatcagggaaatacaaggtgcaataattatgtccagcctgatagaagtggtgatcggcctgcttggccttcctggggctctgcttaagtacatcgggcctctaactatcactccaacggtcgccctgatcggtctttccggcttccaggctgctggtgaacgagccgggaaacattggggaatcgctatgttgactatctttctggtgctcctctttagccagtacgccaggaatgtgaagttcccacttcccatttacaagtcgaagaaaggatggacagcgtacaagctgcaactttttaagatgtttcctatcatcctcgccattctggtctcttggctgttgtgtttcatctttacagttaccgacgtcttccctccggactccactaagtatggcttttatgcaagaactgacgcgcgtcagggagtcttattggtggccccatggtttaaggtaccatacccttttcagtggggcctgccaaccgtgagcgccgccggggtcattggcatgctgtcagcagttgtggcctccattatcgagagtatcggtgattattatgcatgcgcccgcctcagttgtgcaccaccacctccaatccatgcaataaaccggggaatcttcgtcgaaggactgagctgcgtactggatggaattttcggcacaggaaatggctctaccagctctagccccaacataggcgtgcttgggattacaaaggtggggagtaggcgagtgatccaatgcggagccgcactgatgcttgccttggggatgattgggaaattttccgcactctttgcttccctaccagatcctgtgctgggggccctcttttgcactctgtttggcatgattaccgccgttggtttgtctaacctacagtttattgacctgaactcatcacggaatctgttcgtgcttggcttctcaatattttttgggctggtcttacctagttacctgcggcagaatccactggtgacagggataactgggattgatcaggtgctcaacgtcctactgacgacagccatgttcgttggggggtgcgtagcattcattctggataacaccattcccggcacccctgaagagcgaggaattcgcaaatggaagaaaggggttggtaagggaaataagagcctcgacgggatggagtcttataacctccccttcgggatgaatattattaaaaaatatcgctgtttcagctatctgccaatttcaccgacgtttgtaggctatacatggaaaggtctgagaaagtcagataacagtcggtcctcggatgaggactcccaggctactggttag

SEQ ID NO: 205806 - DNA, 1953 bp, synthetic construct
  misc_feature 1..1953: note = Description of Artificial Sequence: Synthetic coding sequence
  source 1..1953: mol_type = other DNA
atgatgggcatcggcaagaacaccaccagcaagagcatggaggccggttcctcaaccgaaggcaaatacgaagatgaagccaagcatcccgcattctttaccctgccagtggtgatcaatgggggcgcgacctccagtggcgaacaggacaacgaggacaccgagcttatggcaatctacaccacagagaatgggattgccgagaaaagtagtctggccgagactcttgattcaaccggcagtctcgacccgcagcgctcagatatgatatatacgatcgaggacgtgccaccctggtacctgtgtatttttctcgggctccagcactatctgacttgtttctcgggaacaatcgccgtgccctttttattagccgacgctatgtgcgttggctatgaccagtgggccacaagtcagctaatcggtaccatttttttctgcgtgggtattactacccttctacaaaccacctttggctgccgactgcctctgttccaggcgtctgccttcgcatttctcgcccctgcccgggccatcttgtcactggacaaatggaagtgcaacacaactgatgtctccgttgcgaatggtacagctgagttgctgcacacagagcacatctggtatccccgcattagggaaatccagggtgctatcataatgagttcactgattgaagtggtgattggtcttttgggactccctggcgctctgctaaaatacatcgggccactcaccataactcctactgtcgccttgattgggctgtctgggtttcaggctgctggtgagagggccggaaagcattgggggatagctatgctcaccatcttccttgtcctgctgtttagccagtacgctcggaacgtcaagtttcccctgccgatttacaagagtaagaaaggctggacagcctacaaactgcagttgtttaagatgtttcccataatcctggccattctcgtctcctggttactgtgtttcatttttactgtcaccgacgtgttcccacccgacagcacgaaatacggtttttacgcacgtacagatgctagacagggggtgttgctcgtggcaccctggttcaaggtgccatatccgtttcagtggggcctgccgaccgtgagtgccgcaggcgtcataggcatgcttagcgctgtggttgcttccatcatagagtccatcggggactactatgcctgcgcacggctgagctgcgcccctccccctcctatccatgccatcaaccggggcattttcgtggaaggcctctcttgcgtgttagacggcatcttcggaacaggcaatggctccacaagttcctcccccaatattggtgtgctgggtatcaccaaggtgggctctcgtcgggtaattcagtgtggcgccgccctgatgcttgcactggggatgatcggcaaatttagcgccctgtttgcaagcctgccagaccctgtgctgggcgccttgttctgcacattgttcgggatgattacagctgtggggctctcaaacctgcagtttatcgacctgaactcctcccgcaatctgtttgtgttaggattctccatcttcttcgggctagttctaccaagttatctgcgtcagaatcctttggtgacaggtattacaggcatagaccaggtgctgaatgtcctgctgaccactgccatgtttgttggtggttgtgtggcttttattctagataatactatcccaggaactcccgaagagaggggaattcgcaaatggaagaaaggagtggggaaaggcaataaaagcctggatgggatggaaagctacaatttaccatttgggatgaatatcataaagaaataccggtgcttcagctacttgcctatctcgcctacgttcgtaggttatacctggaaaggtcttagaaaatctgataattcaaggagcagcgatgaggacagtcaagcgacagggtag

SEQ ID NO: 205807 - DNA, 915 bp, synthetic construct
  misc_feature 1..915: note = Description of Artificial Sequence: Synthetic coding sequence
  source 1..915: mol_type = other DNA
tgaggctacgaccagtgggccaccagccagctgatcggcaccatcttcttctgtgtgggcatcacaaccctcctgcagaccacgtttggatgccgcaccatcttccttgtccttctgttctcccagtacgccagaaacgtgaagtttcccttacctatttataaatcgaaaaagggctggacagcttacaaactgcagctctttaagatgttccctattattcttgcgatcctcgtgagctggctcttgtgttttattttcactgttactgatgttttccctccagatagtacaaagtatggcttctatgcccggaccgacgcgagacagggggtgctcctcgtagcaccttggtttaaagtgccataccccttccagtgggggcttccgacagtctctgccgcaggtgtgattggaatgttatctgcagtggtggcaagtattatagaatctatcggcgactactatgcctgcgccagactgtcttgcgccccaccacctcccatccacgctattaatcggggaatattcgtcgaaggtctgtcctgcgtgcttgacgggatttttgggactggaaacggctcgactagcagctctccaaacatcggcgtgctgggtatcactaaggtgggatcacggcgcgtgattcagtgcggggctgctctgatgttggcgctcggcatgataggcaagtttagcgccctgtttgcaagcctcccagacccagtcctcggggcactgttctgcaccttgtttgggatgatcacggcggtgggactgtcaaacctgcagtttattgatctgaactctagtagaaacctgttcgttcttggcttcagcatttttttcggcttagttctgccttcgtacttacgacagaacccactggtgaccggcataacgggcatagactag

SEQ ID NO: 205808 - DNA, 1611 bp, synthetic construct
  misc_feature 1..1611: note = Description of Artificial Sequence: Synthetic coding sequence
  source 1..1611: mol_type = other DNA
atgatgggcatcggcaagaacaccaccagcaagagcatggaggccggcagcagtacggagggaaaatacgaagacgaagcgaaacatcccgctttttttacgctgcctgtcgtcatcaatggcggtgccaccagcagtggcgagcaggataatgaagatactgagttgatggcaatctatacaaccgagaatggcattgctgagaaaagtagcttggccgagactctggattctaccgggagcctcgatccccaaaggagtgatatgatctacacaatcgaggatgttccaccctggtacctgtgtatttttctgggtctgcagcactaccttacctgtttttccggcaccattgctgtccccttcctgttggcggacgccatgtgcgtagggtacgaccagtgggccacctcacaactcataggcacgatctttttctgtgtgggtataactacccttctacagactaccttcggttgtcggacgatctttctagtcctcctcttctcacagtacgctcggaacgtcaaattccctttacccatttataaatccaaaaaagggtggacagcctataagttacagctatttaaaatgtttcccatcattctcgctatcctggtgtcctggcttctgtgcttcatctttacagtgacggacgtgttccccccagactccacaaagtacggtttttacgctagaaccgatgcacgtcaaggtgtgctgctggtggcaccatggttcaaagtcccatacccctttcagtggggattgcccacagtttctgctgccggtgttattgggatgctgtccgcagtcgtggcttctataatagaaagtatcggggactattatgcttgtgccagactctcgtgtgcacctccaccacccattcacgcgatcaaccgggggatttttgtcgaaggcctctcctgcgtgctcgacgggatctttggcaccgggaatgggagtaccagctcgtctccaaacattggcgtgctgggcataactaaggtgggatctagacgcgtcattcagtgcggcgctgctcttatgcttgctctcggcatgatcgggaaattcagcgccctctttgcttcccttcccgacccagtcttgggcgctttgttttgtactctgttcggcatgattaccgcagtgggcttgagcaacttacagttcatcgatctgaacagctcccgcaatctcttcgtgctgggctttagcatatttttcggacttgtactgccttcatacttgaggcagaaccccttggtgaccggaataaccggtattgatcaagtgctcaacgtattgcttactaccgccatgtttgtgggcggctgtgtagctttcattctagacaataccatcccaggcaccccagaggaaagggggattcgcaaatggaaaaagggggtggggaaggggaataagtctctagatgggatggagtcctacaacctgccatttggtatgaatatcataaaaaaatataggtgctttagctacctaccaattagccccacctttgtgggatatacctggaagggtctgcgaaagagtgataactcaaggagcagcgacgaggattctcaggctactggatag

SEQ ID NO: 205809 - DNA, 3300 bp, synthetic construct
  misc_feature 1..3300: note = Description of Artificial Sequence: Synthetic coding sequence
  source 1..3300: mol_type = other DNA
atgggcaagctgatccggatgggcccccaggagcggtggctgctgagaaccaaaaggctgcactggtcccgcctgttattcctcctaggcatgcttataatcggctctacataccagcatttaaggagaccgcgggggctgagcagcctgtgggccgcagttagcagccaccagcccattaagttagcgtctagggatctttccagcgaggagatgatgatgatgtcctcatcccctagcaagcccagctccgagatgggaggcaaaatgctggtgcctcaggcatctgtaggttccgacgaggccactctctctatgacagttgagaacataccatctatgccaaaaagaaccgcaaagatgattccaactacgacaaagaacaattatagtccaacagctgcaggcactgagagacgcaaagaagacactccaaccagcagtaggacattgacttactacacctctacctcaagtcgccagatcgtaaaaaaatatacccctactcctaggggcgaaatgaaaagctactctccaacacaggtgcgcgaaaaggtcaagtacacgccaagtccccgaggccgaagggtaggcacgtacgtcccgagtaccttcatgactatggaaacctcacacgctatcacaccccgtactacggtgaaagattccgacattaccgcaacctataagatcctcgaaactaactccctaaagcggattatggaggagacgacacctactacgctgaaaggtatgttcgactccacacctacattcttgacccacgaggtggaggccaacgtactgacgtctcctcggagcgtgatggaaaagaataacctcttccctcctaggagggttgaaagcaacagcagtgcccacccctggggcctcgtgggcaagagcaatccgaagacccctcaaggaaccgttctgctgcatacaccagctaccagtgagggccaagtgaccatctcaacgatgacaggctcttctccagccgagactaaagcttttaccgcggcgtggtcattaagaaatccctctcccagaactagcgtgagtgcgataaaaaccgctcctgcaattgtgtggcgtctggccaaaaaaccatccacggctccctccacctccacaacacctacagtgcgagctaaattgactatgcaagtccaccattgcgtcgtagtaaagcccacaccagcgatgttgacgactccttcccccagtcttactacagcgctactcccagaagagttgtccccatctcccagtgtcttacctccttcgctgcccgacctgcatccaaaaggggagtaccctccagacttgtttagcgtagaggagcggagacaaggttgggtagtgctgcacgtgtttggaatgatgtacgtttttgtggccctggctattgtatgtgatgaatatttcgttccggcattaggcgttatcacagacaagctccagatatctgaagatgtggcaggcgcaacttttatggccgctggtggcagcgctccagaactgttcacctccctcatcggagtctttatcagccactccaacgtaggtataggcaccattgtgggcagcgccgtctttaatatactcttcgttatcgggacctgtagcctattctctcgcgaaattcttaatctgacgtggtggcctctatttcgcgacgtttctttttatatcctcgatctcatcatgctgatactgttcttcctagattctctaattgcctggtgggagtcccttctgttactcttagcttacgcgttctacgtttttaccatgaaatggaacaaacacatcgaggtgtgggtcaaggagcaactttccaggcgccctgtagcaaaagtcatggcattagaagatctgagtaaacctggagatggtgctattgccgtggacgagcttcaggacaacaagaagttaaagctgccatctctgttgacccgtgggtccagtagcacgagcctgcataacagcacgatccggtctaccatttatcaacttatgctgcattccctcgatcctctgagagaagttcggctagcaaaagagaaagaggaggagtcacttaaccagggggctagggcccagccccaggctaaagctgagagcaagcccgaggaggaagagcctgccaagctgcccgcagtgactgtcacacctgcaccagtccctgatattaagggagaccaaaaggaaaaccccgggggtcaggaggatgtagcagaagctgaaagtaccggcgaaatgcctggtgaagaaggcgagaccgcaggggaaggcgaaaccgaagagaagtctggcggcgagacacagcccgaaggcgaaggcgagacggaaacacaggggaagggagaggagtgcgaggatgagaatgaagccgagggtaaaggggacaatgagggagaggatgagggagaaatccacgcggaagacggcgagatgaaggggaatgagggtgaaacagagtcgcaagaattgagcgctgaaaatcacggcgaggcaaaaaatgatgagaaaggagtggaagatggcgggggttccgatgggggagattctgaggaagaggaagaagaggaagaggaacaggaagaggaggaagaggaagaggagcaggaggaggaagaggaagaagaagaggaagaggaggaaaagggcaatgaggagccactgtccctggattggcctgagacgcgccagaaacaagcaatctacttgttccttctgccaatcgtctttccattatggttaacagtcccagatgtgcgcaggcaggaaagccggaagttcttcgtgtttactttcctgggatctataatgtggattgcgatgttttcatatcttatggtttggtgggcgcaccaggtcggtgaaactattgggatatccgaggaaatcatgggactgaccatactcgccgctggtacatctattcctgatttgatcaccagtgtgatcgttgcaagaaagggtcttggcgacatggctgtgagctctagcgtgggatcaaatatattcgatattacagtggggctgcctgtcccttggcttctgttctctttaataaacgggcttcaaccggttccggtgagcagtaacggtctattctgcgctatcgtgctgttgtttttgatgcttctgtttgttatatcctccatcgcttcctgtaaatggagaatgaataagattcttgggttcactatgtttcttctttacttcgtctttttgataatttccgtcatgttggaagaccgtatcatctcttgccccgtctctgtttag

SEQ ID NO: 205810 - DNA, 3246 bp, synthetic construct
  misc_feature 1..3246: note = Description of Artificial Sequence: Synthetic coding sequence
  source 1..3246: mol_type = other DNA
atgggcaagctgatccggatgggcccccaggagcggtggctgctgcggaccaagcgcctgcattggagcagactcctattcctgctcggaatgctaatcatcggctccacttaccagcacctgcgtaggccaagaggcctctcctccttgtgggcggccgtctcttcacaccagcctattaagctggccagccgcgacctatcatcagaagagatgatgatgatgtcgtcaagcccttccaagcccagttctgaaatgggaggaaagatgcttgtgcctcaggcttcggtggggtcggacgaagccactcttagtatgacagtagagaatattccgtcgatgccgaagcggaccgcaaaaatgatacccacgacaacaaagaacaattatagtcctacggcagcgggtacagaaaggcgcaaggaggacacaccaacgagttcccggactctaacgtactacacgtcaacgtcttcccgacagattgttaagaagtatacccctacacctagaggagaaatgaaatcatattcaccgacccaggtgcgcgaaaaagtaaagtacacaccatctcctcgcggcagacgagtgggaacctatgtcccctccaccttcatgacaatggagacgtctcatgcaattactccacggacgacagtaaaggacagtgatatcacagccacgtataaaatactcgaaacaaattctctcaaaaggatcatggaagaaactactcccacaacgttaaagggaatgttcgactcgactccgacattcttgacccacgaggtcgaagccaacgtgctaacaagcccccggtccgttatggagaagaacaatctttttccgcccagaagggtcgaatccaactcatcagcccacccttgggggctagtgggcaagtcgaacccaaagacccctcaaggaaccgtcctgcttcacacacctgcaacctccgagggacaggtgactatcagtacaatgactgggagctcacccgccgagacaaaggccttcacggctgcctggagtctgcgaaaccctagcccccgaacctccgtgtccgcaataaagaccgcccccgccatagtttggcgtttggcaaagaagccgtcaaccgctccaagcacatccacgacgccaaccgtgagggccaaactcacaatgcaggttcatcattgtgttgtggtcaaacctacacccgccatgctgactaccccatccccctcactgaccacagcgttgctcccagaggagctttccccatctccttctgtcctgccgccttcgttacctgatctgcacccaaagggcgagtatccccctgacttgttttccgttgaagagagaaggcaggggtgggttgttctacacgtttttggtatgatgtatgtgttcgtcgccctagcgattgtctgcgatgaatattttgtgcccgcacttggcgttatcaccgataagctccaaatttccgaggatgtcgcgggggccacgtttatggccgccgggggctctgcacccgagctgtttacctcactgatcggagtcttcataagtcacagcaacgtgggaatagggacgatcgtaggttctgctgtgttcaacatcctgttcgttataggaacttgctctttgttctctcgggagatcctgaacctgacctggtggcccctgttcagggatgtttctttctatatcctcgatctgataatgctgatactattctttcttgacagtctaattgcttggtgggaatctctgcttttgctcctggcttatgcattctatgtgtttacgatgaagtggaacaagcacatcgaagtatgggtgaaagaacaactgagcaggcggcccgttgcgaaagttatggcgctcgaggacctgagtaaactgccaagcttgctaacgaggggctccagctctacctctcttcacaattcaacaatccgatccactatctaccagctgatgttacactcactggatcccctgcgtgaggtgcggcttgcaaaagaaaaggaagaggaaagtctcaaccaaggagcccgagcccaaccccaggccaaggccgagagcaagcccgaagaggaggagcccgccaagctacccgccgtcaccgttactcctgcacctgtaccagatattaaaggagaccagaaagagaaccccggtgggcaagaggatgtcgctgaagccgagagcacgggggaaatgccgggtgaagaaggcgaaacagcaggcgagggggagacagaagaaaagtctgggggagagacacaacctgagggcgagggtgagaccgaaacccaaggcaagggggaagagtgtgaggatgaaaatgaggccgaaggaaagggcgacaatgaaggagaggacgagggcgaaatccacgcggaagacggtgagatgaaggggaatgagggggaaactgaaagccaggagttatctgctgagaatcatggcgaagcaaagaacgacgaaaaaggagtagaagacggagggggcagcgatggaggagattctgaggaagaagaggaggaggaggaggaacaagaggaagaggaggaggaagaggaacaggaagaagaagaagaggaagaggaggaggaggaggagaaaggcaacgaggagcccctcagcttggattggcccgagacccggcagaagcaggctatctacttgttcctgctgcccatagttttccccctgtggttaacagtgcccgatgtgcggcggcaggagtctagaaaatttttcgtcttcaccttcttgggtagtattatgtggatcgctatgttttcatacctgatggtgtggtgggcccaccaggtgggcgagactattgggatttccgaagagatcatgggactcactatcctcgcagccgggacctcgattcctgatttgataactagtgtcattgtagcccggaaaggactgggcgatatggcagtgtcaagttccgtgggaagtaacattttcgatatcacagtaggcctgcctgtaccatggctgctgttcagcctgattaatggcctgcaaccagtcccagtgagctccaacggactgttttgtgcaattgttctactgttcctgatgctcttgtttgtaatctcttctattgcttcgtgtaagtggcggatgaataagatactgggctttaccatgttcctgctgtatttcgtgtttctgataatcagtgtcatgctcgaagaccgcatcattagctgtcccgtgagcgtatag

SEQ ID NO: 205811 - DNA, 3210 bp, synthetic construct
  misc_feature 1..3210: note = Description of Artificial Sequence: Synthetic coding sequence
  source 1..3210: mol_type = other DNA
atgggcaagctgatccggatgggcccccaggagcggtggctgctgagaacaaagcggcttcactggagcaggctgctgtttctgcttggcatgttgataattggctcaacctatcagcatctgagacgaccgagagggttgagtagcctttgggcagctgtctccagtcatcagccgatcaagctggcttcccgcgatctgagtagcgaggagatgatgatgatgtccagctcacctagcaaaccctccagtgagatgggaggaaaaatgctcgtgccacaagcaagcgtgggctccgacgaagcaaccctgtctatgactgtcgagaacatcccgagcatgcctaagcgaaccgccaagatgatccctaccaccactaaaaataattattctcccaccgccgcaggcacggaacgtcgcaaggaagatacacctacctcctcacgcaccctgacttactacacgtccacctcctcacggcaaattgtcaagaagtacaccccaactccccggggggagatgaagtcatactcccctactcaagttagagagaaggtaaaatacaccccaagccctcgcggacgcagagtggggacgtacgttccatccaccttcatgactatggaaaccagccatgcaatcactcccagaaccaccgtgaaggactctgatattactgcgacctacaagatcctggagaccaatagtctgaaaaggatcatggaggaaacgacacccacgacactaaagggtatgttcgacagtaccccaactttcctgacgcacgaggttgaggctaatgtgctgacttccccacgttcggtgatggagaaaaataacctgttccctccaagaagggtagaaagtaactcctccgcacacccgtggggactggtcgggaagagcaatccgaagactccccagggaaccgtgctgctgcatactcccgccacctccgaggggcaggttacgataagcactatgactgggtcatctcctgccgaaacaaaagccttcactgccgcttggagtctgaggaatccctctcctagaacttcagtgagcgccatcaaaacggcaccggccatcgtgtggagattagcaaagaagcccagcactgcaccttcaaccagcaccacgccaacagtaagggccaaactgactatgcaggttcaccactgcgtcgtcgtgaaacccacccctgccatgctgactaccccaagcccctccctaactacggctttgcttccagaggagctctcccctagtccctctgtcctgccccctagcttgcctgacctccatccaaaaggcgagtacccacccgatctgttttcggtggaggaacgcagacaggggtgggttgttcttcacgtattcggcatgatgtatgtgtttgtagccctagcgattgtctgtgacgaatattttgtgcccgctctgggcgttataacagacaaactgcagatctccgaggatgtggctggcgcaactttcatggccgctggcggaagcgcccctgaactcttcaccagcctgataggggtgttcatctctcatagcaacgttggaattgggacaatcgtcggttccgccgtctttaacattctatttgtcatcggaacctgttccctgttttcaagggagattttgaatcttacctggtggcctctgtttcgcgacgtaagcttttatattctcgatcttatcatgcttattctgttcttcctggacagtctgatagcctggtgggaatccttgctgcttctgctggcttacgccttctacgtttttaccatgaaatggaataaacacatcgaagtgtgggttaaggaacagctcagtcgcagacccgtggccaaagttatggcactcgaagatttaagcaaacccggcgacggcgccatcgcggtggatgaactgcaggacaataaaaagctcaaattgccaagcttgcttacacggggaagctctagcacctcccttcacaatagcaccattagatccacaatataccagctcatgctacattcactggacccattgagagaagtcagactggccaaagagaaggaggaggaaagtctgaatcagggggcaagggcccagcctcaggcgaaagctgaaagtaagccagaggaggaggagcctgctaaactcccagccgtgaccgtgacaccggcccctgtcccagatattaagggcgatcagaaggaaaatcccgggggccaagaagacgtcgcagaagcagaatctacaggggaaatgcctggggaagaaggggagacagcaggggaaggagagacggaggagaagtccgggggcgaaactcaaccagagggagaaggagagacagagacgcagggcaagggcgaggagtgtgaagacgagaacgaggccgaaggcaagggagataatgagggcgaggatgagggggagattcacgccgaagacggcgagatgaaaggtaacgagggtgaaacagaatcgcaggagttgagcgcagagaaccacggtgaggccaagaacgatgagaagggagtcgaggacggcggagggtcagatgggggcgacagcgaagaggaggaggaagaggaagaagaacaggaggaggaggaagaagaggaagaacaggaggaagaagaagaagaagaggaggaggaggaggagaagggtaacgaagagccactctcattggattggcccgagacccggcagaaacaagcaatctacttattcctgctccccattgtgttccccctctggttaactgtgcccgacgtgcggcgccaggtgggcgaaaccatcggtatctctgaggaaataatggggctgactatactagccgcggggaccagcataccggacttgatcacgtccgtaatcgtcgctcggaaaggcctgggagatatggcagtgtcctcaagcgtagggtcaaacatatttgatataactgtgggccttccagttccctggctgctcttcagtttgataaatgggcttcagcctgtgcccgtctcgagtaatggtctattctgcgcgattgtgcttctcttcctaatgttgctgtttgtaataagttctattgcctcctgcaagtggcggatgaataagattctagggttcacaatgttccttctctattttgtctttctcattatatcagtgatgctcgaagatcggatcatctcttgcccagtttccgtgtag

SEQ ID NO: 205812 - DNA, 3246 bp, synthetic construct
  misc_feature 1..3246: note = Description of Artificial Sequence: Synthetic coding sequence
  source 1..3246: mol_type = other DNA
atgggcaagctgatccggatgggcccccaggagcggtggctgctgcgaacgaagaggctgcactggagcaggcttctctttctcttaggcatgctcataatcgggagcacataccaacacctgcgccgcccccgcgggctgtcatccctctgggcggcagtgagcagccaccagccaatcaagttggcgtcaagggacctaagctctgaagagatgatgatgatgtcctcctccccttccaaaccctctagtgaaatgggaggaaaaatgttggtccctcaggcatccgtgggtagcgatgaggccacgctgtctatgaccgtggagaacatcccatccatgcctaagcgtaccgctaagatgatccctacaacaacaaagaacaattacagtccaaccgccgccggtactgagaggcgcaaggaagacacaccgaccagcagtcggaccctgacatattataccagtaccagttcaaggcagattgtgaagaaatatacacccacacctcgcggagagatgaagtcctacagccccactcaagtccgtgagaaggttaagtatactcccagtcctcgcggcagaagagttggaacctacgtacccagtactttcatgactatggagacctcccacgccataacaccacgcaccacagtcaaggacagcgacattacagcgacctacaagatcctagaaactaacagtctgaagcgaatcatggaagagacgacacccaccaccttgaagggtatgtttgactccaccccaaccttcttgacacacgaggtcgaggctaacgtgctcacgtcaccacgatctgtgatggagaagaacaacctgtttcctccacggcgcgtggaatccaatagttccgcccatccatggggtctggtgggcaagtcaaatcccaagaccccccaggggactgtgctgttgcatacaccggccacatctgagggtcaggtcaccatcagcaccatgacaggaagttctcccgcagagacaaaggcttttacagcggcctggtccttacggaatccgagtccgcgcacatccgtaagcgctatcaagacagcccccgccatcgtgtggaggttggcaaaaaagcctagtacagccccctctacaagtacaactcccaccgtcagggcgaaattaactatgcaagtgcatcattgtgttgtcgtgaagcccaccccagctatgttaacaactccatcaccttctctgacaaccgctttacttcctgaagagctcagtcctagcccatccgtcttacctccttcactgcccgatctgcaccctaagggcgagtacccccctgacttgttcagtgttgaggagcgacggcaaggctgggtggtcctgcatgtcttcggaatgatgtatgtgtttgttgcactcgctatagtgtgcgacgaatacttcgtaccagccctgggtgtgattacggacaaactacagattagcgaggatgttgctggggccacgttcatggcggccgggggctcagccccagaacttttcacgtcgctgattggggtgtttatatctcactccaatgtagggatagggacaatcgttgggagcgccgttttcaacattcttttcgttataggtacttgttccttgttctccagggagatattgaacctcacctggtggccattattcagggatgtcagtttttatatccttgacctcattatgttgatccttttttttctggactcactaatcgcatggtgggagagtttactgcttcttctggcatacgctttctatgtgttcacaatgaagtggaacaagcacatcgaagtttgggtcaaagagcagctgagccgtcggcctgtcgcgaaggtgatggccctggaagatttgtctaaactgccctccttgttaacgagagggagttcatcaacttcactgcacaattctaccatcagaagcaccatctatcaacttatgctacattccctcgaccctttgcgggaagttagacttgctaaagagaaggaggaggagagtctgaaccaaggtgctagagcccagccacaagctaaggcggagagcaagccagaagaggaggaacccgctaagctcccggctgtgacagtcactccagcacccgtgcccgatatcaaaggcgaccaaaaggagaatcctgggggacaagaggacgtcgcagaggccgaatctacaggcgagatgcctggagaggagggggaaacggcgggagagggcgaaaccgaggaaaagtcagggggtgagacgcaacccgaaggtgaaggcgaaaccgaaacacagggtaagggcgaagagtgtgaggacgaaaacgaggcagagggaaaaggtgataacgaaggcgaggacgaaggtgagatccatgccgaagatggagagatgaagggtaacgagggcgaaactgaatctcaggagctatctgcagagaatcacggtgaggctaagaacgatgagaaaggtgtggaggatggtggaggtagtgatgggggagacagcgaagaggaagaggaggaggaggaagaacaggaagaggaggaggaagaagaagaacaggaggaggaagaagaagaggaagaggaggaagaggaaaagggtaacgaggagccactgagcctggactggcccgagactagacagaaacaagccatttacttgtttctgctccccattgtgtttcctttgtggctgaccgtacctgatgttcgacgtcaggagtcgaggaagttcttcgtgttcacgtttctcggctcaattatgtggatcgccatgtttagctatctcatggtgtggtgggctcaccaagtgggggagaccatcggcatcagcgaggagattatgggcctgaccatccttgctgcaggaacctccatcccagacctcattacgagtgtgatcgtggctcggaagggacttggcgacatggccgtgtcctctagcgtggggagcaatatctttgacatcactgttggccttcctgtgccgtggctgctgttcagtttaatcaatggactccagccagtgcctgtgagctccaatggactgttctgcgcaattgttctgctcttcctgatgctgctttttgtgatatcatccatcgccagttgtaaatggcgcatgaataagatcctcggctttacgatgttcctgctatacttcgtgtttcttatcatctctgtgatgctcgaagatcggatcattagctgcccagtgagtgtgtag

SEQ ID NO: 205813 - DNA, 1935 bp, synthetic construct
  misc_feature 1..1935: note = Description of Artificial Sequence: Synthetic coding sequence
  source 1..1935: mol_type = other DNA
atggacctgcagcagagcaccaccatcaccagcctggagaagtggtgcttagacgaaagcctgtcaggatgtagacggcactactccgtgaagaagaagctcaagctcatccgtgtccttggtctgttcatgggattagttgccatttctacagtaagcttctctatctctgcattctctgagacagacacgcagtctactggcgaggcgtccgtggtcagtggaccgagggtggcacaggggtatcaccaacggaccctgctcgacctgaacgataagatactcgactacaccccacagccacctctttccaaggagggcgagagcgaaaacagcacggaccatgcccagggagattatcccaaagacatcttttccctggaggagcgacgtaagggagcaattatcctgcacgtgattggtatgatatatatgttcatcgcgctggccattgtgtgcgacgagttttttgtgccgagtctcacagtgatcactgagaaactcggaatcagcgatgatgtggcgggcgcaactttcatggccgctggcggatcagcccccgagcttttcacctcactaatcggggtgtttattgctcattccaacgtagggatcggcacgatagttggcagcgcagtgtttaatatcttgttcgtgataggcatgtgcgcactctttagccgggagatcttaaacctcacttggtggcccttgtttagggacgtatctttctacatcgtagacctgattatgctgattatattcttcttagataacgtcatcatgtggtgggaatccctactactcttgaccgcatacttctgctacgttgtctttatgaagtttaatgtccaggtcgaaaagtgggtgaagcagatgatcaaccgcaacaaggtggtaaaggtgacagcccctgaagcgcaggccaaaccttccgccgcacgggataaagatgaacctacgctccccgccaaacccaggcttcaaagaggcggctcctccgcttctcttcacaattctctgatgcggaatagtatttttcaactgatgattcacaccctagatcccctggctgaaggcagatttagggaaaaggctagcattctgcataagatcgcgaagaagaaatgtcacgtagatgaaaatgagcggcagaatggggcggccaaccacgtggaaaaaatcgagcttcccaactctacctccactgacgtggaaatgacgccatctagtgatgccagcgagcctgtgcagaatggcaacctttcacacaacattgagggagcagaagcccagaccgctgacgaagaagaggatcagcctctaagtctggcctggcccagtgagacccggaaacaagtcacattcctcatagtgtttcccattgtttttccactttggatcactctccctgatgtgagaaagccttctagccggaagttttttcctatcactttttttggttcgatcacctggatcgccgtctttagttatctcatggtctggtgggctcaccaggtcggagaaactatcgggatctcggaggaaataatgggactgaccatacttgcggctgggacttccatccccgacctgatcaccagcgttatcgtcgcccggaaaggactgggggacatggctgtttcctcctctgttggttcaaacatcttcgatattacagtcgggctccccctcccctggctgctatacaccgtcattcatagattccagcccgtggcagtgtcatccaacgggttgttttgcgctattgtgctcttgttcattatgctgctcttcgtaattctctcgatcgccttgtgtaaatggaggatgaacaagatccttggttttattatgttcgggctgtatttcgtctttcttgtggttagtgtgctcttggaagatagaattcttacgtgccctgtgagcatctag

SEQ ID NO: 205814 - DNA, 1986 bp, synthetic construct
  misc_feature 1..1986: note = Description of Artificial Sequence: Synthetic coding sequence
  source 1..1986: mol_type = other DNA
atggacctgcagcagagcaccaccatcaccagcctggagaagtggtgcctagatgagagtttgagcggatgccggaggcactatagtgtcaagaaaaagctgaagctgatcagggtcctgggcctattcatgggcctagtggctatcagcactgtttcctttagcatctctgccttcagtgagaccgatactcagtcaaccggggaggccagcgttgtatctggaccccgagtggcccagggctaccatcaaagaacgttgttggatttaaatgataagatcctagactacaccccccagcctccactgtctaaggagggggaatccgaaaattctaccgaccatgcccagggcgattatccaaaggacatttttagcctagaagagagacgcaaaggagccattatcctccatgtgattggcatgatttatatgtttatcgccctggccattgtgtgcgacgagttctttgttcctagtctgacagtgatcaccgagaagctaggcatctctgatgatgtcgccggagcaaccttcatggctgcaggcgggagtgctccagaacttttcactagcctgattggtgtgtttattgcacatagcaatgtcggcatcggcaccatcgtaggatccgctgtctttaacatcctattcgtgataggtatgtgcgctttgttttcaagggagatcctgaatctgacctggtggcccctcttccgagacgtgagtttttatatcgttgacctcatcatgttaattatcttctttcttgacaacgtcatcatgtggtgggagagcctcttactgttgacagcatacttctgctatgtggtgttcatgaagttcaacgtgcaagtcgagaagtgggtgaagcaaatgattaacaggaataaggtagttaaggttaccgcaccagaagcacaggccaagcctagcgcggcaagagataaagacgagcccactcttcctgcaaagcctaggctgcagcgaggcgggtctagtgctagcctgcataactcgctcatgaggaacagtatttttcagctgatgatccatacacttgacccgctggctgaagaattaggttcctacggcaagctgaaatattatgataccatgacagaagaaggcaggtttagggaaaaggccagcattctgcacaagattgcaaaaaagaagtgtcacgtcgacgaaaacgaaagacagaatggcgccgcaaatcatgtcgagaaaatagaacttcctaattcgacaagcaccgacgtcgaaatgaccccatcctcagacgcctctgagccagttcagaatggaaatctgagtcataatatcgagggtgcagaagcccagaccgcagacgaagaagaggaccagcctctcagcctggcttggccatctgagacaaggaagcaggtgacatttctgattgtttttcccatagtctttcccttgtggattacattacctgatgtcaggaaacccagctcccggaagttttttcccatcacttttttcggatccataacttggattgctgtcttttcatacctgatggtgtggtgggcccaccaagtaggggagacaatagggatctccgaggaaatcatgggcctgacaatcctggctgctggaacgagcatcccagatctgattacatcagtgattgtggcaagaaagggcctgggggacatggcagtgtcgagctctgtgggttctaatatttttgatatcaccgttgggctccccctgccttggctactgtatacggttatacaccggtttcagccagtggctgtgtctagcaatggcctcttttgtgccatagtcctgctctttatcatgctgttgtttgtcatactgagcattgccctgtgcaagtggaggatgaataagatcctgggttttatcatgtttgggctctattttgtgtttctcgtcgtgtccgtgctgttagaggatcgaattcttacttgtcctgtgagtatctag

SEQ ID NO: 205815 - DNA, 1935 bp, synthetic construct
  misc_feature 1..1935: note = Description of Artificial Sequence: Synthetic coding sequence
  source 1..1935: mol_type = other DNA
atgcggcccagcggcgacgaggaccgggcccggcggcggcggcggaggagacgccgtcgcgacctgctgttgtcccagctgtgttttctagcctcagtggctctgttactgtggagtttgtcgagtctgcgtgagcaaaaggagctcgacctaatggatctggtgggcgaagataggaaatggatgatggctcgtaagctcatgcaggttaatgacacattgacaagtgaagacgctgggctgaggaatagcaaaaactgcaccgaacccgcgctccacgaatttccaaatgatattttcacaaatgaagacagaaggcagggggccgtcgttctgcacgtgctctgcgcaatctacatgttctacgccctggcgattgtgtgcgacgacttcttcgtgcctagcctcgaaaagatttgcgagagactgcacctttccgaggacgtcgcaggggccacgtttatggccgccggctcttctgctcctgaactttttacatcagtaattggcgttttcattaccaagggcgacgtaggcgtggggaccattgttggatcagccgtcttcaatatactctgtatcataggcgtgtgtggcctcttcgcaggtcaggtcgtggctctatccagctggtgccttctgcgggattctatctattacacattatcagtgattgctttaattgtgttcatctacgacgaaaaggtctcatggtgggagagccttgttttggtactgatgtatctgatttatatcgttattatgaaatacaatgcttgcattcaccaatgcttcgagagacgcaccaagggcgctggcaatatggttaatggtcttgccaacaacgcagagattgacgactcttccaactgcgacgccacagtggtcctattgaagaaggccaactttcacaggaaggcctcagtcatcatggtggacgagcttctgagtgcataccctcaccaacttagtttttccgaagctgggctgaggatcatgattacctctcactttccaccaaaaacccggttgagcatggcttctcggatgttaattaatgagcgccagcgcctgataaatagccgagcttatacaaacggcgagtctgaagtggctataaagattcctataaaacataccgtagagaacggaactgggcccagcagtgcacctgatagaggggtgaacggtacccggagggacgatgtcgttgccgaagcaggaaacgagactgagaatgaaaatgaagataacgaaaatgacgaggaagaggaagaggatgaagacgacgacgagggtccatacacaccatttgacacccctagcggtaaactggagactgttaaatgggctttcacatggcctctgtccttcgtactgtacttcaccgtgcctaattgtaacaagcctaggtgggagaagtggttcatggtgactttcgccagtagtacactttggatagcagcattttcctatatgatggtgtggatggtaaccataataggctacacactcggaataccggacgttatcatgggcattacattcctggccgccggcacgagtgttcctgattgtatggctagtcttattgttgccaggcaggggatgggcgacatggcggtgagtaacagcattgggtctaatgtgttcgacatactcattggattaggccttccatgggcattacagactctcgccgtggattacgggtcatacattcgcctaaattctagagggttgatctactcagtggggcttctgcttgcctctgtcttcgtcaccgtgttcggtgtccatttaaacaaatggcagttggataaaaagctgggttgtggctgcctcctgctctacggcgtgtttctctgcttcagcatcatgactgagtttaacgtctttacctttgtcaacttgcccatgtgcggcgaccattag

SEQ ID NO: 205816 - DNA, 1755 bp, synthetic construct
  misc_feature 1..1755: note = Description of Artificial Sequence: Synthetic coding sequence
  source 1..1755: mol_type = other DNA
atggccggccggcggctgaacctgcggtgggccctgagcgtgctgtgcgtgttgctgatggccgagacagtgtctggcacccgcggatcatcaacgggagcccacatttcaccacagttccctgcatcaggggtcaatcagacgcccgtggtggactgtcggaaggtctgtggactgaacgtgtctgatcgctgtgactttatcagaacaaatcccgactgtcactccgatggtggttatctggattatctggaaggcattttttgtcatttcccaccatccctgctgcctctagcggtcaccctgtacgtaagctggctcttgtatctgttcctcatactgggggtcactgctgcaaagttcttctgccctaatctttcggctatatctactacacttaaactgtcacacaacgtcgcaggagtgacattcctggcattcggaaatggcgcacctgacatttttagcgccctggtggctttcagcgacccccacactgcaggactcgcactgggggccctattcggagccggcgtgcttgttacaaccgtggtggccggtggcatcaccatcctccatcccttcatggcagcttcgcgtcctttcttcagagacatcgtgttctacatggtggccgtgttcctgaccttccttatgctcttcaggggcagagtgactctggcctgggccctcggatacttaggcctgtatgttttttacgtggtgacagttattctctgtacttggatttaccagcgccagaggcggggttccctcttctgcccgatgcctgtcacacccgaaattctgagtgacagtgaagaggaccgggtcagttccaacaccaattcatatgattatggggatgagtaccgacctctctttttctaccaggagacaacggcacagatcctggtgcgagccctaaatccccttgactacatgaagtggcgcaggaaaagtgcctattggaaggccctgaaggtctttaagctacccgtggagttcttactgttactcaccgttcccgtcgtggaccctgacaaggacgatcagaactggaagcgccccctgaactgcctccatctggtaattagcccactagtggtcgtcctaacactgcagagcggtacttatggcgtttacgagatcggagggcttgtgccagtctgggtcgtggttgtgattgctggcaccgccctggccagtgtgacattcttcgctaccagcgactcccaacctccacggcttcactggcttttcgcgttcctgggcttcctcacgtcggcactgtggatcaatgccgcggccactgaggttgtgaatatactgcggtcacttggcgtggttttccgtctctctaacacagtcctcggactcacacttctcgcgtggggtaattcaattggagacgcctttagtgacttcactctggctaggcagggatatccacgtatggcgttcagtgcttgctttggcggcataattttcaatatcctggtgggcgtgggcttggggtgtctgctgcagatcagcagatcccacacggaagtaaagctggagcctgacggactactggtctgggttctggccggcgctctggggctgagtctggtcttctccctggtaagtgtgccactccagtgttttcaactgagtcgagtttacgggttttgccttcttttgttctacctcaactttctggtagtggctctgttaaccgagttcggggtgattcacctcaaatccatgtag

SEQ ID NO: 205817 - DNA, 1587 bp, synthetic construct
  misc_feature 1..1587: note = Description of Artificial Sequence: Synthetic coding sequence
  source 1..1587: mol_type = other DNA
atggccggccggcggctgaacctgcggtgggccctgagcgtgctgtgcgtactgctgatggccgagacggtaagtggaacacgtggcagttcgacaggtgcgcacattagcccccagttccccgcctcaggagtcaaccagacccctgtggtcgattgtagaaaggtctgtggcctgaacgtttctgacagatgtgacttcatccggacaaaccctgactgtcactcagacggaggctacctcgactatctagaggggattttttgccacttccccccttctctcctccctctagcagtcacactctatgtgagttggctcctgtacctgtttctaatcctgggagtaacggccgccaaatttttctgtcccaatttgagcgctataagcacaaccctcaaattgtcacacaatgttgcgggagtcacgttcctggcattcgggaatggggccccggacattttttctgcgcttgtcgctttttcggacccacacaccgctggcttggcactgggagcgctgttcgggtatctgggactatacgtcttttacgttgtgactgtcattttatgtacttggatctatcagaggcaaagaagggggtccctattctgccctatgcctgtcacccctgagatactgagcgacagtgaagaagatagggtgtcttctaatacaaactcctacgactatggggacgagtatagaccattattcttctaccaagagaccacagctcagatcctggtgagagctctgaatccccttgactacatgaaatggcgcagaaagtctgcttattggaaggccctcaaagtatttaagctcccggtggaatttcttctcctcctgacggttcctgtagtggatcccgataaagacgaccagaattggaagcggccactaaattgtttgcatctggttatctctccgctggttgttgtgttaacactgcagagtggcacatatggcgtttacgaaattggggggctggttccagtgtgggttgtggtcgtgatcgctggaaccgcgctggcttcggtgaccttttttgccacatccgactctcagccccccagactgcattggctgttcgccttcctggggttcctcacttctgcactgtggattaatgccgccgcaaccgaggtggtcaacatcctccggagccttggcgtagtcttcagattatccaacacagtcctgggactgacccttttggcctgggggaattcaatcggagacgccttcagcgactttaccctagcccggcaaggatacccgcggatggccttcagcgcctgtttcggggggattattttcaacatcctcgtcggagtgggcctcggatgtctgttgcaaattagcaggtctcataccgaagtgaagttagagcctgatggacttttggtgtgggtgctggccggagccttgggactttcacttgtgtttagcctagtgagcgtgccgctgcagtgcttccagctgagccgggtctatggcttttgtctgctgctgttttacctgaactttctggtcgtggcactattgaccgaatttggagttatccaccttaagtccatgtag

SEQ ID NO: 205818 - DNA, 1587 bp, synthetic construct
  misc_feature 1..1587: note = Description of Artificial Sequence: Synthetic coding sequence
  source 1..1587: mol_type = other DNA
atggccggccggcggctgaacctgcggtgggccctgagcgtgctgtgcgtgttgttaatggccgagacagtgagcggcacgaggggctcaagcactggcgcacacatctctccgcagtttccggctagtggcgtaaaccagactcctgtagtggactgtcgcaaggtgtgcggactgaacgtatcagataggtgtgattttattcggaccaacccagattgccactccgatggaggttaccttgattatctcgagggcatcttttgccacttcccacctagtctgctgccactcgctgtaacactgtatgtgagttggttgctgtatttgttcctcatcttgggcgtgacggctgctaagtttttctgtccaaatctctccgccatcagtacgacactgaagctttcacacaacgtggcaggggtcacattccttgcgtttgggaacggggctccggatatcttttctgcccttgtcgcatttagtgatcctcatacagcaggactggcactcggcgccttgtttggatacctgggcctctatgtgttctatgttgtcactgtgatcctgtgtacctggatttatcaacgtcaaagaagaggcagtctgttttgtccaatgccagttactccagagatactgtcggatagcgaagaagaccgggtctcatccaatacaaattcctacgattacggagacgagtatcgacccctgtttttctatcaggagacaaccgctcagattcttgtccgcgccctgaatcccctagattacatgaagtggaggcgcaaaagcgcgtactggaaagccttaaaggtgtttaagcttcccgtggagttcctgctgcttctcaccgtgcctgtggtggaccccgacaaagatgatcaaaattggaaacggccactgaattgcctccatctcgtgatcagccccttggtcgtggtactcactctgcaatccggcacttatggagtgtatgaaatcggaggattggttccagtgtgggtggtggtggtcatcgctgggactgcccttgccagtgtcacttttttcgcaacgtccgactcacaacctccacgtctgcattggctgttcgcttttctaggatttttgacttctgcgctgtggatcaacgccgccgcaactgaagttgtcaatattcttaggtcattaggtgtagtgttcaggttaagcaataccgtgctagggctgacactcctggcatggggcaactccattggagatgcattctccgacttcacccttgccagacagggatatcctaggatggccttcagcgcttgtttcggtggcataattttcaacattcttgtaggcgtgggtctgggctgtctgttacaaatctcacggagccataccgaagttaagctcgagcctgacggtctacttgtatgggtgctcgctggggctctgggactcagtctagtgttttctttagtatcggtgccactgcaatgttttcagctgtcacgggtgtatggattctgtttactgttgttctatctaaacttcctcgtcgtggcactcctcacagaattcggggtgatccacctgaagagtatgtag

SEQ ID NO: 205819 - DNA, 396 bp, synthetic construct
  misc_feature 1..396: note = Description of Artificial Sequence: Synthetic coding sequence
  source 1..396: mol_type = other DNA
atggccggccggcggctgaacctgcggtgggccctgagcgtgctgtgcgtcctgctgatggccgaaacggtctcgggcacacgagggtcatccactggcgcccacataagcccccagttccctgcctccggcgtgaatcagacaccagttgtggattgcagaaaagtctgtgggctgaatgtttcagaccgctgtgacttcatccgaaccaaccccgattgccacagcgatggaggctatctggactatctggaaggtattttctgccactttccaccaagtcttctgcctcttgcagttaccctgtatgtgtcctggcttctgtacttgttcttgatcctgggcgtgactgcggcaaagttcttctgccctaatctttccgctatctccacttag

SEQ ID NO: 205820 - DNA, 696 bp, synthetic construct
  misc_feature 1..696: note = Description of Artificial Sequence: Synthetic coding sequence
  source 1..696: mol_type = other DNA
atggccggccggcggctgaacctgcggtgggccctgagcgtgctgtgtgttctgcttatggcggagacggtgtccggcaccaggggctcgtctactggagcccacataagtcctcagtttcccgctagcggcgtgaatcagacacccgtcgtggattgccgcaaggtgtgtggactcaatgtctccgataggtgcgactttatccgtaccaatcctgattgtcactcggatggcggttacctggactaccttgagggtatcttttgccattttcccccatctctcctcccactggccgtcacattgtatgtcagctggctgctttatctctttctgatcctcggggttacagctgccaaatttttttgtcctaacctcagtgcaatttctactaccctgaagctgagtcataacgtcgctggggtgacattcctggcatttgggaacggtgccccggacattttcagtgccctggttgcttttagcgaccctcacaccgcgggcctagctctcggcgctttattcggcgccggtgtcctagtcacaacagtggtggccggtggcattacgattctccacccctttatggcagcctccagacctttctttagggacattgtgttctacatggtagccgtgtttctgaccttcctcatgctgttcaggggcagagtcaccctagcttgggccttgtag

SEQ ID NO: 205821 - DNA, 312 bp, synthetic construct
  misc_feature 1..312: note = Description of Artificial Sequence: Synthetic coding sequence
  source 1..312: mol_type = other DNA
atggccggccggcggctgaacctgcggtgggccctgagcgtgctgtgcgttcttcttatggctgagacagtgtccgggacaaggggatcaagtacaggggcccatatctcaccgcagtttcctgccagcggcgtgaaccaaaccccagtggtggactgccgcaaggtctgcggtctgaatgtgagcgataggtgcgatttcataagaacgaaccccgattgccactccgacggtggatacctagactacttagaggggattttttgccacttccctccatccctcctgcctctggccgttacactatactag

SEQ ID NO: 205822 - DNA, 1755 bp, synthetic construct
  misc_feature 1..1755: note = Description of Artificial Sequence: Synthetic coding sequence
  source 1..1755: mol_type = other DNA
atggccggccggcggctgaacctgcggtgggccctgagcgtgctgtgtgtactcctgatggccgagacagtgtctggcacccgaggctcctctacgggagcacacatctcacctcagttccctgcaagcggggtcaatcagaccccagtggttgactgtcgaaaggtctgcggcctcaatgtgtctgatagatgtgacttcattcgcacaaacccagactgtcactcagatgggggttatcttgactacttggaggggatcttttgtcactttccgccctctctgttaccactcgccgtgaccctgtacgtgagttggctgctctacctgttcttgatcttaggcgttactgctgcaaaatttttttgtcccaatttgtctgccattagcaccaccctgaaactgtctcacaatgtggctggcgtgacctttctggcattcggcaatggcgcccccgacatttttagtgccctagtcgcattctctgacccacatacggctggccttgccctgggcgccctgtttggcgctggcgtgctggttacaacagtcgtggctggaggaatcactatcttgcatccatttatggccgcttcacgacctttcttccgtgacatcgtcttctacatggtggctgtcttccttacctttctgatgcttttccgagggagggtgactctggcatgggccctgggatatctgggcttgtatgtgttttacgtggtgacagtgatactatgcacatggatttatcagaggcagcggcgtggctccctgttctgtccaatgccagtgacgcctgagatactatccgattctgaggaagatcgggtgtccagcaacacaaactcctatgattatggggacgagtatcgacctctgtttttctatcaggagactacagcccagattttggtgcgtgctctaaatcccctggactacatgaagtggcgaaggaagagcgcatactggaaggcgctgaaggtattcaaactgcccgttgagttcctgttactgctgaccgtccctgtggtggacccagataaggatgatcagaattggaagcggcccctcaactgtttgcacttggtgatctcgcctttggtggtggtgctcaccctccaatcaggcacctacggtgtatatgagatcggcgggctcgtccctgtgtgggtcgtagtcgtcatcgccggaaccgcactggcatccgtaaccttttttgctacttcggattcgcagccacccaggttgcattggttgtttgcattcctcggtttcctgacctccgccctctggattaacgccgccgccacggaggttgtaaatatccttcggagtctcggggttgtgtttcgccttagtaacacggtgctgggcctgacacttcttgcctgggggaactcgatcggagacgccttctctgattttacgctcgctagacagggatatccccgtatggcgttctctgcgtgtttcggaggtattatcttcaatatccttgttggggttggtcttgggtgcctcttacagatctctcgttcccacactgaagtgaagctggagcccgatggtctgttagtctgggtgttagcaggcgccctcggcttaagcctcgtcttcagcttagtgagcgtacctctccagtgcttccaactatctcgggtctatggtttttgcctgctgctgttttatctgaatttcctggttgtggcccttttgacagaattcggggtcattcacttaaaatccatgtag

SEQ ID NO: 205823 - DNA, 906 bp, synthetic construct
  misc_feature 1..906: note = Description of Artificial Sequence: Synthetic coding sequence
  source 1..906: mol_type = other DNA
atggccgaccagcccaagcccatcagccccctgaagaacctgctggcgggaggctttgggggtgtgtgccttgtgttcgttggccaccccctggacacagtcaaagtccggctacagacccagccaccctccttacctggacagccgcccatgtacagcggcaccttcgactgtttccgaaagacacttttcagggagggcattaccgggctctaccgaggtatggctgccccaatcatcggtgtgaccccaatgtttgccgtctgcttcttcggctttggactaggcaaaaagctgcagcaaaagcaccccgaggatgtgctttcttatccacaattgttcgcagctgggatgttgagtggagtgtttaccaccggaatcatgacgccgggcgagcggattaagtgtttactccagatccaggcaagttctggtgagtccaagtataccgggacactcgattgcgccaagaaactgtaccaggaatttggaatccgcgggatctacaaaggcactgtgctcaccctaatgcgggacgtaccggcctctggcatgtattttatgacgtacgagtggctcaagaatattttcacccccgaaggcaagcgcgtttcagagctgagtgccccaagaatccttgtggcagggggtatagccggcatatttaactgggcagtggctatacccccagatgttttaaagtctagattccagacagctccaccaggcaagtatccaaacggttttcgggatgtgctgcgggagctgattcgtgatgaaggagtgacatctctctataaaggcttcaatgcagtgatgatacgcgccttccctgcgaacgcggcatgttttcttggattcgaggtggctatgaagttcctgaattgggccacacccaatctgtag

SEQ ID NO: 205824 - DNA, 756 bp, synthetic construct
  misc_feature 1..756: note = Description of Artificial Sequence: Synthetic coding sequence
  source 1..756: mol_type = other DNA
atgtacagcggcaccttcgactgcttccggaagaccctgttccgggagggaataaccggactgtacagagggatggccgcccctatcatcggcgtgactcctatgttcgccgtgtgctttttcggctttggactaggaaaaaagttgcaacagaaacaccccgaggacgtactgtcttaccctcagctctttgcagccggcatgttgtcgggagtgttcacaacagggataatgactcccggggaacgcattaaatgtctgctgcagattcaggcttcctccggcgagagtaaatacacaggcactttggattgcgccaagaagctgtatcaggaattcggcatcagaggcatctacaagggaacagtgttaacactcatgagagatgttccagcgtccggcatgtactttatgacctatgagtggttgaagaacatctttacccctgagggtaaacgggtaagcgagctgtccgctccgcggatacttgtggcaggcggaattgcaggtatctttaactgggcagtagccatccctcctgacgtcctgaagtctcgctttcagaccgctcctcctggcaaataccccaatggatttcgcgacgttcttcgggagctgattagggacgagggagtgacctccctctataagggctttaacgctgtcatgattagagcctttcctgccaatgctgcatgcttcctggggtttgaggtcgccatgaaatttcttaattgggcgacacccaatttgtag

SEQ ID NO: 205825 - DNA, 948 bp, synthetic construct
  misc_feature 1..948: note = Description of Artificial Sequence: Synthetic coding sequence
  source 1..948: mol_type = other DNA
atgacccaccaggacctgagcatcaccgccaagctgatcaacggcggagtggctggcctcgtcggtgtcacttgtgtctttcctattgatctagccaaaacgcgcctgcagaatcaacatggcaaagcaatgtacaagggcatgatcgactgtctaatgaagactgcccgagctgagggattttttggcatgtaccgcggcgctgccgtgaacctaacacttgtcacccccgaaaaggcgattaaactcgccgccaacgatttctttagacggctgctgatggaagacggcatgcagcgcaatctgaagatggaaatgctcgctgggtgcggcgctggcatgtgccaagttgtggtgacttgcccgatggaaatgctgaagattcaacttcaggacgctgggcgcctggccgttcatcatcaagggtctgcctcagcaccgtcgacctcacggtcgtacaccacgggatcagcctccacacaccgcagaccctccgccaccttaattgcatgggagctccttaggacccagggcctggctggactgtatcgtggactgggggccaccttgctcagagatatccctttcagcatcatctactttcccctcttcgctaatctgaacaacctgggctttaacgagctggcgggcaaggcgagcttcgcccactcttttgtgtccggctgtgttgccgggtcaatagccgccgtggcagttacgccccttgacgtgctgaagactcgcattcaaaccctcaaaaaggggctgggcgaggacatgtacagcgggattactgactgcgccaggaagctgtggatccaggaggggccctctgcattcatgaagggggctggctgccgggccttggtgatagctcccttgttcggaattgcgcaaggagtctatttcattgggataggggaaagaattctgaagtgctttgactag

SEQ ID NO: 205826 - DNA, 948 bp, synthetic construct
  misc_feature 1..948: note = Description of Artificial Sequence: Synthetic coding sequence
  source 1..948: mol_type = other DNA
atgacccaccaggacctgagcatcaccgccaagctgatcaacggcggcgtggcaggcctcgtgggcgtaacctgcgtctttccaatagacctggccaagaccaggctccagaaccagcacggtaaagctatgtacaaaggcatgatcgactgcctcatgaagacggcccgggcagaaggcttctttggtatgtacaggggagctgccgttaatctgaccctggttactcccgagaaggccattaaattagctgcaaatgatttctttcgtaggctcttgatggaggacggcatgcaaaggaacctgaaaatggaaatgctagccgggtgtggtgcgggcatgtgccaggtggtagtgacttgtcctatggagatgctcaaaatccagttacaagacgctggacgcctggctgtccaccatcaaggctccgcctcagccccgagcacatcaaggtcgtacacaaccggtagcgccagcacacaccgaaggccttctgccacccttattgcatgggagctgctgcggacacaaggactcgcaggcctgtatcgcggccttggcgcaaccctactgcgggacattcctttcagcattatatacttcccactcttcgctaatctcaataacctgggcttcaatgagctagccggcaaggccagctttgcgcattcctttgtgagcgggtgtgtagcgggcagcatcgccgcagttgcagtcactcccctggatgttctcaaaacacgcatccaaacgctcaagaagggcctgggagaagacatgtactctggaatcacagattgcgcaagaaagttatggatccaggagggaccaagcgccttcatgaaaggtgcaggatgcagggctttagtcattgcccccctatttggcatcgcccagggtgtgtactttatcggcatcggtgaaagaattcttaaatgcttcgactag

SEQ ID NO: 205827 - DNA, 1716 bp, synthetic construct
  misc_feature 1..1716: note = Description of Artificial Sequence: Synthetic coding sequence
  source 1..1716: mol_type = other DNA
atggagaacgtgaaggagatcttcggccagaccatcatccaccaccatatccctttcaactgggattgcgaatttatccgattgcactttggacacaacagaaagaagcatttgaattataccgagtttacacaatttctgcaggaattgcagctggagcatgcccgccaagcctttgcacttaaagacaagtctaagtccggtatgatctcaggcttggacttcagtgatattatggtcacaataagaagtcacatgctgactcccttcgtcgaggagaatttggtgtcagccgccggggggtctatcagtcatcaagtttccttctcgtatttcaacgcttttaactctctgctcaacaatatggaactggtgagaaagatctatagtaccttggcagggacaagaaaggacgtcgaagtcacaaaagaggaatttgctcaaagcgcgatccggtatgggcaggtgactcctctggagatagacattctctaccagctagcagacctctacaatgcatctggacgactgaccttggctgatatcgagcgaatcgccccactggcggaaggcgccctgccatacaacctcgccgagctccaacgccaacaatctcccggcctaggccggcctatctggctgcagatcgctgaaagtgcctaccgtttcactcttggcagcgttgcgggcgccgtaggggccacagccgtgtacccaatagatttggtgaaaacaaggatgcagaatcaaaggggcagcggaagtgtcgtgggtgaactcatgtacaagaattcttttgactgcttcaaaaaagtgctgcgctatgaagggtttttcggattgtatcgcgggttgatcccacagctgattggcgtggcccctgagaaagcaattaaactgaccgtgaacgactttgtacgagataaatttacccgaagagacggctccgtgccattacccgcagaagttctggccggtggatgcgcggggggcagtcaggttattttcactaatcctctcgaaatcgtcaagatacggctgcaggtagctggggagatcacgacagggcctcgcgtctcggctctgaatgtacttcgagacctgggtatcttcggtctctataagggggctaaagcctgctttctacgcgatatccctttttctgccatctactttcccgtctacgcccactgtaagcttctcctagcagacgagaacggccatgttggcggattaaacctcctagctgcgggggctatggcaggcgtcccggctgcctcgctggtgaccccggcggatgttataaagacaaggctccaggttgcagctagggctgggcagactacgtacagcggcgttatagattgcttcagaaaaattttgagggaggagggtccctcggctttctggaagggtactgccgcgagggtgttcaggagctccccccagttcggtgtcactttagtgacgtatgaactgctgcagcgctggttctatatagattttggtggactgaaacccgcaggctccgagcccacccctaaaagccggatcgcagacctgccgcccgcgaacccggatcatatcggtgggtacagattagcaacagccacctttgctggaatcgaaaacaaattcgggctttacttacccaagttcaagtcacccagcgttgccgttgtgcagccaaaggcagctgttgcagccactcagtag

SEQ ID NO: 205828 - DNA, 2037 bp, synthetic construct
  misc_feature 1..2037: note = Description of Artificial Sequence: Synthetic coding sequence
  source 1..2037: mol_type = other DNA
atggccgtgaaggtgcagaccaccaagcggggcgacccccacgagctgaggaatatcttcctgcagtacgcctccaccgaggtcgacggcgaaagatatatgacccccgaggactttgtgcagcgttacctgggtttgtacaatgaccctaactctaacccaaagatagtacaacttttggccggggtcgcagatcagacgaaagacgggctgatatcctaccaggagtttctcgcatttgagtcagtgctatgcgctcccgactccatgttcatcgtggcattccagttgttcgataaatccggcaacggagaagtgacctttgaaaatgtgaaagagatcttcggacagacgatcatacatcaccacattccgttcaattgggattgcgaattcatccgtctgcactttggccataatcgcaagaagcacctgaattatactgagtttacccagttcctccaggagctgcagttggagcatgcccggcaggcctttgccctgaaggacaagtctaagtctggtatgattagtggcttagacttctctgacataatggttaccattcgaagccacatgttaactcccttcgtagaagagaacttggtgtccgcagccggcggcagtatatcgcatcaggttagtttctcctactttaatgccttcaatagtctgcttaataacatggagctggtgcgcaaaatctacagtacactagcagggacccgcaaggacgtggaggtgactaaagaagaatttgcccaatcagccatcagatacggccaagtgactcccttggaaatcgacatactttaccagctggccgatttgtataacgcatcagggagacttaccctggctgatattgagcgaattgccccactagcagagggggccctgccctacaatctggctgaactacagagacaacagtctccgggcctcggacgtcctatctggctgcaaatcgctgagagcgcttatcgttttaccttagggtctgtggctggagccgtgggtgctacagccgtctatccaatagacctggtcaaaactcgaatgcagaaccagcgaggatcggggagtgtcgtgggcgagcttatgtacaagaatagttttgactgcttcaagaaggtcttgcggtatgagggcttctttgggctgtacagagggttaattccgcagctcataggcgtggcccctgagaaggcaattaaactaactgtcaacgactttgttcgtgacaagttcacaagaagagatggctccgttcccctgcctgccgaagtgctcgctggaggttgcgccggtgggtcgcaagttatttttacgaacccattagagatagtgaaaattaggctacaggtcgctggcgagatcaccactggccccagggtgagtgcgttgaacgtgcttcgcgatctgggtatctttggactttacaagggggctaaggcctgtttcctgcgagatattcccttttccgcaatctactttcccgtctacgctcattgcaagctcttgttggcagatgaaaacggtcacgtgggcgggctcaatttattagccgctggcgctatggccggagtcccagcggcgtccctcgtgacacctgctgacgtgattaagaccagactgcaggtcgccgcccgtgctggccagaccacatacagcggcgtcatcgactgcttcagaaagattctcagagaggaagggccttccgccttctggaaggggactgctgcaagggtgttcagatccagccctcaatttggagtcactctggtgacctacgagctactgcagcgctggttttacatagattttggcggcttgaaacctgctggcagcgaacccactcccaagtctcgaatcgctgatctacctcccgcaaaccctgaccacataggaggttacaggcttgcaacggcaactttcgctggaatcgagaataaattcggtctctacttgccaaaatttaagtcccccagcgtcgcggtcgtccagccaaaagccgccgtggctgctacccagtag

SEQ ID NO: 205829 - DNA, 1944 bp, synthetic construct
  misc_feature 1..1944: note = Description of Artificial Sequence: Synthetic coding sequence
  source 1..1944: mol_type = other DNA
atggccgccggcctggccacctggctgcccttcgcccgggccgccgctgtggggtggcttcctctcgctcagcagccgcttccgcccgccccaggtgtgaaggctagccgaggcgatgaggtcctggtcgtaaatgtgagcggacggaggttcgaaacgtggaagaatactctggaccgatatcccgacaccctgctggggagctccgagaaagaattcttctacgacgctgactccggagaatactttttcgatcgcgaccctgacatgtttagacacgtgttgaacttttaccgaacaggacgcctgcactgtccacggcaggaatgcatccaagcgttcgatgaggagttagcattttacggcctggtgcccgagctcgttggggattgttgcctcgaggaatatcgtgatcgcaagaaagagaatgcggaaaggctggctgaggacgaagaagctgagcaagcgggcgatgggcctgctctgcccgcggggtcaagcttacgacagagactgtggagggcttttgagaaccctcacaccagcaccgcagccctggtcttttattacgtcaccgggttcttcatagccgtctccgtgatagctaatgtcgtggaaacaatcccatgccgggggtccgcgcggcggagcagccgcgagcagccatgtggtgagcggttcccccaagctttcttctgcatggacacagcctgcgtcctcatatttactggtgaatacctcctgcgcctttttgctgccccgtccaggtgtagatttctgcgtagcgttatgtctctgatcgacgttgttgccattctgccatattatatcgggttgctggtgcccaaaaacgacgatgtctccggcgcctttgtgacgttgagagtgtttagagtgtttcggatcttcaagtttagtcgtcattcccagggtcttaggatcttgggttataccttgaagagttgcgcctctgagctggggtttctccttttttccttaacgatggctattataatcttcgcaaccgtcatgttctacgccgaaaagggaaccaataagacaaacttcaccagtataccagccgccttttggtatacaatcgttacaatgaccaccctagggtacggcgacatggtgcccagcactatagctggaaaaatttttggcagcatatgtagtctgagcggcgtgctggtcatcgctttgccggttcctgtgatagtgagcaacttctcgcgaatttatcatcagaatcagcgggctgacaaacggcgtgctcagcagaaagttaggctcgctagaatcaggttggccaaatccggaactacgaatgcctttttacagtataagcagaatggagggctggaggacagtggctctggggaggagcaggccttatgcgtgagaaacaggtctgcttttgagcagcagcatcaccacctactgcattgtctggaaaaaacaacatgccacgagttcaccgacgagttaacatttagcgaagctcttggcgccgtgtctcccggcgggagaacttcgaggtcgaccagcgtcagctctcaaccagttggccctggctctttactcagttcttgctgccccaggagggccaaacgccgggccatcagactggccaattccaccgcctccgtctccagagggtcaatgcaggagcttgatatgcttgcaggcctacggcgatcacatgccccccagagccggtcgtccctgaacgcaaagccccacgattcccttgacctgaattgcgactctagggactttgtggctgccataatcagtatacccacgcctcctgccaacacaccagatgagtcccaaccctctagtccgggcggaggtggtcgggctgggtccactttgcggaactcctccctaggcaccccctgtctgtttcctgaaaccgtcaaaatcagttcactttag

SEQ ID NO: 205830 - DNA, 1062 bp, synthetic construct
  misc_feature 1..1062: note = Description of Artificial Sequence: Synthetic coding sequence
  source 1..1062: mol_type = other DNA
atgggcatcttccccggcatcatcctgatcttcctgcgggtgaagtttgccaccgcggccgtaatccatcagaagtctaccacggtttcacacgagatgagtggtctgaattggaaaccgtttgtgtatggtggccttgcctcaattgtcgccgagtttggcacttttcccgtggatttgaccaaaaccaggctccaggtccagggccagagcatagacgccagattcaaagaaatcaaataccgcggcatgttccatgccctgttccggatatgcaaagaagaaggggtcctggcattgtacagtgggattgcaccagctctgctgcgccaggccagctacggcacaattaagattggcatttaccaatcgctgaagcgactgtttgtggagagactggaggacgagacgctgctgataaatatgatctgtggcgtggtatccggtgtgattagctccacgattgcaaacccgaccgacgttctgaagatccgcatgcaggcacaaggcagcctgttccagggcagcatgatcggaagtttcatcgacatttatcagcaggaaggtacccgcggcctctggcgttgcctgtgttctaaagctgtcaccgggtgtgttctatggctcatgccagtcatccccgccctgtgggaggccaacgcgggcggtagtcttgagggcgtggtgcctaccgcccagagggccgccatcgtggtcggagtcgaactgcctgtctatgatatcacgaaaaaacatttgatcctttcaggaatgatgggagatactattttgacacacttcgtaagttcatttacttgcggcttggccggggcattagcctcaaaccctgtggatgtggtacgtacccgaatgatgaaccaacgggccattgtggggcatgtggacctatataagggcactgttgatggtatcctaaaaatgtggaagcatgagggcttctttgccctgtacaaggggttttggcctaactggttgcggctgggtccttggaatatcatcttttttatcacatacgaacagctaaagaggctgcagatctag

SEQ ID NO: 205831 - DNA, 969 bp, synthetic construct
  misc_feature 1..969: note = Description of Artificial Sequence: Synthetic coding sequence
  source 1..969: mol_type = other DNA
atgggcatcttccccggcatcatcctgatcttcctgcgggtgaagtttgccacagccgctgtgatccaccaaaagagcacaaccgtgtcacacgagatgtcgggcctcaattggaagccattcgtgtacggtggattggccagcattgtggcagaattcggcacattcccagtcgatctgactaagacaagactgcaggtccagggtcagtctatagatgcaaggttcaaggagataaaatatcgtggcatgttccacgccctgttcaggatctgtaaagaggagggcgtgcttgccctgtattcgggtatagctccggccctcctgcgccaggcaagctacggcaccatcaagatcgggatatatcagtctctaaagcggcttttcgttgagagactggaggatgagaccttgttgataaatatgatctgtggagtcgtatctggagtcatatcgagtacgatagccaatccaacggatgttcttaagattcggatgcaggcacaggggtccttgttccagggttccatgattggcagctttattgacatttaccaacaggaggggacccggggcttgtggcggggggtagtgcctactgctcaacgcgccgctatagtggtgggagtggagctgcctgtgtacgatatcaccaagaagcacctcatcctgtctgggatgatgggggacaccattctaacccacttcgtgagctccttcacttgtggcctggccggcgctcttgcctctaatcccgttgacgttgttagaacccgaatgatgaaccagagagccattgtgggtcacgtggacctatacaaagggacggtggacggcattctgaagatgtggaagcatgaggggttctttgctctttataaggggttttggccgaactggctgcggttgggcccctggaacattattttttttataacgtatgagcagctcaagaggttgcagatctag

SEQ ID NO: 205832 - DNA, 597 bp, synthetic construct
  misc_feature 1..597: note = Description of Artificial Sequence: Synthetic coding sequence
  source 1..597: mol_type = other DNA
atgggcatcttccccggcatcatcctgatcttcctgcgggtgaagtttgctacggctgccgttattgtttcaggccaccagaagtctactacagtgagccacgagatgagcggcctaaattggaaaccatttgtgtacggaggccttgctagtatagtggcagaattcggcactttccccgtggatctcacaaaaacgaggctacaggtgcagggtcaaagtatagacgccagattcaaggagattaagtacagaggcatgttccatgcactgttccgcatctgtaaggaggaaggagttctggctctgtatagcggaattgctccagctttgttgcggcaggcttcatatggcaccatcaaaatagggatctatcagtcacttaaacgccttttcgtggagagattagaggatgagaccttgctgatcaacatgatctgcggggtagttagcggcgtgataagtagtacaatcgccaaccccacggacgtgctgaagatcaggatgcaggctcagggaagtttgttccaagggtcaatgatcggctctttcatcgacatataccaacaggaagggacccgaggcctgtggcgctag

SEQ ID NO: 205833 - DNA, 618 bp, synthetic construct
  misc_feature 1..618: note = Description of Artificial Sequence: Synthetic coding sequence
  source 1..618: mol_type = other DNA
atgagcggcctgaactggaagcccttcgtgtacggcggcctggccagtattgtcgcggaatttggcacttttccagtagacctgactaagactcgcctccaggttcagggacagagcattgatgctaggttcaaagagattaagtacagagggatgtttcacgcactattccgaatttgcaaagaggagggcgtcctcgccttgtattccggtattgctccggcactcctgaggcaagcctcgtatgggaccattaagatcggaatataccaatcacttaaaaggctgttcgttgaaaggctagaagatgagacactcctgatcaacatgatatgcggagtggtaagtggagtgatctcatctactattgctaatcctacagatgttttgaaaatccgtatgcaggctcagggatccctgtttcaggggagtatgattgggtcttttatagacatataccagcaggaaggtacccgcgggctttggagaggcgtggtccccactgcccaaagggcggccatcgtcgtgggagtcgagctgccagtgtatgacataacaaagaaacacctcatactgagcgggatgatgggcgatacaatcctaactcatttcgtgtag

SEQ ID NO: 205834 - DNA, 723 bp, synthetic construct
  misc_feature 1..723: note = Description of Artificial Sequence: Synthetic coding sequence
  source 1..723: mol_type = other DNA
atgggcatcttccccggcatcatcctgatcttcctgcgggtgaagttcgcgacggccgctgtcatcgtctctggtcatcagaagtctaccacagtctcccacgagatgtctggactgaactggaaacccttcgtgtacgggggtctcgcgagtattgtggccgagtttggaacttttcccgttgatctgaccaaaacaaggttgcaagttcaagggcagagtatcgatgctaggttcaaggagatcaagtacagaggaatgttccacgccctattcaggatctgcaaagaagaaggagttctggctctgtactcaggcattgcccccgctcttttgaggcaggcctcctacggtaccataaaaataggaatttaccagtcactcaagaggttgttcgtggagcgccttgaggacgagacccttctgatcaacatgatatgcggggtggtgagcggggtgatctcctcaaccattgcgaaccctaccgacgttttaaagatccgcatgcaggctcagggatctcttttccagggctccatgattggctccttcattgacatctatcagcaggagggcacccggggattgtggcgcggggtggttccaaccgcccaaagggccgctattgtggtgggtgttgagctgcccgtgtatgacattacaaaaaagcacctgatcctgtcaggtatgatgggggataccatcttgacccattttgtgtag

SEQ ID NO: 205835 - DNA, 972 bp, synthetic construct
  misc_feature 1..972: note = Description of Artificial Sequence: Synthetic coding sequence
  source 1..972: mol_type = other DNA
atggccgacaagcagatcagcctgcccgccaagctgatcaacggcggcatcgccggactgataggtgtgacttgcgtttttcctattgatctggccaagacccgcctgcagaatcaacaaaatggtcaacgcgtctatacatcaatgagtgactgtctaatcaagaccgttcggagtgaaggctacttcggtatgtatcgtggagcagctgtgaacctaacccttgtaacccctgaaaaagccataaaactggctgctaacgacttcttccgacatcagttatctaaagatggccagaaacttacactcctgaaggaaatgctggctggctgcggggccggaacatgtcaggtaatcgtcactacacctatggagatgctgaagatacagcttcaggacgcgggcaggattgcagctcagcgaaagattttggcagcacaaggacagctctcagcgcagggcggcgcacagccaagcgttgaggctcccgcagctccacgcccaactgcaacacagctcacacgtgacttgctacgctcccgaggaatcgccggattgtacaaaggcctgggcgccacgcttctgagagatgtgcccttttctgtggtatactttccattgttcgcaaaccttaatcagcttgggaggcctgctagcgaggagaagagccctttctacgtctcattcttggcagggtgcgtcgcggggtccgctgccgccgtggccgttaacccatgcgacgtggtcaagacacgacttcagagcctgcaacggggcgtgaacgaggacacatacagcgggattctcgactgtgcccggaagattctgaggcacgagggaccatcagccttcctcaagggagcctattgcagagccctcgtgatagcacccctgtttggaatcgctcaggtggtctatttcctcggaattgctgagtctctgctggggctgctccaggacccacaggcatag

SEQ ID NO: 205836 - DNA, 333 bp, synthetic construct
  misc_feature 1..333: note = Description of Artificial Sequence: Synthetic coding sequence
  source 1..333: mol_type = other DNA
atggccgacaagcagatcagcctgcccgccaagctgatcaacggcggtatcgctgggttgataggcgttacctgcgtattcccaattgacctggccaagacccgtctgcagaatcagcagaatggtcagagggtgtatacctccatgagcgactgtctcattaagactgtgcgctcagaggggtatttcggaatgtaccgaggagcagccgtgaatctgacacttgtgacccccgagaaggccattaagctggcagccaatgatttcttcagacaccagctgagtaaagacgggcaaaaactcactctgctcaaggagatgctcgctggctag

SEQ ID NO: 205837 - DNA, 384 bp, synthetic construct
  misc_feature 1..384: note = Description of Artificial Sequence: Synthetic coding sequence
  source 1..384: mol_type = other DNA
atggccgacaagcagatcagcctgcccgccaagctgatcaacggcggcatcgccggcctgatcggcgtcacatgtgtcttcccaatcgacctagccaaaactcggctccagaaccagcagaacggacagcgcgtgtatacgtctatgtcagactgtttaatcaagacagttagatctgaaggctacttcggaatgtacaggggagccgctgtgaatctgactctggtcacgcccgaaaaggctatcaaattagctgcaaacgacttcttcagacatcagctatccaaggacggacagaaactcaccctcttaaaagagatgctggctggatgtggtgccggcacctgccaggtgattgtaaccactcctatggaaatgctatag

SEQ ID NO: 205838 - DNA, 360 bp, synthetic construct
  misc_feature 1..360: note = Description of Artificial Sequence: Synthetic coding sequence
  source 1..360: mol_type = other DNA
atggccgacaagcagatcagcctgcccgccaagctgatcaacggcggaattgctggcttgataggtgtcacatgcgtatttccaattgacctggctaaaacccggctccagaaccagcagaacggacagcgtgtgtacacttccatgagtgactgcctgattaagacagtccgatcggaaggctatttcgggatgtaccggggtgccgccgttaacctgactctggtcacccctgagaaagctatcaaactagcagcgaatgattttttccgtcatcaattgtcaaaagacggacaaaaattaactctgcttaaggaaatgcttgctggatgtggcgctggaacctgtcaggtcatttag

SEQ ID NO: 205839 - DNA, 372 bp, synthetic construct
  misc_feature 1..372: note = Description of Artificial Sequence: Synthetic coding sequence
  source 1..372: mol_type = other DNA
atggccgacaagcagatcagcctgcccgccaagctgatcaacggcgggattgccggcctgatcggagtgacatgcgtgttcccaattgacctggcaaagacacggttgcagaatcaacagaatggccagcgggtctacactagcatgagcgactgcctgatcaagaccgtgaggtctgagggctactttggaatgtaccgaggcgccgccgtaaatcttacactggtaacccctgagaaggccatcaaacttgctgcgaatgattttttccgccaccagttgtctaaagacggtcaaaagctgacactccttaaggaaatgttggccgggtgcggggccggaacctgtcaagtgattgttacaacaccctag

SEQ ID NO: 205840 - DNA, 342 bp, synthetic construct
  misc_feature 1..342: note = Description of Artificial Sequence: Synthetic coding sequence
  source 1..342: mol_type = other DNA
atggccgacaagcagatcagcctgcccgccaagctgatcaacggcggaattgcgggcctgataggtgttacatgtgttttcccgatagacctggcaaaaactcgtttgcagaatcagcaaaacgggcagcgtgtgtatacttccatgtcagattgtctgatcaaaacagtgcggtccgaagggtattttgggatgtatcgaggtgcagcagtaaacttgaccttggtcactcctgagaaggccattaaactagcagcaaatgattttttcagacatcagttgagtaaggacggccaaaagctgacacttctgaaggagatgctcgcaggatgtggtgcttag

SEQ ID NO: 205841 - DNA, 237 bp, synthetic construct
  misc_feature 1..237: note = Description of Artificial Sequence: Synthetic coding sequence
  source 1..237: mol_type = other DNA
atggccgacaagcagatcagcctgcccgccaagctgatcaacggcggcatcgctggcctgattggcgtaacctgtgtgtttccaatagaccttgccaaaacccggctccaaaaccagcagaatggccaaagagtgtatacctccatgagcgattgtctcattaagactgtgcgatcggaggggtattttggcatgtatagaggggccgcggtgaacttaacccttgtaactccttag

SEQ ID NO: 205842 - DNA, 180 bp, synthetic construct
  misc_feature 1..180: note = Description of Artificial Sequence: Synthetic coding sequence
  source 1..180: mol_type = other DNA
atggccgacaagcagatcagcctgcccgccaagctgatcaacggcgggatcgccggactgattggtgtaacttgcgtgttcccaatcgatctcgcgaaaacaagactacagaatcagcagaacggtcagcgggtctatacctctatgagcgactgcttgatcaagaccgtcaggtcttag

SEQ ID NO: 205843 - DNA, 972 bp, synthetic construct
  misc_feature 1..972: note = Description of Artificial Sequence: Synthetic coding sequence
  source 1..972: mol_type = other DNA
atggccgacaagcagatcagcctgcccgccaagctgatcaacggcggtatagcagggctcatcggtgtcacatgcgtgttcccgattgatctcgcaaaaactcggctccaaaatcagcaaaatggccagcgtgtttatacaagcatgtccgactgcctgattaagactgttaggagtgagggctacttcggtatgtataggggggccgccgtgaatctcaccctcgttacccccgagaaggccatcaagcttgcagcaaatgatttctttaggcaccagcttagcaaggacgggcagaaactcactctgctgaaagagatgctagccgggtgtggggcaggcacctgccaggtgatcgttacaacgccaatggagatgttgaagattcagctgcaggacgcgggccgcatagctgcccagcggaaaatacttgccgctcaaggccagctgtccgcgcaggggggagcacagccatcggtggaggccccagccgcacctaggccgacagctactcagctcacccgcgaccttttgcgcagccgcggtatcgccgggctgtataagggcttaggagcaaccctcctgagagacgtcccattctcggttgtgtacttcccattgtttgctaatcttaatcaactgggacgcccagcaagcgaggagaagagccccttttacgtgagttttttggccggatgtgttgccgggagtgcagctgctgttgcagtgaatccatgcgatgtagttaagacacgacttcagtcactccagaggggagttaatgaagacacctatagcggtatccttgactgcgctagaaaaattctcaggcatgagggcccatctgcctttttgaaaggcgcttattgtcgtgccctcgtaatagcgcctcttttcgggattgctcaggtggtgtacttcctagggatcgccgaatctctgctgggccttctgcaggacccccaagcctag

SEQ ID NO: 205844 - DNA, 345 bp, synthetic construct
  misc_feature 1..345: note = Description of Artificial Sequence: Synthetic coding sequence
  source 1..345: mol_type = other DNA
atggccgacaagcagatcagcctgcccgccaagctgatcaacggcggcattgcaggtttgatcggagtgacctgtgtatttcctattgatctggctaagactagactgcaaaatcaacaaaacggtcagcgggtgtacacgtccatgtccgactgtctcatcaagaccgtacggagtgaagggtacttcggcatgtatcggggcgctgcagtcaatctaactctagtgacacctgaaaaggccattaaactagctgcgaatgatttcttccggcatcagctttccaaagacggacagaagctcaccttactcaaagaaatgttggccggatgcggagccggctag

SEQ ID NO: 205845 - DNA, 237 bp, synthetic construct
  misc_feature 1..237: note = Description of Artificial Sequence: Synthetic coding sequence
  source 1..237: mol_type = other DNA
atggccgacaagcagatcagcctgcccgccaagctgatcaacggcggcatagctgggctcataggggtgacgtgtgtgtttcccatcgacctggccaaaacacgactgcagaaccagcagaatggacagagggtctacacctcaatgtctgattgccttattaaaacagtccgctcagaaggatactttggcatgtatcgaggcgccgctgttaatctgactttagtcaccccctag

SEQ ID NO: 205846 - DNA, 321 bp, synthetic construct
  misc_feature 1..321: note = Description of Artificial Sequence: Synthetic coding sequence
  source 1..321: mol_type = other DNA
atggccgacaagcagatcagcctgcccgccaagctgatcaacggcgggatcgctggcctaataggtgtgacctgtgtgttccccatcgatctggccaaaactcgcctgcaaaaccaacagaacggccagagggtgtacaccagcatgagcgactgcttgattaaaacagtgaggtctgaggggtactttgggatgtacaggggggccgccgttaatctgacgctggttacaccggagaaagccattaagttggcggcgaacgatttctttaggcatcagctgtcaaaagatggacagaaactgaccttgcttaaggagtag

SEQ ID NO: 205847 - DNA, 408 bp, synthetic construct
  misc_feature 1..408: note = Description of Artificial Sequence: Synthetic coding sequence
  source 1..408: mol_type = other DNA
atggccgacaagcagatcagcctgcccgccaagctgatcaacggcgggatagcggggctaataggcgttacttgtgtttttcccattgatctcgccaagacacggctccagaaccagcagaatgggcagcgcgtatacacatcaatgagcgactgccttataaagacggtgagatctgaaggatacttcgggatgtaccgcggcgcggctgtgaacctcaccctggtgaccccagaaaaggctattaaactggcagcaaatgactttttcagacaccaactaagtaaggatggccagaaactgaccttgctaaaggagatgttggctggctgcggggcaggcacatgtcaggtcatcgttactaccccaatggaaatgttgaagatacaactgcaggatgccggttag

SEQ ID NO: 205848 - DNA, 948 bp, synthetic construct
  misc_feature 1..948: note = Description of Artificial Sequence: Synthetic coding sequence
  source 1..948: mol_type = other DNA
atgcaccgggagcccgccaagaagaaggccgagaagcggctgttcgatgcatctagtttcgggaaggacttgctcgccggaggggtggctgcagccgtttcgaaaaccgctgtcgcaccgatcgagcgtgtaaaacttctgcttcaggtccaggctagctctaagcagatttctcctgaagccaggtacaagggaatggtagattgcttggtaagaattccccgcgagcagggttttttttctttttggagagggaatctcgcaaacgtgattcggtacttcccaactcaagcgctgaatttcgccttcaaagacaaatataagcagctgttcatgagtggggttaataaagaaaaacagttttggagatggttccttgctaacctggcctccgggggtgctgctggtgcgacttcactgtgcgtggtctatccactggatttcgcacggacgagactcggagtggatatcgggaaaggtccggaggagcggcaatttaaaggactgggagactgcataatgaaaatagcgaagtctgacggtatcgctgggctttaccagggctttggagtctctgtccaaggcatcatcgtatacagagcctcttactttggcgcatacgacaccgttaaaggtctcctaccgaaacctaagaaaacacccttccttgtcagcttcttcatagctcaggtcgttactacgtgttctggcatactgagctacccgttcgatacagtcaggaggcgcatgatgatgcagagcggagaagctaaacggcagtataaggggaccctggactgcttcgttaagatataccaacacgagggcatctcctcgttctttcggggagcgttttcaaacgtgttacgtgggactggcggcgctctggttctcgtgctctacgataagatcaaagaattctttcacattgatattgggggtaggtag

SEQ ID NO: 205849 - DNA, 897 bp, synthetic construct
  misc_feature 1..897: note = Description of Artificial Sequence: Synthetic coding sequence
  source 1..897: mol_type = other DNA
atgggcgaccacgcctggagcttcctgaaggacttcctggccggcggcgtagctgcagctgtttcgaaaaccgcagtcgcccccatcgaaagagtgaaacttctcctgcaggtgcagcacgccagcaagcagattagcgcggaaaagcaatataagggcatcatcgattgcgtggtaaggatccctaaagaacagggctttctctccttttggcgaggcaatctggctaacgtgattcggtacttcccaacccaggccctgaattttgcattcaaggataaatacaagcagctatttctggggggggttgacaggcacaaacagttttggaggtacttcgccggaaacctggcaagtgggggggctgctggggccacttctctttgctttgtgtatcctctcgatttcgcccggacacgtctggcagccgacgttggaaagggggccgcgcagcgggaatttcacggcctgggcgattgcatcattaagatctttaaatccgatggcctgcgaggtctctaccaggggttcaacgtatcagtgcaaggaatcatcatttatagagcggcttacttcggggtctacgatactgctaagggcatgctccccgacccgaaaaatgttcacatcttcgtgtcttggatgatcgcacagtctgtgaccgccgtggcggggttagtatcttacccattcgacaccgttagaaggcgcatgatgatgcagagcggcaggaaaggcgcagacattatgtacaccggcacagtagattgctggagaaagatcgccaaggacgagggtgctaaagcctttttcaagggcgcttggagcaacgttctgcggggtatgggaggggccttcgtgttagtgctatatgatgagatcaagaagtacgtgtag

SEQ ID NO: 205850 - DNA, 897 bp, synthetic construct
  misc_feature 1..897: note = Description of Artificial Sequence: Synthetic coding sequence
  source 1..897: mol_type = other DNA
atgaccgacgccgccgtgagcttcgccaaggacttcctggccggcggcgtcgccgcagccatcagtaagaccgcagttgcacctattgagagagtgaagcttctcctccaggtacagcacgcttcaaaacagatcactgcagacaaacagtataaaggcatcattgattgtgtggtgcggatccccaaagagcagggggtcttatctttttggaggggaaatttagcaaatgtgattcgctacttccccactcaagcactcaactttgcatttaaggacaagtataagcagatttttctggggggtgtagataagaggacccagttctggctctacttcgccggaaacctcgcctccggaggtgcagccggcgcaacatccctttgcttcgtataccccctagacttcgccagaacccggttggccgctgatgtgggcaaggcgggagccgagagggagttccgagggttgggtgattgtctggtgaaaatttacaagtctgacggaatcaaaggtctgtaccagggcttcaacgtgtcggtgcaggggattatcatctaccgggcggcatactttgggatttacgacacagcgaagggaatgctgccagatccaaaaaacactcatatcgtaatcagctggatgatagctcagaccgtgacggctgtagcaggtctcaccagctaccccttcgataccgtgcggcgcaggatgatgatgcagtccggacgaaaagggacagatattatgtacacaggaacccttgattgttggcggaaaatcgcgcgggacgagggagggaaagctttcttcaagggagcatggtcaaatgtgctgagaggaatggggggtgcctttgtcttggttctctacgatgaaataaaaaaatacacctag

SEQ ID NO: 205851 - DNA, 897 bp, synthetic construct
  misc_feature 1..897: note = Description of Artificial Sequence: Synthetic coding sequence
  source 1..897: mol_type = other DNA
atgaccgagcaggccatcagcttcgccaaggacttcctggccggcggcatagcggcggccatttctaagacagcagtggccccaattgagagggtgaaactgttattgcaagtccaacacgcctcaaaacagatcgcggccgacaaacagtacaaaggaattgttgactgtatagtgcggattcccaaagaacagggggtgctgagcttctggcggggcaatttggctaacgtaatccggtatttcccaacacaggcactgaattttgctttcaaggataaatataagcaaatttttttagggggggtggataagcatacccagttctggcggtatttcgccgggaatttagctagtggaggcgccgctggcgccaccagcctctgcttcgtttatcctctggacttcgcaaggacccgattggctgccgacgtcgggaagagtggcaccgaacgggagttccgtggtttaggtgattgcctggtgaaaatcaccaagtcagatgggattcgtggactctaccagggctttagtgtttccgttcagggaatcataatatatagggctgcatattttggcgtgtacgacactgctaagggtatgctgccagatccaaagaacacgcacatcgtcgtcagttggatgatcgcacagactgtgacggcggtggcaggcgtcgtgtcataccccttcgacaccgtgaggcgacgcatgatgatgcaatccggccgcaaaggcgcggatatcatgtacaccggcaccgtggattgctggcggaagatttttagagatgagggcggtaaggcattttttaaaggcgcctggagtaacgtgctgagagggatgggtggtgccttcgtcctggtactctatgacgaactaaaaaaggtgatttag

SEQ ID NO: 205852 - DNA, 477 bp, synthetic construct
  misc_feature 1..477: note = Description of Artificial Sequence: Synthetic coding sequence
  source 1..477: mol_type = other DNA
atgaccgagcaggccatcagcttcgccaaggacttcctggccggcggaattgctgctgccatctccaagactgccgtggcacctattgagcgggtaaaacttctgctgcaggtgcagcatgcctctaagcagattgccgctgacaaacagtataaggggatagtcgactgtatagtgaggattccaaaggaacagggggtgctgtccttttggaggggcaacttagccaatgtcatcagatatttccctacccaggctcttaatttcgcatttaaggacaagtataagcagatatttctaggcggagtagacaagcatacccagttctggcgctatttcgctggaaatctggctagcggaggagccgcaggtgcgactagcctatgctttgtgtacccactggattttgccaggactcggctggccgctgatgtggggaagtctggaaccgagagggaattcagggggctaggttag

SEQ ID NO: 205853 - DNA, 2913 bp, synthetic construct
  misc_feature 1..2913: note = Description of Artificial Sequence: Synthetic coding sequence
  source 1..2913: mol_type = other DNA
atgctgtgcttcctggacgacggcgccggcatggaccccagcgacgccgctagtgtaattcagttcggaaagtccgcaaaacggacacccgagtcaacacaaataggccagtatgggaacggtctgaaatctgggagtatgaggatcggcaaggatttcatcctgtttacgaagaaagaggataccatgacgtgcctcttcctgtcccggacattccacgaggaggaagggatcgatgaagtgatcgtcccgctaccgacatggaacgccaggacacgagagccagttacagacaatgtagaaaaatttgcaatcgagacagagctcatctataagtactctccgtttcgaacggaggaggaggtgatgacccagttcatgaagattccgggcgattcgggaaccctggttataatcttcaatcttaagctcatggacaacggtgagcctgagttggacatcatctctaatcctcgagatattcagatggccgagacctcacctgaagggaccaaaccagagagacgctcttttcgagcctacgctgcagttttatacatagaccccaggatgagaatattcatccatgggcacaaagttcaaactaagaggcttagctgttgtctctacaagccccggatgtacaaatatacctcctcacgctttaaaaccagagctgagcaagaagtgaagaaagccgagcatgtcgctaggatcgcagaagagaaggcgagggaggccgagtctaaggcacgcactctcgaagtgcgacttgggggcgatctcacacgagacagcagggttatgcttaggcaggtgcagaacagagctatcactctgcgacgtgaggctgacgttaagaagagaataaaagaagcaaagcagcgtgcattgaaagagcccaaagagctaaactttgtcttcggagtaaacatcgagcacagggaccttgacggaatgtttatatataactgttcccggctcattaaaatgtacgaaaaagtgggaccccagcttgaggggggcatggcctgtgggggcgtcgtgggggtcgtggatgtgccgtaccttgtgttggaaccgacacacaataaacaggatttcgccgatgcaaaggagtataggcatctgctgcgagccatgggggagcatctcgcgcaatattggaaagatatagccatcgcgcagcgaggcattataaagttttgggatgagtttggatatctgtctgcgaattggaatcagccgccttccagcgagttacgttacaagcgccgccgggccatggaaatcccgaccaccatacaatgcgacttgtgtttaaaatggcggacattacccttccagctctcctctgttgagaaggactacccagacacttgggtttgttccatgaatccagatcctgaacaggaccgatgcgaggctagtgaacagaagcagaaggttccacttggcacgtttaggaaagacatgaagactcaggaggagaagcaaaagcagttaaccgagaagatcagacagcagcaggaaaaacttgaagctctgcagaagacaacaccgattcgatcacaagctgatctgaagaagctgcctctggaagtgactacacggccgagtactgaggagcccgtacgtcgcccccaaaggcctcggagtcctcccctgcccgcggtgatacgaaacgcaccctctaggccgcccagcctccctactccgcggccggctagccagccccgcaaggcaccagtcatttcctctacccctaaactccccgcactcgctgcgcgagaagaggcgagtacaagtcgtctactgcagccaccagaggctccgcgaaagcctgcgaacacacttgtaaagactgcctcccgacccgcccctctcgtgcagcagttgtcgcctagtctgctgcccaacagtaaaagcccacgcgaggtaccttctccaaaggttattaagactccagttgtgaagaagacggagtctccaataaaattgtcccctgctacaccatcgaggaagagatccgtggcagttagtgacgaggaagaagtggaggaagaggctgagcgtcgcaaggaaagatgtaaacgaggtagatttgtcgtaaaggaggagaaaaaggactctaacgagttgtccgactctgcaggagaggaagacagtgcggatctaaaacgggcgcaaaaggataaggggctgcatgtcgaggtgagggtcaaccgagagtggtacaccgggcgcgtgaccgctgtggaggtgggaaaacacgtggtcagatggaaggttaaattcgactacgtaccaaccgacaccacccctcgcgatcgctgggtggagaagggctctgaagatgtacgcctgatgaaaccaccatcaccagagcatcagtcactggacacacaacaggagggaggagaagaagaggtgggtcctgtagcacaacaggcgattgcagtggcggaaccatcgacctccgaatgtttacggattgaacccgatactaccgccctatccaccaatcatgaaacaatcgaccttctggtgcagatcctgcggaattgtctgaggtactttctacccccttcctttcctattagcaagaaacaattaagtgccatgaattcggacgaattaatctcttttcccttaaaggaatacttcaaacaatatgaggtgggcctgcagaacctgtgcaacagctaccaatctcgagccgactcccgggctaaagcttccgaggaaagtctccgaacatctgaaaggaaactgagggaaacagaggagaaacttcaaaagctgaggaccaatattgtggccctgctgcagaaagtccaggaagacatcgatattaacaccgacgatgagctcgatgcttacatcgaagatctcattacaaagggggactag

SEQ ID NO: 205854 - DNA, 627 bp, synthetic construct
  misc_feature 1..627: note = Description of Artificial Sequence: Synthetic coding sequence
  source 1..627: mol_type = other DNA
atgttcgagttcctgagcaaccacatgcgggacgcccagggccggctcgatagtacccgaggcctgctttgtggcttaggggcgggcgtggccgaggctgtggtggttgtgtgcccaatggagacaattaaagtcaagttcatccatgaccagacgagtccaaatcccaagtaccggggcttctttcacggcgtccgcgagatcgtaagagagcagggtctgaaaggcacctatcagggcttgacagcaaccgtgctcaaacagggctccaaccaggctataaggttcttcgtcatgacatcattaaggaattggtatcgcggcgacaatccaaacaaaccaatgaacccactgattaccggagtgttcggggctatcgcaggcgctgcatctgtgtttgggaatacaccattagacgtaatcaagacacggatgcaggggctcgaggctcataaatacaggaatacctgggactgcggtctgcagatcttgaagaaagagggcctcaaggcattttacaaggggaccgtgcctcgcctgggccgagtgtgcctcgacgtggcaatagtatttgtgatatacgacgaggtggttaagttgctgaacaaagtttggaaaacagactag

SEQ ID NO: 205855 - DNA, 999 bp, synthetic construct
  misc_feature 1..999: note = Description of Artificial Sequence: Synthetic coding sequence
  source 1..999: mol_type = other DNA
atggccgccgccaccgccgccgccgccctggccgccgccgaccccccccccgcaatgccccaggctgcaggagccggcggtcccaccactaggagggatttctactggctcagaagctttttggctggtggcattgcaggatgctgcgccaagaccaccgtggccccacttgaccgtgttaaggtgctgttgcaggcccacaatcaccactataaacacttgggggtcttttcagcattgcgtgccgttccacagaaggagggtttcttaggtctgtataagggaaatggcgcgatgatgatcagaatcttcccttatggggccatacagttcatggcctttgaacactacaagaccctgatcactactaagctgggaataagcggacatgttcaccgcctgatggccggatctatggccggtatgaccgcagtgatttgcacatatcctctcgatatggtgcgggtccggcttgctttccaggtaaaaggggaacactcctatacaggcatcatccacgcctttaaaaccatctacgccaaagaggggggtttctttggattttatcggggcctcatgcctactattcttggaatggcaccatatgccggtgtctcctttttcactttcggtaccttaaagtcagtaggattgagccacgcaccaacactcctggggcgaccatcaagtgataaccccaatgtcctggtgttaaagacacatgtaaatctgctgtgtgggggagtcgctggcgccatagcgcagactatatcctacccttttgacgtcacacggcgacgaatgcagctgggcacagtgctgcccgaattcgagaagtgccttaccatgagggacacgatgaaatatgtgtacggacaccacggtataaggaagggactttatcgggggcttagcctgaactacatcagatgtattccgtctcaggctgtggctttcactacatatgaactaatgaagcagtttttccaccttaattag

SEQ ID NO: 205856 - DNA, 705 bp, synthetic construct
  misc_feature 1..705: note = Description of Artificial Sequence: Synthetic coding sequence
  source 1..705: mol_type = other DNA
atgatgatccggatcttcccctacggcgccatccagttcatggcctttgagcactacaagaccctaatcacgacgaaattaggaatttcagggcacgttcacaggctgatggcgggatcgatggctggcatgacagcagtcatttgcacgtatccactggacatggttcgggtccgtctggcgttccaggtcaaaggagagcactcgtacaccgggattattcacgccttcaaaacaatttacgcaaaagaggggggattttttggattttatcggggtctcatgcctaccatcctcggaatggctccctatgcaggggtgagctttttcacttttggaactctcaaaagtgtaggcttgtctcatgctcctactcttttggggcgtcccagttctgacaatccgaatgtacttgtgctgaagacccatgtaaatctgttgtgcggaggtgtagctggcgccatcgcacagaccatatcctacccctttgatgtgacgagacgacggatgcaacttggcacagtcctgccagagttcgagaagtgtctgacaatgagggacaccatgaagtacgtgtacggacatcacggaattcggaaggggctgtaccgaggcctctccctaaattacataagatgcataccaagtcaggcagtagctttcactacctatgaacttatgaagcagttctttcacctaaactag

SEQ ID NO: 205857 - DNA, 906 bp, synthetic construct
  misc_feature 1..906: note = Description of Artificial Sequence: Synthetic coding sequence
  source 1..906: mol_type = other DNA
atgaagagcaaccccgccatccaggccgccatcgacctgaccgccggggccgctggcggcaccgcctgcgtgttaactgggcagccttttgacacgatgaaggtaaagatgcagacttttccggatctgtaccgcggtttgacagactgttgcttgaaaacatactcccaagttggctttagaggtttctacaagggcaccagtcccgccctgattgctaacatcgccgagaattccgtgctgtttatgtgctacggcttctgccagcaggttgttaggaaagtggccgggttggataagcaagctaagttgagcgatcttcagaatgcagccgccggatcattcgcttccgcctttgccgcactggtgctctgccccacagaactggttaaatgtaggcttcagaccatgtatgagatggagacaagcggaaagatcgctaaatcccagaatacagtctggagcgtgatcaaatctatactacggaaggacggtccattgggcttctatcatggcctctcttcgaccctactccgggaggtgcccggatacttttttttttttggaggctatgagttgtcaaggagtttcttcgccagtggacgctcaaaagatgagctgggtccggttcctctgatgctttctggtggggtcggagggatatgtctgtggttagctgtatacccagtggattgcatcaagtcccggatacaggtacttagcatgtctgggaagcaagcgggattcatccgtacctttatcaatgtagtgaagaacgagggcatcacagcactgtacagcggtctgaagccaaccatgattcgagcgttccccgccaacggtgccctgttcctggcttatgaatatagtcgaaaacttatgatgaaccagctggaagcctactag

SEQ ID NO: 205858 - DNA, 402 bp, synthetic construct
  misc_feature 1..402: note = Description of Artificial Sequence: Synthetic coding sequence
  source 1..402: mol_type = other DNA
atgaagagcaaccccgccatccaggccgccatcgacctgaccgccggcgcagccggagggaccgcctgtgtgttaacgggtcaaccattcgatactatgaaagtaaagatgcagacctttcctgacctctatcgcggactgaccgattgctgtctcaaaacgtacagccaagtgggcttcagaggattttataaggggacatctccagccttgatcgcaaatatagctgagaattctgtgcttttcatgtgttacggattttgccagcaagttgttaggaaggtggcggggctggataagcaggcaaagctctcaacagtttggagcgttatcaagagcatactccgcaaagacggccctcttggcttttaccacggattgtcctccacccttctgcggtag

SEQ ID NO: 205859 - DNA, 402 bp, synthetic construct
  misc_feature 1..402: note = Description of Artificial Sequence: Synthetic coding sequence
  source 1..402: mol_type = other DNA
atgaagagcaaccccgccatccaggccgccatcgacctgaccgccggggcggcaggcggcactgcgtgtgtcttaactgggcagccatttgacaccatgaaagtcaagatgcagacttttcctgatttgtatagaggcttgactgactgctgccttaagacttactcccaggtggggtttcggggcttctataaggggacatctcccgctttaattgcgaatattgcagagaactctgtgctgtttatgtgttacggattctgtcaacaggtagtacggaaggttgctggcctggataaacaggcaaaactgtcaaccgtctggagtgtaattaaatcgattctgcgaaaagacggccctcttggattttaccacggcttatcgagtaccctcctccgatag

SEQ ID NO: 205860 - DNA, 906 bp, synthetic construct
  misc_feature 1..906: note = Description of Artificial Sequence: Synthetic coding sequence
  source 1..906: mol_type = other DNA
atgaagagcaaccccgccatccaggccgccatcgacctgaccgccggtgcggcgggcggtaccgcctgtgtgctgacaggccaaccattcgacacaatgaaggtgaagatgcaaacattccccgacctctaccgcgggcttactgattgctgtcttaagacctacagtcaagtaggctttcgcggcttttacaagggcacatctccagccctgattgctaatatcgccgaaaacagtgtgctgttcatgtgttatggcttctgccagcaggtagtacgcaaagtcgcaggactggacaaacaggccaaactcagcgacctccagaacgccgcagcgggctcctttgcgtccgcattcgccgcgctggtgctttgccctactgagctggtgaagtgtcgtctacaaacgatgtacgaaatggagaccagcgggaagattgccaagtcccagaacaccgtctggtctgtgatcaagtctatcctgcgcaaagatggccccctagggttctaccatgggctttccagtactctgctacgtgaagtgccagggtactttttcttctttggtggctatgaactgagcagaagcttcttcgcctccggaagatccaaagatgaattagggccagtgcccctcatgctgtccggcggcgttggtggaatctgtctgtggctggctgtgtacccagtagattgcattaaaagcaggattcaggtactgtccatgtctgggaagcaggcaggcttcattagaactttcattaacgtcgttaaaaatgagggaattactgctttgtactctggtctaaaacctacaatgattcgcgccttccccgcaaatggagctctcttcctggcatacgagtatagtaggaaattgatgatgaaccagctggaggcttactag

SEQ ID NO: 205861 - DNA, 726 bp, synthetic construct
  misc_feature 1..726: note = Description of Artificial Sequence: Synthetic coding sequence
  source 1..726: mol_type = other DNA
atgaagagcaaccccgccatccaggccgccatcgacctgaccgccggagccgctggcggaaccgcttgcgtactcactggacagcctttcgacacaatgaaagtggccggcctggataagcaagccaagttatccgatttacagaacgccgccgccggctcttttgcgagcgcttttgccgccctggtcttatgtcctaccgaactggttaagtgcaggctgcagaccatgtacgaaatggagaccagtggcaagatcgcaaagagtcagaacaccgtgtggagcgtgataaaaagcattctgcgtaaggacggaccactcgggttctaccatggtttatcttctacactactcagagaggttccaggctactttttttttttcggtggttacgagctttccagaagcttttttgccagcggaagaagcaaggatgaacttggccccgttcctcttatgttgagcggcggcgtgggcggtatatgcttatggctggcagtatacccagtagactgcattaagagccgcattcaagtcctgtcaatgagcggcaaacaggctgggtttattaggactttcattaatgttgttaagaacgagggcatcacggccctgtatagcggcttgaagccaacgatgatccgcgcctttcctgccaatggagccctgttcctggcctacgagtatagtcgaaagttgatgatgaatcaactcgaagcttattag

SEQ ID NO: 205862 - DNA, 906 bp, synthetic construct
  misc_feature 1..906: note = Description of Artificial Sequence: Synthetic coding sequence
  source 1..906: mol_type = other DNA
atgaagagcggccccggcatccaggccgccatcgacctgaccgccggagcggcgggtggtaccgcctgtgtcttaacaggccaaccatttgacactatcaaagtgaagatgcaaaccttcccggatctgtacaagggactgacagattgttttctgaagacctacgcgcaggtggggctaagaggcttttataaaggcaccgggccagctctgatggcctacgtggctgaaaactctgtgctattcatgtgttacggtttctgtcagcagtttgtacgcaaggttgccgggatggacaagcaagccaagttatctgatttgcagaccgccgcagccggcagttttgcttccgcttttgccgcgctggcgctgtgccccacagagctcgtaaaatgtcgtctacagacaatgtacgagatggagatgtcaggaaagattgctaagtcccacaacaccatttggtctgtggtgaaaggaattctgaaaaaggatggccctttgggattttaccacggactgtcatccaccctcttacaggaagtacccgggtacttcttctttttcggaggatacgaactctcccggagctttttcgcttcaggaagatctaaagacgagctgggccctgtgcatctcatgttatccggcggcgtggctgggatctgtctgtggctggtcgttttcccggtggactgcattaagtccaggattcaagtgttgagcatgtatggaaagcaggcaggcttcattgggactcttttgtccgtcgtaagaaacgaggggatcgtagctctgtactctggtctaaaagccaccatgattagggcgatccccgctaacggtgcacttttcgtggcatatgaatacagccggaagatgatgatgaaacagctggaagcttattag

SEQ ID NO: 205863 - DNA, 423 bp, synthetic construct
  misc_feature 1..423: note = Description of Artificial Sequence: Synthetic coding sequence
  source 1..423: mol_type = other DNA
atggccggctggaacgcctacatcgacaacctgatggccgacggcacgtgtcaggatgctgctattgtggggtataaggactcaccatcagtttgggctgctgtcccagggaaaacattcgttaatattacccctgctgaagtgggggtgctggtaggtaaggatcggtcttcattttacgtgaatggcctaacactgggcgggcagaaatgctcagtgatccgcgactcgctcctgcaggacggggagtttagtatggacctgcgtacaaaatccacagggggcgccccaacctttaatgtaactgtcaccaaaacagacaagactctggtactgctgatgggaaaggagggtgttcatggcggcctaatcaataaaaagtgctacgaaatggcaagtcatctgcgcaggagccaatattag

SEQ ID NO: 205864 - DNA, 792 bp, synthetic construct
  misc_feature 1..792: note = Description of Artificial Sequence: Synthetic coding sequence
  source 1..792: mol_type = other DNA
atggccgccaccgccagcgccggcgccggcggcatcgacggcaagccaaggacttctcctaagagcgtgaagtttctattcggcgggctggccggactgtcagctgggctgctgagacaagccacatacacgacgactaggttagggatctacaccgttctgttcgagaggttaactggagcagatggaacaccccccggttttctgctcaaggcagtgatagggatgacagccggcgctacaggggcctttgtaggaactcctgcagaggtcgccctgataagaatgaccgccgatggccggctacccgctgatcagaggaggggctacaaaaatgtgttcaacgctctgataaggataactcgcgaagagggggtcctgactctatggagggggtgcatccccacaatggctcgcgccgtggttgtaaacgctgcccaactggcaagctatagccaatccaagcagtttttgcttgattcgggttactttagcgataacattctctgtcacttctgcgcttctatgatctcgggtctggtgactaccgcggcatctatgcccgtggatattgctaagactcggattcagaacatgcggatgattgatggaaagcctgaatacaaaaacggcctggatgttctatttaaggtggtccggtatgaaggttttttttccctctggaaagggttcacgccttactacgcccggttagggccccatacggtgttaactttcatttttttagagcaaatgaataaggcctataaacggctgtttctgtcaggctag

SEQ ID NO: 205865 - DNA, 678 bp, synthetic construct
  misc_feature 1..678: note = Description of Artificial Sequence: Synthetic coding sequence
  source 1..678: mol_type = other DNA
atggagtactggtacgtggccctgaagcagcagagcctgaaggccgacatcctgccttccttgtttctgtccatattcctcgttaagggggtggtcaacgtacttttaaccacacctctttgggtcgtgaatacacgtctcaagctgcagggagccaaattcaggaacgaggacatcgttcccaccaactacaaggggatcatcgacgctttccaccagatcatacgcgacgagggcatttcagctctgtggaatggcacttttccttcactgctgctggtttttaaccctgctattcagttcatgttctacgaaggccttaagagacagctccttaaaaaacgcatgaaactgagctcattagacgtgttcatcatcggcgctgtcgccaaagctatagctacaacagtgacataccctttgcagacagtccagtccattctgcggtttggcaggcacagactgaatccagagaatcgaacacttggatctctgcggaatatattgtacttactacaccagcgcgtccgtagattcggcattatggggttgtataaaggcctggaggctaagctcctccagaccgtcctgactgctgccttaatgtttctggtctacgagaaactgactgcagctaccttcaccgttatgggtctgaagcgagcccaccagcactag

SEQ ID NO: 205866 - DNA, 279 bp, synthetic construct
  misc_feature 1..279: note = Description of Artificial Sequence: Synthetic coding sequence
  source 1..279: mol_type = other DNA
atgggcagcgtgaccgccatgaccgtgttcttccccctggacaccgccagactcaggctccaggtggacgagaaacgcaaaagcaagacaacccatatggtgctgctcgagattatcaaagaggaaggcctgctggccccctatcgggggtggttcccggtaatttcctcactgtgctgctccaacttcgtttatttttatactttcaacagtttaaaggcactgtgggtgaagggccagcacagcaccaccgggaaagacctcgtcgtgggcttctag

SEQ ID NO: 205867 - DNA, 924 bp, synthetic construct
  misc_feature 1..924: note = Description of Artificial Sequence: Synthetic coding sequence
  source 1..924: mol_type = other DNA
atggccagcgtgctgagctacgagagcctggtgcacgccgtggccggcgcggtggggtctgtgaccgcaatgaccgtgttttttcctctggataccgcccgactccgactgcaggtcgatgagaaacgcaagtccaaaacaacacatatggtcctgctcgaaatcatcaaagaagagggccttcttgccccatacagaggttggttccctgtcattagtagtctttgctgcagtaacttcgtgtatttctatacattcaatagcctaaaggcattatgggttaagggtcagcacagcactacaggcaaagacctggttgtcggctttgtggccggcgtcgtaaacgtactgctcacaactccgctgtgggtggtgaacacaaggctcaagctccagggagccaagttcaggaacgaggacatcgttccgaccaactataagggtattatcgatgcctttcaccagatcatccgtgatgaaggtatctctgccttgtggaacgggacattcccatcactattgcttgtcttcaaccccgccatacagttcatgttttatgaaggcctgaagcgccagctgttgaagaagcgcatgaaactttcctccttggacgtgttcattatcggtgcagtggccaaggcaatagccacgacagttacatacccactgcagaccgtccagtcaatccttcgattcggaagacaccgtttgaatcctgagaatcgcacacttggaagcctgcggaatatactgtacctgctgcaccaacgggtcagaaggttcggaatcatgggcctatacaagggtcttgaggctaaactgttgcagacagtgctgactgcagcactgatgttcctagtgtatgaaaagctgactgccgcgacttttaccgtgatggggctgaaaagagcccaccaacattag

SEQ ID NO: 205868 - DNA, 705 bp, synthetic construct
  misc_feature 1..705: note = Description of Artificial Sequence: Synthetic coding sequence
  source 1..705: mol_type = other DNA
atggccagcgtgctgagctacgagagcctggtgcacgccgtggccggtgctgtgggttctgttactgctatgacagtcttttttcctctcgatacagctagacttcgattgcagggagtggtcaatgtgctgctgactacacccctgtgggtggttaatactcgcctcaaactccagggagccaagtttaggaatgaagatatagttcctactaattataagggaattatcgatgcgttccaccagataataagggatgaaggcattagcgcactgtggaacggaacgttcccgtcactcttactcgttttcaaccccgcaatccaatttatgttctacgagggactgaagaggcaactcttaaagaagcggatgaaattaagtagcttggatgtgtttattataggagctgttgcaaaggcgattgcaacaacagttacttatccactgcagactgtgcagtcgattctccgcttcggtcgccacaggttgaaccctgaaaataggactcttgggtctctgcgtaatatcttatacctcttgcaccaacgcgttcgacggttcggaattatgggcctttacaaggggttagaagcgaagctacttcagaccgtgctgacagctgcgctgatgttcctagtctacgagaaactaaccgccgctaccttcactgtaatgggcttgaagcgcgcacaccagcactag

SEQ ID NO: 205869 - DNA, 813 bp, synthetic construct
  misc_feature 1..813: note = Description of Artificial Sequence: Synthetic coding sequence
  source 1..813: mol_type = other DNA
atgatcgacgagaagcggaagagcaagaccacccacatggtgctgttagaaataattaaggaagaaggactgctcgctccctaccggggctggttccctgtcattagttccttgtgctgctccaattttgtgtacttttataccttcaactccttgaaagccttgtgggtgaaagggcagcacagcacaaccggaaaggacttagtggtcggctttgtggctggcgttgtcaacgtgctgctgacaactccactctgggtcgtcaacacccggctgaagctgcagggagcaaagtttcgcaatgaggacattgtgcctactaactacaaagggataatcgacgccttccatcaaatcatccgggacgagggtatctctgctctgtggaacgggaccttccccagtctactcctagtttttaacccggcaatccagtttatgttttatgagggcctaaaacgtcagctccttaagaaacgaatgaagctgtccagtcttgacgtgtttataattggagccgtggcaaaagcgatcgcaacaacagtgacctaccctcttcagacagtccaaagcatcctgcgatttggaaggcataggttaaatcctgagaatcgcactctgggtagtcttcggaatatcctctacctccttcaccaaagggtccgacgattcggcataatgggcctctataaaggactggaagcaaaacttctacagaccgtcctgacagccgcgctgatgttcctcgtgtatgagaagttaacggccgccacttttacggtcatgggactgaagagagctcaccagcactag

SEQ ID NO: 205870 - DNA, 1086 bp, synthetic construct
  misc_feature 1..1086: note = Description of Artificial Sequence: Synthetic coding sequence
  source 1..1086: mol_type = other DNA
atgttcagcagcgtggcccacctggcccgggccaaccccttcaacacgccgcacttgcaattagtccacgacggcctgggggacctccgatctagctcacccggacctacaggccagccgagacgaccacgcaatctggccgctgctgccgtggaggagtatagctgcgagtttgggagcgccaaatactatgccttatgcggcttcggcggcgtattgtcatgcggcttaacacacaccgcagtggtcccattggaccttgtaaagtgccggatgcaggtcgacccacagaaatacaaaggcatttttaacggcttttccgttaccctgaaggaagacggagtgagaggattggccaagggatgggccccaacttttctgggatattcgatgcaggggctctgcaaatttggcttttatgaggtcttcaaggtgctgtacagcaatatgcttggggaggagaatacatacctatggcggacaagtctttacctcgctgcaagcgcctctgctgaattctttgccgacatagcactcgctccgatggaggcagcaaaggttagaatccaaacccagcccgggtacgctaatactttgcgggatgccgccccgaagatgtataaagaagagggactgaaggcattttataagggggttgctcccctgtggatgcggcaaatcccttataccatgatgaaattcgcttgctttgaacggaccgtggaggcgttgtacaagtttgtggtaccaaagccaagaagcgaatgcagtaagccggagcagctggtggtgaccttcgttgctggctatattgccggcgtgttctgcgccatcgtgtcccatccagctgactccgttgtctctgtgctcaataaggagaaagggtccagtgcctccctcgtcttaaagcgcctgggattcaagggggtgtggaagggactgtttgcccggatcatcatgattggcacactgacagctttacaatggttcatttacgatagcgtgaaggtgtactttagactgccaagaccccctcccccagaaatgcctgaatctctgaagaaaaagctggggcttacccagtag

SEQ ID NO: 205871 - DNA, 1776 bp, synthetic construct
  misc_feature 1..1776: note = Description of Artificial Sequence: Synthetic coding sequence
  source 1..1776: mol_type = other DNA
atggacgacctggacgccctgctggccgacctggagagcaccaccagccatatctctaagcggcccgtatttcttagcgaggagaccccatactcttaccccactggcaatcatacctaccaggaaatcgcagtgcctcctccagtccctccacctccttccagcgaagccctcaatggcactatcctcgatcctcttgatcaatggcagccatcatcatcccgctttatccaccagcaacctcaatcctctagcccagtctatggtagctccgctaagacatcaagcgtatccaacccacaggattctgtgggctccccctgctccagagtaggggaggaggaacacgtatatagtttcccaaacaaacagaagtcagcggaaccctcacctacagttatgagtacttccctaggttctaaccttagcgaattagaccgactgttactcgaactgaatgccgttcagcataaccctcctggctttcctgcagacgaggctaatagcagccccccactgccaggagctctgagccccctgtatggcgtaccggagacgaacagccccctcggagggaaggccggaccactcaccaaagaaaagcctaagcgcaacgggggtagaggcttggaggacgtgcggcccagtgtcgagagccttctggacgaactggaaagcagtgtgcctagccctgtgcctgctattaccgtgaaccagggtgagatgtcaagtccccagcgggtcacgagcactcagcaacagactagaatatccgcttcctccgcgactagagagttggatgagctcatggccagtctttccgactttaagattcagggactggagcagagagccgatggggagcgctgctgggccgctggttggccgcgggatggagggagaagctcccctggaggccaggatgaagggggcttcatggcccagggaaagaccgggtcctcctcacctcccgggggaccaccgaagccaggctctcagctggacagcatgctcggctctttacaatctgatctcaataaactgggcgtcgctacagtcgccaagggtgtatgcggcgcgtgcaagaagcctatcgcgggtcaggtagtaactgctatgggcaaaacctggcatccagagcacttcgtctgtactcactgccaggaagaaattgggtcacgaaattttttcgagagggatggtcagccatactgcgaaaaggactatcacaatctgtttagtcccagatgctactattgtaatggcccaatcttggataaggtggtgacggctttagacaggacctggcatcctgagcactttttctgcgcacaatgcggcgcttttttcgggcctgagggcttccatgagaaagatggcaaggcttactgtaggaaagattactttgatatgttcgctcccaagtgtggaggctgcgcacgcgctatcctggaaaactatatttcagctctcaatacactttggcatccagagtgctttgtttgtcgcgaatgctttacaccgttcgtcaacggatccttttttgagcacgacggtcagccctactgtgaagtgcactaccatgaaagacgtggctccttgtgtagtggatgccagaagccaatcaccggccgttgtataacagccatggccaagaagtttcatccagagcactttgtatgcgccttttgtttgaaacagcttaataagggaacttttaaagagcagaacgataagccttactgccaaaactgcttcctgaagctgttctgctag

SEQ ID NO: 205872 - DNA, 1086 bp, synthetic construct
  misc_feature 1..1086: note = Description of Artificial Sequence: Synthetic coding sequence
  source 1..1086: mol_type = other DNA
atgttcagcagcgtggcccacctggcccgggccaaccccttcaacaccccacatttacagctggtgcatgacggtctcggagacctacgcagttccagtcccggtcctactgggcagccccggcgacctaggaacctcgctgccgcagccgtggaagagtacagttgcgaatttggcagcgctaagtactacgccttgtgtggatttggaggtgtactatcttgcgggctgacacataccgccgtagtcccactggatcttgttaaatgcaggatgcaggtcgaccctcagaagtataagggtatcttcaacggcttctcggtaacactgaaggaagatggagtgcgtgggttggccaaggggtgggccccgacctttctggggtactccatgcaggggctatgcaagttcggcttttatgaagtcttcaaggtgctgtatagtaatatgcttggcgaagagaacacctatttgtggcggactagtctgtatttagcagcttcagcctctgccgagttttttgcagacatcgctctggcaccaatggaagctgccaaagtgagaattcagacccagcctggctatgctaatacactgagagacgccgctcccaagatgtacaaagaggaaggattaaaggctttttataagggagtcgcacccctgtggatgaggcagattccttacacaatgatgaagttcgcctgcttcgagagaactgtggaggctctttacaagttcgtggtgcccaagcccaggagcgagtgttccaaaccagaacaactggtcgtgacattcgtcgctggatacatcgcgggcgtattctgtgccatcgtgtcccaccctgccgattccgtcgtctccgtactcaataaggagaagggcagcagcgcttcactggttctgaaaaggctggggtttaaaggggtttggaaaggcctcttcgcaagaatcatcatgatcgggactttgactgcgctacagtggttcatttatgactcagtgaaagtttattttcggttgcccagaccgccacctcccgagatgcccgagagtttaaagaagaagctgggcttaacccaatag

SEQ ID NO: 205873 - DNA, 1086 bp, synthetic construct
  misc_feature 1..1086: note = Description of Artificial Sequence: Synthetic coding sequence
  source 1..1086: mol_type = other DNA
atgttcagcagcgtggcccacctggcccgggccaaccccttcaacactcctcacttacagttagtgcacgatgggctgggagacctcagaagcagcagtccaggccctaccgggcagcccagaaggcctcgcaacctcgcagcagctgcagtcgaagagtactcttgtgagttcgggtccgcgaaatattacgctctttgcgggttcggcggagtactgtcttgcgggctcacacatacagcagtggtccctctggatctggtgaaatgtaggatgcaggtggaccctcagaaatataaggggatcttcaatggattctcagtcacactgaaggaggatggggtgagaggattggccaaggggtgggcaccaaccttcttgggttatagcatgcaggggctttgcaaatttggcttctacgaagtgttcaaggtcctctactccaacatgctgggagaagagaacacttacctgtggcgcacctcattgtatctggccgcaagcgctagcgcagaatttttcgctgatatcgcattggcccccatggaggcggccaaagttcgaatccagacccaacccgggtacgcaaacactctacgggatgcagcacccaagatgtataaggaggaaggactaaaggccttttacaagggagtcgcccccctgtggatgaggcaaattccctacacaatgatgaagtttgcatgttttgagaggaccgtggaggcgctatacaagttcgtggttccaaaacctcgatctgaatgtagtaagccggagcagctggttgtgacgttcgtagctggatacatagcgggggtgttctgtgcgatagttagccacccggccgactctgtcgtatctgtgttgaacaaagagaaggggagctcagcgtccctggtgctgaagcgactaggatttaagggagtgtggaaaggcctttttgccagaatcattatgataggcaccctcactgctttgcagtggttcatttacgactctgtcaaggtgtacttccggttgcctaggccccctcctcccgagatgccagagtccctgaagaagaagctaggcctcacacagtag

SEQ ID NO: 205874 - DNA, 1089 bp, synthetic construct
  misc_feature 1..1089: note = Description of Artificial Sequence: Synthetic coding sequence
  source 1..1089: mol_type = other DNA
atgttcagcagcgtggcccacctggcccgggccaaccccttcaacaccccccacctccagctggtacacgacggattaggcgacctgagaagctcctcgcccgggcctaccggacagcccaggaggcctagaaacctggccgccgctgcagtggaagaacagtactcctgcgattacggctctgggcggttctttatcctctgtggactgggcggaatcatctcatgcggaacaacacatacagcactggtgcccctggacttggtcaagtgccgcatgcaggtggatccacagaaatacaaaggtatctttaatggtttttctgtgaccctgaaggaagacggggtacgaggactggccaagggctgggccccgaccttcctgggctactcaatgcaaggcctttgcaaatttggattctacgaagtgtttaaggtgctttatagtaatatgctcggggaggaaaatacttacctatggcgcactagcctgtatctggccgcgtcagcttctgccgaattttttgccgatattgctctggccccgatggaggccgctaaggtcaggatccagacacagcccggttacgcgaatacacttcgagatgcggccccaaagatgtataaagaggagggactgaaggccttctataaaggggtggctcccctgtggatgcgacaaataccctatactatgatgaagttcgcgtgcttcgagagaactgtcgaggcattgtacaagttcgtggtgccaaagcctagaagcgagtgtagcaagcccgagcagctcgtggtaacgtttgttgctggctacatcgcaggcgttttctgcgcaatagtgagtcacccggccgacagcgtggtttccgtccttaataaggagaagggttcatctgctagcctggttttaaagaggctggggttcaagggggtgtggaagggcctattcgccagaatcatcatgattggcaccctcacggcactgcagtggttcatctacgattcagttaaggtgtactttcgtctcccgagaccacctccacctgaaatgccggaatccctaaaaaaaaaactgggcctcacgcagtag

SEQ ID NO: 205875 - DNA, 1086 bp, synthetic construct
  misc_feature 1..1086: note = Description of Artificial Sequence: Synthetic coding sequence
  source 1..1086: mol_type = other DNA
atgttcagcagcgtggcccacctggcccgggccaaccccttcaacacaccccatttgcaactcgtgcacgatggcctcggcgacttgcggtcaagttcccctggcccaactggccagccacgccggcctaggaacctggccgccgcagcagtggaagaatactcatgcgaattcgggtccgccaaatattatgccctgtgcggtttcggtggagtgctttcatgcgggctgacacacacggccgtcgtgccgttggacctcgtgaaatgtcgcatgcaggttgacccccagaagtataaaggtattttcaatggtttctctgttacactgaaggaggacggcgtccgtgggctcgcgaagggttgggctcctacttttctagggtattccatgcagggtttatgcaaattcggattctatgaggtgtttaaagtgctgtattccaatatgttgggagaggaaaacacctatctgtggcgtacctccctctacctggccgccagtgctagtgcagaattcttcgcggacatcgctctcgccccaatggaagccgccaaagtgagaatccaaactcagccaggctacgcaaacacacttcgcgacgcggccccaaagatgtacaaggaggagggcctgaaagctttttataagggcgtggctccgctgtggatgcgacaaattccgtacaccatgatgaaatttgcttgcttcgaacggacggtggaggcattgtacaaattcgttgtgcctaaaccacggtctgagtgctccaaaccagagcagctggtggtcacattcgttgccggctatattgcgggagttttctgtgctatcgtgagccatccagcggactctgtggtctctgtgctgaataaagaaaagggcagctcggcctccctggttctgaaacggctcgggttcaaaggcgtttggaagggtctgttcgctcggatcataatgattggaacactaacagccctgcagtggtttatttacgactcagtcaaggtgtacttccgattgccccgaccacccccacccgagatgccagaaagcctgaaaaagaagctagggctgacccagtag

SEQ ID NO: 205876 - DNA, 897 bp, synthetic construct
  misc_feature 1..897: note = Description of Artificial Sequence: Synthetic coding sequence
  source 1..897: mol_type = other DNA
atgagcgccaagcccgaggtgagcctggtgcgggaggccagccggcagattgttgctggcgggagcgcagggctagtggaaatttgccttatgcaccccttagacgtcgtgaagaccagattccaaatccagcggtgtgctacagaccccaattcttacaagagcctggtagactccttccgaatgatcttccagatggagggtctgttcgggttctacaagggcatcctgcctcctattctcgccgagactccgaaacgagcagtgaagtttttcacttttgagcagtacaagaaattattggggtacgtgtctctatcccccgccctgacttttgctattgccggcctggggtctgggctgacagaggcaatagttgtgaatccgtttgaggtggttaaagtcgggttgcaggcgaatcggaacacctttgctgagcagccttcaacagtgggctacgctcggcagataatcaaaaaggagggctgggggctccaggggctgaataaggggcttaccgctactctgggcaggcacggcgtgtttaatatggtgtatttcgggttctattataacgtaaagaatatgattcctgtcaacaaagacccaatcctggagttttggcggaaattcggaatcggtctgctgtcaggaaccatcgctagtgtcattaacatcccgtttgacgtggcgaaatcaagaatccaggggcctcaacccgtgccaggcgagattaaatatcggacctgttttaaaaccatggccaccgtctaccaggaagaagggattctggcactgtacaaaggtctcctccccaaaattatgcgcctcggccccggtggcgcagtgatgttactagtttatgagtacacatacagttggctgcaggaaaattag

SEQ ID NO: 205877 - DNA, 900 bp, synthetic construct
  misc_feature 1..900: note = Description of Artificial Sequence: Synthetic coding sequence
  source 1..900: mol_type = other DNA
atgagcgccaagcccgaggtgagcctggtgcgggaggccagccggcaaattgtggctggtgggtctgccggtctcgttgagatctgtctgatgcatccgctcgacgtcgtgaagactagattccagatccagcggtgcgcaaccgacccaaactcctataagtccctggtggactcatttcgtatgatttttcagatggaaggcctcttcggcttctacaaggggatactgccgccaattctcgccgaaactcctaaacgtgctgttaagttttttactttcgagcagtacaagaaactgctgggatacgtgtccctgagtcctgctctcaccttcgccatcgctgggctcggtagtggtctgacagaagccatcgtggttaatccattcgaggtggttaaagtcggactgcaggccaatcgcaacacattcgctgaacagccatccacagtaggctatgctcgacagattattaagaaggaggggtgggggctgcagggcttgaacaaaggacttacagccacactcggcaggcatggagtgtttaacatggtatattttgggttctattacaacgtaaaaaacatgataccagtgaacaaagatcccatcctcgaattctggcggaagtttggaattggtctcctttctggaaccattgcctcggtgattaacattccttttgacgtggctaaatctcggattcaggggccccagccagtgcctggagaaattaagtaccgaacgtgcttcaaaactatggcaactgtgtatcaggaagaggggattttggcgctatataagggtttgctacctaagatcatgcgcttgggacctggaggtgcagtcatgttgctggtgtacgagtatacatatagctggcttcaggaaaattggtag

SEQ ID NO: 205878 - DNA, 963 bp, synthetic construct
  misc_feature 1..963: note = Description of Artificial Sequence: Synthetic coding sequence
  source 1..963: mol_type = other DNA
atggtgggctacgaccccaagcccgacggccggaacaacaccaagttccaggttgcagtggcagggagcgtctccggccttgtgacgcgggccctgatttctccttttgacgtgattaaaatccgctttcagctccaacacgagagactatcaagatccgacccatccgcgaaataccatgggattttgcaggccagcaggcaaatcctgcaggaagagggacccactgctttctggaagggccacgtgcctgcgcagatcctctccattggatacggcgcagtgcaattcctctccttcgaaatgctgacggagctggtgcatcggggcagcgtctatgatgctagagagttttctgtgcatttcgtttgtggaggattggcagcctgtatggctactctgactgtccaccccgtggatgtgttacggacgagattcgctgcccagggtgaaccaaaagtttacaatactctccgacatgccgttgggacaatgtaccgctctgagggcccccaggtcttttataagggcttagctcccaccttaatcgctatcttcccttatgccgggcttcagttctcctgctattcctcacttaaacacctttataagtgggccatcccagctgaggggaagaaaaacgaaaatttacagaacttgctgtgtggtagcggggccggcgtcatctctaagaccttgacctatcctctcgatctcttcaaaaaacgccttcaggtggggggtttcgagcacgcgagagccgctttcggtcaggttagaaggtacaaagggctgatggattgtgccaagcaggtgctgcaaaaggaaggggctctcggtttcttcaaaggactgagcccttcactgctcaaagctgctctgtccacaggatttatgttcttttcttacgagttcttttgcaacgtgtttcactgcatgaatagaacagcatcgcagcgatag

SEQ ID NO: 205879 - DNA, 963 bp, synthetic construct
  misc_feature 1..963: note = Description of Artificial Sequence: Synthetic coding sequence
  source 1..963: mol_type = other DNA
atggtgggctacgaccccaagcccgacggccggaacaacaccaagtttcaagtggccgtggccggctctgtctcaggtctggtgacaagagccctgatcagtcccttcgacgttatcaagattcgctttcagctccagcatgaacggctttcaaggagcgacccgagcgccaaatatcatggaatcctccaggcctctaggcagattctccaggaagaaggcccaacagccttctggaagggccacgtgcctgcacagattctgtccatcggttatggggctgtgcagttcctgagcttcgagatgttgaccgagctggttcatagaggatcagtgtacgacgcacgagagtttagcgtacatttcgtgtgtgggggactggccgcatgtatggctaccctcaccgtgcatcctgtcgatgtgctgcgcactaggttcgcagcccagggggagcccaaggtgtacaatacactaaggcacgccgtagggaccatgtaccgctccgagggaccccaagtgttttataaagggctggcgcccacccttattgccatctttccctatgccgggctgcagttctcatgctattctagtctgaagcatctttataaatgggctattccggccgagggtaagaaaaatgaaaatctgcagaacctgctgtgtggtagcggcgccggtgtgatcagcaagaccctgacatatccactggacctgtttaagaagcgcctgcaggtcggcggctttgagcacgccagggcggcttttggacaagtgcggcgctacaagggtctgatggactgcgcaaagcaggtgctgcagaaagagggagcgttagggttctttaaaggcctttcaccaagccttttgaaagccgctctatcaacaggcttcatgttcttttcttacgagttcttctgtaatgtgttccattgcatgaaccgcactgccagccagcgttag

SEQ ID NO: 205880 - DNA, 792 bp, synthetic construct
  misc_feature 1..792: note = Description of Artificial Sequence: Synthetic coding sequence
  source 1..792: mol_type = other DNA
atggtgggctacgaccccaagcccgacggccggaacaacaccaagttccaggtggcagtggccggttccgtgtctgggctggtgacaagggctctgatctcgcccttcgacgtgattaagattcgcttccaactgcagcacgagaggttgagccgcagcgaccctagcgccaaataccatggcatactgcaggcttcacggcagatcctgcaggaggaaggacctacagctttctggaaaggccatgtacccgcacagatcctgtcgatcgggtatggggccgtgcaagtctacaacaccctgcggcatgcagtgggcacaatgtatcggagcgaaggacctcaggttttttataaaggtctggcccccacactcattgccatcttcccttacgccggacttcagttttcttgttatagctctctgaagcatctttataaatgggccatccccgccgaagggaagaagaatgagaatctgcagaacctgctgtgcggtagcggggctggagtcatctcgaaaaccttaacgtatcctttagatctcttcaaaaagcgcctgcaggtgggagggtttgagcatgcgcgtgcagcattcggtcaagtacggagatacaaggggttgatggattgcgccaaacaggtcctgcagaaagagggagccctcggcttctttaaaggactgtccccttctttactcaaggcagctctgtccacggggttcatgttttttagttacgagttcttttgtaacgtgtttcattgtatgaatcgcaccgcctctcagagatag

SEQ ID NO: 205881 - DNA, 963 bp, synthetic construct
  misc_feature 1..963: note = Description of Artificial Sequence: Synthetic coding sequence
  source 1..963: mol_type = other DNA
atggtgggctacgaccccaagcccgacggccggaacaacaccaagttccaagtggccgtggctgggtctgtcagcggcctagtcacaagagctctcattagcccctttgatgtgatcaaaatccgctttcagctgcagcatgaacgattaagccgctctgaccccagcgctaagtatcacggaattttgcaggcgtcgcgccagatactccaggaggagggcccaacagccttttggaagggccacgtccccgcacagattctcagcattgggtacggagcagtgcagttcctgagttttgaaatgttgacggagctcgttcatagaggctctgtctacgacgcccgagagttctctgtgcatttcgtgtgtgggggcttggctgcatgtatggcaacactgacagtgcatccagtagatgtcttgcgcacccgctttgccgctcagggggagcccaaggtgtacaacactctccgtcatgctgttggaactatgtatcgctctgagggccctcaggtgttctataaggggctcgcgcccacactcatagctatcttcccctatgcaggactgcaattcagttgttacagcagccttaaacatctgtataagtgggccatccctgctgagggcaaaaaaaatgaaaatctccagaaccttctctgtggatctggagccggggtgataagtaagaccctgacctatcctctggacttatttaaaaaacggctccaggtgggaggcttcgaacacgcacgagctgcgtttggtcaggtcagacggtataagggcttaatggactgtgccaaacaagtgctacagaaggaaggagctcttggcttctttaagggcctctctccttctcttctaaaggccgccctctcaaccggatttatgttcttctcctacgagttcttctgcaacgtgttccattgcatgaataggactgcctcacagaggtag

SEQ ID NO: 205882 - DNA, 963 bp, synthetic construct
  misc_feature 1..963: note = Description of Artificial Sequence: Synthetic coding sequence
  source 1..963: mol_type = other DNA
atggtgggctacgaccccaagcccgacggccggaacaacaccaagtttcaggtggccgttgctggatccgtgtctggccttgttacaagggctctgatatccccctttgacgtgattaaaatcaggttccagcttcagcacgagcgtctttctaggtcggatccgagcgctaaatatcatgggatcctccaggcaagcagacagatcttgcaagaagaaggccctacagcattttggaagggtcatgtgccggcccaaatcctgtccatcgggtacggcgccgtgcagtttctcagctttgaaatgttgaccgagctcgtccatcgtggaagcgtttacgatgcccgcgagttttccgtacatttcgtttgtggagggctcgcggcctgcatggccaccctcactgttcacccagtggacgttctgaggacgagatttgccgctcagggcgagcctaaggtgtacaacacgttacgtcacgccgttggtacaatgtacaggtccgaagggccccaggtgttctacaagggactcgccccaacgttaatcgccatattcccctacgcaggattacagttttcatgttattcctccctcaaacatctctacaagtgggctatccccgcagaaggaaagaagaacgagaatctgcagaatctgctctgcggcagcggggcgggcgtgatttccaagacgctgacttatccactggacctcttcaaaaaacggctgcaggttggcggttttgaacatgcccgtgccgcatttgggcaggtcagacgatataaaggcctcatggattgtgccaaacaggtgctccagaaagaaggcgcactgggtttcttcaaggggctgtcaccaagtctcctgaaagcagcactgtccacaggattcatgttcttcagttatgagtttttttgtaatgtgtttcactgcatgaataggacagcatctcaaagatag

SEQ ID NO: 205883 - DNA, 963 bp, synthetic construct
  misc_feature 1..963: note = Description of Artificial Sequence: Synthetic coding sequence
  source 1..963: mol_type = other DNA
atggtgggctacgaccccaagcccgacggccggaacaacaccaagtttcaggtagcagtggcaggttctgtgtccggcctggtgacgcgcgctttaatcagtccatttgatgtgataaaaattcgctttcaactacagcacgagagactcagcagaagcgacccttccgctaagtaccacggcatcctccaggcgtctagacaaatccttcaagaggagggacctacggctttctggaaggggcacgtgcctgcacagatccttagtatcggatatggagccgttcagttcctgtccttcgagatgttgactgagctggtgcatcggggctccgtctatgatgcccgggaattcagcgtgcattttgtctgtgggggtctggccgcgtgcatggccactttaacagtgcaccccgtggatgtgttgagaacaaggtttgccgcccaaggggagcccaaggtctacaacacgctgagacatgctgtcggaaccatgtaccggtctgagggtccacaagtgttctacaaaggcctggcgcctaccttaatcgcaatcttcccttacgcaggactgcagttctcctgttactcttccctgaagcacctatacaaatgggccatccccgccgaaggaaaaaagaatgaaaacctgcagaacctgctgtgcgggtcaggcgccggggttatctccaaaactctcacttaccctcttgacctgtttaagaagcgtctgcaggtgggaggctttgagcacgctagagctgcttttggacaagtgagacggtacaaggggctgatggattgcgctaaacaggtgcttcagaaagaaggcgctctgggcttctttaaaggcctcagtcccagcctgcttaaagccgccctgagcacgggattcatgttcttttcctacgagtttttctgtaatgtgttccactgtatgaaccgcaccgcatcccagaggtag

SEQ ID NO: 205884 - DNA, 2028 bp, synthetic construct
  misc_feature 1..2028: note = Description of Artificial Sequence: Synthetic coding sequence
  source 1..2028: mol_type = other DNA
atggccgccgccaaggtggccctgaccaagcgggccgaccccgccgaactgcgaaccattttccttaaatatgcaagtatagaaaagaatggggaattcttcatgagcccaaacgattttgttacccgctacctgaacattttcggtgagagccagcccaacccaaagacagtggagctactgagcggtgtcgtcgaccagactaaggatggtctcatcagctttcaggagtttgtggcctttgagagcgtactgtgcgcacctgatgcactgttcatggtggctttccagttgtttgataaagcggggaagggggaggtcacctttgaagacgtcaaacaggtgtttggccagacgacaattcatcaacatattcctttcaactgggattctgaattcgtccagttacactttggcaaggagcgcaagcggcaccttacgtatgcagagttcacacagtttctgctggaaattcaactggagcacgcaaaacaagcatttgttcaaagggataatgcccgcacaggccgcgtaactgcgatcgacttccgcgacattatggtcaccatcagacctcacgtcctgaccccctttgtcgaggagtgtttggtagccgccgccggcggaacaacgagccaccaggttagcttcagctattttaatgggttcaacagtctgttgaataatatggaacttatcagaaaaatctacagcacattagcaggaacccggaaggacgtagaggttacaaaagaggagtttgtattagctgcccaaaaatttggacaggtgacccctatggaggttgacatcctgtttcagttggccgacctatacgagcccagagggcgcatgacgctagctgacatcgagagaatcgctccactcgaagagggcactctgcccttcaacctggcggaagcccagagacaaaaggcatccggcgattctgccagacctgtgctgctgcaagtcgctgagagcgcgtaccggtttggtctcgggagtgtggccggagccgtcggtgccacggcggtgtacccgatcgacttagtcaagactagaatgcaaaatcagagaagcaccggctcttttgtcggcgagttgatgtacaaaaacagctttgattgctttaagaaggtgcttcgctacgaagggttctttgggctgtatcggggactgctgccccagctgttgggagtggcccccgagaaggctattaagctgacggtcaatgattttgtcagggataagtttatgcataaggatggtagtgtcccactggccgccgagattttggccggtggttgcgccggcggaagccaggtgatcttcactaatccactagaaattgttaaaattagactccaggtggcaggcgagattactacagggccaagggtgagcgccctctctgtggtccgggatcttggctttttcggtatttataaaggggctaaggcgtgcttccttcgggacattccattctctgccatctattttccctgttatgcccatgtcaaagctagttttgctaacgaggatgggcaggtcagtcccgggagcctcttactggctggcgccatagcagggatgccagcggccagcctcgtcactcccgccgatgttatcaagactcgtttgcaggtcgcagctagggcgggtcaaaccacttattcaggcgtaatcgattgcttcaggaaaattcttcgggaggagggtcccaaggcactgtggaaaggagctggagcaagagtgttcagatcctcgccccaatttggggtgaccctgctgacatatgagcttttgcagcggtggttctacatagactttggaggtgttaagcccatgggctctgagcccgtgcccaaatcaaggatcaatttgcccgctcctaacccagaccacgtcggcggctataagctcgctgtggctacattcgctggtatcgagaacaaatttggcctgtaccttcctctgtttaagccctcagtgtctactagcaaggctattgggggagggccctag

SEQ ID NO: 205885 - DNA, 2031 bp, synthetic construct
  misc_feature 1..2031: note = Description of Artificial Sequence: Synthetic coding sequence
  source 1..2031: mol_type = other DNA
atggccgccgccaaggtggccctgaccaagcgggccgaccccgccgaattaagaaccatctttctgaaatatgcatctattgaaaagaatggcgagttcttcatgtccccaaatgactttgtgacgaggtatcttaacatttttggtgagtctcagcctaacccaaagactgttgagctgctgagcggggttgttgaccaaacaaaagacggcctgatttcgttccaagagtttgtggccttcgaatccgttctgtgcgcccctgatgcactgtttatggtggcgttccagctattcgacaaagctgggaagggggaagttacgttcgaagacgttaagcaggtctttggacaaactacaatccaccagcacattccctttaattgggacagtgaattcgtgcaactccactttggaaaggagagaaagagacacctgacctacgctgaattcactcaatttctcctggaaattcagttggagcatgcaaagcaggcttttgttcagagagacaacgccaggacagggagagtgaccgcaatcgacttccgtgatatcatggtgactattcgccctcatgtattgacgccttttgtcgaagaatgtctggtggcagctgcaggcgggacgaccagtcatcaggtgtccttcagctatttcaacggtttcaacagtcttctgaacaatatggaactcatccgcaagatctatagcacattggctggtacccgaaaggatgtcgaggtcacgaaggaagagttcgtgctggccgctcagaagtttggccaggttaccccaatggaggtggacattctcttccagcttgctgatctgtacgaaccacgtgggaggatgactctcgccgatatcgaacgaattgcccccctcgaagaaggcactttgcctttcaacctcgccgaggctcaaagacagcagaaggcatcgggagacagtgctagaccggttttgctccaggtcgctgagtcggcatataggttcggcctcggtagcgttgcaggcgcagttggagctactgccgtatatcccatcgaccttgtgaaaacaagaatgcagaaccagcgttccaccggatcctttgtgggcgagctgatgtataagaactcttttgattgttttaaaaaggtattgaggtatgaaggattcttcggtctttacaggggtctgctgccccaactcctgggggtggctcccgaaaaagccatcaaacttaccgtaaacgactttgtccgcgacaagtttatgcacaaagacgggtctgtgccactggcggctgagattctcgccggcggatgtgctggggggtctcaggtcattttcacaaaccctttggagatcgtgaaaatacggctccaggttgcgggcgaaatcacgactggcccacgcgtatccgccctgtcggttgtgcgcgatctcgggtttttcgggatatataagggcgccaaggcatgctttttgagggacatcccgtttagcgccatttactttccttgttatgcccacgtgaaggccagtttcgccaacgaggacggacaggtttccccaggctccctgctgctggctggggcaattgccggcatgcccgcagcctcgttggtgacaccagcagatgtgataaaaacccgcctgcaggtggccgctagggctggtcaaacgacatattcaggagtgattgattgctttcgaaaaattttacgtgaagaaggacccaaggcgttgtggaaaggagccggggctagagtctttcggtcctctcctcagttcggagtaactctgctgacctatgaactcctccagaggtggttctatatagacttcggcggggtgaagcccatgggcagcgagcccgttcctaagtctcggattaacctccccgcccccaacccagatcacgtgggcggatataagctcgcagtcgcaacctttgccggaatagagaacaagtttggactttatttgccgcttttcaagcccagtgtcagcaccagtaaagccatcggcggaggtccttag

SEQ ID NO: 205886 - DNA, 1704 bp, synthetic construct
  misc_feature 1..1704: note = Description of Artificial Sequence: Synthetic coding sequence
  source 1..1704: mol_type = other DNA
atggaggacgtgaagcaggtgttcggccagaccaccatccaccagcatattccattcaactgggattccgagttcgtccagttgcattttgggaaggagcggaagcgccacctgacttacgccgagtttacccagtttctattggaaatccaactcgagcacgcaaagcaggcattcgttcagcgtgacaatgcaaggacagggagggtgacagctattgattttagggatatcatggtcaccataaggcctcatgtgctaactccgtttgttgaggagtgcctggttgctgcagctggcggcacaacatctcaccaggtttctttttcctacttcaatggattcaattcactactcaacaacatggagttgatccggaagatttactctactctggcaggaaccaggaaagacgtggaggtgacaaaggaagaatttgtgctcgccgcgcagaaatttggacaggttacccctatggaagtcgacatcctatttcagttggcagacctgtacgaacctcggggacggatgaccctggccgatattgaaaggattgccccgctggaggaaggtactctaccattcaatctggcggaggcccagcgccagaaggccagtggagacagcgccagacccgtactcctgcaggtcgcggaaagtgcctatcgtttcggcctcgggtccgtcgccggcgcggttggtgctacagctgtctaccctatcgacctggtaaaaactcgtatgcagaatcagcgcagtacgggcagttttgtcggagagctgatgtacaagaactcttttgactgcttcaaaaaagtgctaagatacgaagggttctttggactctaccgcggtctcctaccacagttgctgggtgttgctcccgagaaagcaataaagttgaccgtcaacgattttgtcagggacaaattcatgcataaggatggttctgtccccctggccgcagaaattctagcaggtggctgcgcaggggggagccaggtgatcttcactaatcctctcgagatcgtcaagatacggctgcaggtggccggggaaatcactacgggccctcgtgtctccgccttgagcgtggtgcgagacctggggtttttcgggatctataagggggctaaggcttgttttttacgggatatccccttttcagccatctatttcccgtgttacgcgcacgttaaggcttcctttgctaatgaggacggtcaggtttcccctggcagcctgctcctggccggagccattgccggaatgcccgccgcatcccttgtgactcccgccgatgtgatcaagacaaggctgcaagttgcagcacgagcggggcaaacgacttactctggggtgattgattgttttagaaagatattaagagaggagggtccaaaagcattgtggaagggcgctggggcacgcgtgtttcgaagtagccctcagtttggggtgacgcttctaacatatgaactccttcagaggtggttttatattgattttggcggcgtgaagccaatggggtctgagccggtgcccaagagccgtatcaacttgcctgcacccaatcccgatcacgtaggaggctataagttggctgtggctacgttcgctggcattgaaaacaagttcggtttatacctacctcttttcaagccaagcgtctctaccagcaaagccatcggaggtggcccatag

SEQ ID NO: 205887 - DNA, 561 bp, synthetic construct
  misc_feature 1..561: note = Description of Artificial Sequence: Synthetic coding sequence
  source 1..561: mol_type = other DNA
atgaagcacatgctggccgccagcgccggcgaggtggtggcctgcctgattagggtgccctccgaagttgttaagcagagggcacaggtgtccgcctcaacccgtacgtttcagattttcagcaacatcctttacgaggaagggattcagggcctgtaccggggctacaagagtactgttctcagagaaatcccattctctctcgtgcagttccccctatgggagtctttgaaggctctctggagttggcgacaggaccacgtcgtcgactcctggcagagtgctgtctgcggcgcgtttgcaggcggatttgcagccgcggtcaccacacccctggatgtggctaaaaccagaataacacttgcgaaggccggctcctcgacggccgatggcaatgtgctaagtgtactgcacggggtgtggcgatcccaggggctggccggcttgttcgcaggggtgtttccgaggatggcagccatctctctgggtggcttcattttcctcggagcgtatgatcgcactcactctctcctgctcgaggtaggaaggaaaagcccctag

SEQ ID NO: 205888 - DNA, 825 bp, synthetic construct
  misc_feature 1..825: note = Description of Artificial Sequence: Synthetic coding sequence
  source 1..825: mol_type = other DNA
atggaccggcccggcttcgtggccgccctggtggccggcggcgtggcaggagtctctgtggacctgatcctctttcctctagataccataaaaactagactgcaatccccgcaaggcttctctaaggctggcgggtttcatggaatttatgcaggtgtacctagcgccgcaatagggtcgttccccaatgccgcagcttttttcattacttacgaatacgtgaagtggttcctccacgccgatagcagtagttatctgaccccaatgaagcatatgctcgccgcctccgccggggaagtggtcgcatgcctaataagagtaccctccgaagtggtaaaacagagagcacaggtctccgccagcaccaggaccttccaaatcttctcgaatattctttacgaagaaggaatccaggggttatatcgcggttataaatccacagttctaagagaaatcccgttttctctagtgcagtttccactgtgggaatcccttaaggcgctgtggagctggcggcaagaccacgttgtagattcatggcagtccgcagtctgcggagctttcgcaggcggtttcgccgccgctgtgaccaccccgcttgatgtcgcaaaaactcgtattaccttggcaaaggccgggtcttcgacagcagacggcaatgtcctaagtgtcctgcacggagtgtggaggagccagggcctggctggtctgttcgccggtgtgtttccgcgcatggccgccatctcccttggcgggttcatcttccttggcgcttacgacaggacccattctctgctcctggaggtggggcggaagtcaccatag

SEQ ID NO: 205889 - DNA, 66 bp, synthetic construct
  misc_feature 1..66: note = Description of Artificial Sequence: Synthetic coding sequence
  source 1..66: mol_type = other DNA
atggaccggcccggcttcgtggccgccctggtgctgctgcacttcttgagtcccatgaacatgtag

SEQ ID NO: 205890 - DNA, 477 bp, synthetic construct
  misc_feature 1..477: note = Description of Artificial Sequence: Synthetic coding sequence
  source 1..477: mol_type = other DNA
atggagggcaagcggaagctggagggcaagcccctgcggttccggggagtgcaccacgcattcgcgaaaatcctcgccgaaggcggtatacgggggctctgggccggctgggtacctaatattcaacgggcggctctggtgaacatgggtgatctgacaacctacgatacagtgaagcactatctcgtcctgaacacccccctggaggacaatataatgacacacggcctgtcctccttgtgctccggtctcgtggcttctatcttgggtacccccgccgacgtgatcaagtcacggataatgaatcagcccagggacaaacagggtaggggtttactgtataaaagcagcaccgactgtttgattcaggcggtccaaggcgagggatttatgagcctgtacaagggattcctccctagttggcttagaatggccgcagtgattgtgaattcaagccggtctcagttgaaagtgtag

SEQ ID NO: 205891 - DNA, 972 bp, synthetic construct
  misc_feature 1..972: note = Description of Artificial Sequence: Synthetic coding sequence
  source 1..972: mol_type = other DNA
atgagcgtgcccgaggaggaggagcggctgctgcccctgacccagcggtggccaagggcgagtaagttcctgctcagcggctgtgccgctaccgtagccgagctggctacttttcctctggatctgacaaagacccgcctccagatgcagggcgaggcagctctcgcccgcctcggagacggggcccgggagagcgccccttacagaggcatggtgcgaactgccctgggcattatagaggaagaggggtttcttaagctttggcaaggtgtgacaccagccatctaccgccacgttgtgtactcaggaggacggatggtaacatacgaacatcttcgcgaggtagtgttcggaaaatctgaggacgagcattaccccctctggaaatctgtgattggcggaatgatggccggagtgattgggcagtttttggctaatcccacagatctagtaaaggtacaaatgcagatggaagggaagagaaaactggaggggaagcctctcaggttccgcggagtgcaccatgctttcgccaagatcctggccgagggagggatccggggactgtgggcaggttgggttcccaatattcagagagccgctcttgtgaatatgggagacctgacgacttacgacaccgtgaagcactacttagtgctcaacactccattagaagacaacatcatgacgcatggcctgtctagtctgtgttccgggcttgtcgcttctattttaggcacacctgccgacgtcattaaatcaagaatcatgaaccaaccacgcgacaaacagggtcgaggcctcctgtacaaatcaagtaccgactgtctgattcaggcagttcagggagaggggttcatgagcctctataaaggttttctaccctcttggcttaggatgaccccgtggagtatggtcttttggttgacatacgagaaaatccgcgaaatgtccggcgtaagccccttctag

SEQ ID NO: 205892 - DNA, 738 bp, synthetic construct
  misc_feature 1..738: note = Description of Artificial Sequence: Synthetic coding sequence
  source 1..738: mol_type = other DNA
atgagcgtgcccgaggaggaggagcggctgctgcccctgacccagaggtggccaagggcatcgaaatttctacttagcggatgtgcggccaccgtggcagagcttgccaccttcccactagatctcactaagacccgcctgcaaatgcagggagaggcagccctggcccgtttgggtgatggggctcgggaatctgctccctacagggggatggtccggacagccctgggaatcattgaggaagagggattccttaagttgtggcagggcgtgacccccgctatctacaggcatgtcgtgtactcaggaggccgtatggtcacgtacgaacatctccgagaggtagtatttggaaaatctgaggacgagcactacccgttgtggaagagtgttattggcggaatgatggcaggagtaattggccaatttctcgccaacccaaccgacttggtcaaggttcagatgcagatggagggaaagaggaaactggaaggcaagccgctccgctttagaggagttcatcatgctttcgcgaagattttggccgagggcggcatcaggggactctgggccggctgggtgccaaatatccagcgtgctgccttggtaaacatgggtgacttgaccacatacgatacagtgaagcactatttagtgctgaacacaccgctggaggataatattatgacgcatggcctatcctccgatctagtggggagccataaagcaatacagtag

SEQ ID NO: 205893 - DNA, 297 bp, synthetic construct
  misc_feature 1..297: note = Description of Artificial Sequence: Synthetic coding sequence
  source 1..297: mol_type = other DNA
tgaaacatgggcgacctgaccacctacgacaccgtgaagcactacctggttttaaacacgccactcgaggacaatatcatgactcacggactgagttccctgtgttcaggcctagtggcctcaatacttggcacacctgctgacgtgatcaagagcagaatcatgaaccagcccagggacaagcagggacggggcctgctatataagtcctctacggactgccttattcaggcagtacaaggcgaaggcttcatgtctctctataaggggttcttaccctcctggctgcgaatgtag

SEQ ID NO: 205894 - DNA, 450 bp, synthetic construct
  misc_feature 1..450: note = Description of Artificial Sequence: Synthetic coding sequence
  source 1..450: mol_type = other DNA
atgagcgagtgccccctgatcctgtacatccacaagcacatcgacacctactcacaaagttacctgttcaacgatttgttttatcctgtctactcaggaggacgcatggtcacatatgaacacttacgggaggtggtgttcgggaaatcagaagacgagcactacccgctgtggaagtccgtaattggtgggatgatggctggagtcatagggcagtttctggccaaccccaccgatctagttaaagttcagatgcagatggaaggaaagcgaaagctggagggtaaaccactcaggttcagaggcgtacatcacgctttcgccaagattttagccgagggaggtattcggggcctctgggctggctgggtgcccaacattcaaagggccgccctcgtcaacatgggagatctcactacgtatgacacggtcaagcactatctagtgtag

SEQ ID NO: 205895 - DNA, 480 bp, synthetic construct
  misc_feature 1..480: note = Description of Artificial Sequence: Synthetic coding sequence
  source 1..480: mol_type = other DNA
tgaatggagggcaagcggaagctggagggcaagcccctgcggttccggggagttcatcacgcttttgctaaaatactcgcggagggcggaattagaggcctgtgggcaggctgggtgcctaacatccagcgcgcagcactggtcaatatgggcgatttgaccacatatgatacagtgaagcattacttagtgctcaataccccgctggaggataatattatgactcacggcctgtcctctctgtgttccggcctcgtcgcatctatcctcggcactcctgccgatgtgatcaagtctcgcatcatgaaccagcccagagacaagcagggaagaggtttgctgtacaaatcttctaccgattgtctaatccaggctgtccagggcgaaggtttcatgagtctctacaaaggtttcctccccagttggctgagaatggcagctgtcattgtgaacagttcacggtcacagttgaaagtgtag

SEQ ID NO: 205896 - DNA, 714 bp, synthetic construct
  misc_feature 1..714: note = Description of Artificial Sequence: Synthetic coding sequence
  source 1..714: mol_type = other DNA
atgtacctgtacctgatgaagatgcccgccgcctaccaggtgtacagcggtggccgcatggtgacttacgaacacctacgcgaggtcgtctttggcaagtcagaggatgaacactatcccctttggaaaagtgtcattggagggatgatggccggagtaatcggacagtttttggcgaaccctaccgatcttgtgaaggtgcaaatgcaaatggagggaaagcgcaaactagagggcaagcctctgagatttagaggcgttcatcatgcgtttgccaaaatcctggccgaggggggaattaggggtttgtgggccggttgggtcccaaacatccaaagagcagctctggtcaatatgggggatctgaccacatatgatactgtgaaacattacctcgtgttgaatacccccctagaggacaatatcatgacccatggactcagcagcctgtgttccggactggtggccagtatcctgggcactccagctgatgtgatcaaatctcggatcatgaaccagccaagggataagcaagggagggggttgctgtacaagtcatcaactgactgtttaattcaggccgtccagggggagggatttatgtcattgtacaaaggcttccttccttcatggcttaggatgaccccctggagcatggtgttctggctgacttacgaaaaaattcgggagatgtccggtgtgagtccattctag

SEQ ID NO: 205897 - DNA, 1095 bp, synthetic construct
  misc_feature 1..1095: note = Description of Artificial Sequence: Synthetic coding sequence
  source 1..1095: mol_type = other DNA
atggagctggagggccggggcgccggcggcgtggccggcggccccgcagctggaccaggtcgaagccctggcgagagcgccctgctagatggctggctacagcggggagtaggacgcggggctggagggggtgaggccggggcttgccgccctcctgtccgccaggatcccgatagcgggccagattacgaagccctgcctgctggagccacagtgactacacacatggttgctggagccgtcgctggcatcttagaacattgcgtaatgtatcccatagattgcgttaagaccagaatgcagtcactgcagcctgaccctgccgctaggtatcgtaatgtgctggaggccctgtggcgcatcataaggacggaaggtctgtggcgccccatgcgaggtctcaatgttactgctactggggcgggaccagcccacgctctgtatttcgcgtgttacgagaagttgaaaaaaaccctttcggatgttatacatccagggggcaattcccacatcgccaatggtgccgctggctgtgtggcaacactcttacacgatgccgcaatgaacccagctgaggttgttaagcaaaggatgcaaatgtacaattcaccctatcacagagtgacagactgcgttcgcgccgtgtggcagaacgagggcgccggtgcattctataggagctacaccactcagttgacaatgaatgtgccattccaggccattcacttcatgacgtatgagttcctacaagaacacttcaacccccaaaggaggtataacccctcttcacacgttctgtcaggagcctgcgcaggggcagttgccgccgccgctacgaccccgttggacgtctgtaaaacactcctgaacacacaggagagcttggccctcaactctcatattactggtcacattacaggaatggcttccgcctttcgcacagtctatcaagttggcggagtaaccgcctactttagaggggtacaagccagggtgatataccaaattccaagcaccgctatcgcctggtctgtatacgaattcttcaaatacctgatcactaagcgacaagaagagtggagagcaggcaagtag

SEQ ID NO: 205898 - DNA, 678 bp, synthetic construct
  misc_feature 1..678: note = Description of Artificial Sequence: Synthetic coding sequence
  source 1..678: mol_type = other DNA
cggggcgccgccggctggagccactgccaccacgcccacggcggcagacgacgcggccgcgaccccggggccttgcgggatgttcctcataggctgagacagggggccgcgggttgcgtggcaacccttctgcacgatgcagctatgaatcccgccgaagtcgttaaacagaggatgcaaatgtacaattctccctaccatcgtgtgacagactgcgtgagagctgtttggcagaacgagggcgccggtgccttctacaggagctatacgacacagctgacgatgaatgtaccatttcaggccatccactttatgacctacgaattcctgcaagaacatttcaatccacagcgccgttacaatccttccagccatgtgctgtccggtgcctgcgccggtgccgtagccgcggcagccacaacacccttggacgtgtgcaagactttactcaatacccaggagagccttgctctgaactcacatatcacaggccatatcacaggaatggcctctgcttttcggactgtttatcaggttgggggagtcacagcatacttcagaggtgtacaagcgcgcgtcatttaccagatcccctctaccgctattgcatggtccgtgtatgagttcttcaaatacctgataactaaacgacaggaggaatggagggccggcaagtag

SEQ ID NO: 205899 - DNA, 876 bp, synthetic construct
  misc_feature 1..876: note = Description of Artificial Sequence: Synthetic coding sequence
  source 1..876: mol_type = other DNA
atgagcgccctgaactggaagcccttcgtgtacggcggcctggccagcatcaccgcagagtgtggaactttccctattgacctcacgaaaacaaggctgcaaatccaggggcagactaacgacgctaaatttaaagagatcagataccgcgggatgctccacgctctcgtgcgtatcggacgtgaagagggactgaaagccttatattcagggatcgcaccagcaatgctccggcaggcctcctatggcacgatcaagataggaacatatcagagcctgaagcgattgttcatcgaacggcctgaggacgagacgctgcccatcaacgtcatctgtggcatcctttctggggtgatcagctctacaattgctaacccgaccgacgtcttgaaaatacggatgcaggctcagagcaacactatccaaggcggtatgataggaaactttatgaacatctaccagcaagagggcaccagaggactgtggaagggcgtatcgctaacggcccagcgcgccgccattgtggtcggtgtggaactcccggtctacgatattactaagaagcaccttattctgtctggactgatgggcgatacagtctacacacactttttgagttcattcacatgcggcctggccggcgcattagcgtcgaatccagtggatgttgttaggacacgcatgatgaaccagcgggtcctgcgagacggccgatgttctggctatactggcacgctggactgcctactgcagacctggaagaatgagggcttctttgcattatataagggattctggcctaattggctcagacttgggccatggaacattattttcttcgtcacttacgagcagttgaaaaaacttgatctttag

SEQ ID NO: 205900 - DNA, 651 bp, synthetic construct
  misc_feature 1..651: note = Description of Artificial Sequence: Synthetic coding sequence
  source 1..651: mol_type = other DNA
atgctgcggcaggccagctacggcaccatcaagatcggcacctaccagtcactgaagagactgttcattgaaagacccgaggatgaaacactccctattaatgtgatctgcgggattttatcaggcgtgatctcaagcaccatagctaaccccacggatgtcctgaagatcagaatgcaagcccagtcaaatacaatccaggggggtatgatcggcaactttatgaatatctatcagcaggagggaactagaggcctctggaagggggtgtctctcacggcccagagagcagcgatcgtagtcggggtggaactgcccgtgtacgacatcactaaaaaacacttgatcttgagcggactgatgggcgatactgtgtatacccacttcctttctagcttcacgtgcggcctggctggtgccttggccagcaacccggttgacgtcgtacgcaccaggatgatgaaccagcgcgtgctacgggatggcagatgctctggttatacgggtactttggactgcttgctgcagacatggaaaaatgaaggtttcttcgccctgtacaaaggcttttggcctaactggctccgcctcgggccatggaacatcatcttctttgtgacctacgagcagctgaagaaactagatttatag

SEQ ID NO: 205901 - DNA, 723 bp, synthetic construct
  misc_feature 1..723: note = Description of Artificial Sequence: Synthetic coding sequence
  source 1..723: mol_type = other DNA
atgctgcacgccctggtgcggatcggccgggaggagggcctgaaggccctttattctggcattgcccctgccatgcttcggcaagcctcctacggcaccatcaagattggcacataccaatctttgaagcggcttttcatcgagcgcccagaggacgaaactctacccattaatgtgatctgcgggatcctgtccggtgtcatctcaagcactatcgccaatccaacagatgtgctcaagattaggatgcaagctcaatctaacaccattcaaggcggcatgattggtaactttatgaacatatatcagcaagagggcacccgcgggctgtggaaaggggtgtctctgacggcccaacgcgcggccatagtggtcggcgtggaactgcccgtgtatgacattacgaagaagcatctgatcttgagcggactgatgggggacacagtctacacgcatttcctctcttccttcacctgtggtctcgctggtgctctggcctctaatcctgtggacgttgtgcggacacggatgatgaatcagcgagtgcttagagatggcaggtgttccggctatacaggcacactggattgcctgctgcaaacttggaagaacgaaggctttttcgccctttacaagggattttggccaaattggcttcgcctgggaccttggaatattattttcttcgtgacatacgaacagctcaaaaaactggacttgtag

SEQ ID NO: 205902 - DNA, 948 bp, synthetic construct
  misc_feature 1..948: note = Description of Artificial Sequence: Synthetic coding sequence
  source 1..948: mol_type = other DNA
atgaccggccagggccagagcgccagcggcagcagcgcctggagcacagtgtttcggcatgtcaggtacgaaaatctgattgctggcgttagcggcggcgtgctaagcaaccttgccctccaccctctagacctggttaaaatacggtttgcggtctcggatgggctggagttgcggcctaagtataacggaattctgcactgcctcactactatatggaaattagatggtctgcggggcctgtaccagggcgtgactccgaatatctggggtgcggggctctcctggggcttgtatttctttttttacaacgctattaagtcgtacaaaaccgagggtagagccgaaaggctggaggccactgagtacttggttagcgcggctgaagcaggcgctatgaccttatgcataacaaacccactgtgggtgacaaagactaggttgatgttacagtatgacgctgttgtaaacagccctcatcgtcagtacaaagggatgtttgacaccctcgtgaaaatctacaaatacgaaggcgtgcgtgggctttacaaggggttcgtgcccgggttattcggaacatcgcatggggcccttcagttcatggcctacgagctcctgaaactgaaatacaatcaacatattaatagactgccagaggcacagttgagtacagtggagtacattagcgtggcagcactgtccaagatcttcgcagtggccgcaacctatccttatcaggttgtaagggctagattacaagatcaacacatgttctactcaggagttattgacgtcataactaaaacctggagaaaggagggagtaggcgggttttataaagggattgcaccaaacctgatccgcgtgacacctgcatgttgtataacgtttgtggtctatgagaacgtgtctcatttcctgttggatttaagagagaaacgcaagtag

SEQ ID NO: 205903 - DNA, 900 bp, synthetic construct
  misc_feature 1..900: note = Description of Artificial Sequence: Synthetic coding sequence
  source 1..900: mol_type = other DNA
atgaccggccagggccagagcgccagcggcagcagcgcctggagcggtggtgtcttgagtaatttggctctccaccctctggatctggttaagattaggtttgcagtctctgatggtctggagctgcgccccaagtacaatgggattctccactgcttgaccacaatctggaaactggatggactgcgcgggctgtatcagggtgtcactcctaacatctggggtgctggcctgagctggggtttgtacttttttttctacaatgcgataaagagctataaaactgaggggagggctgagcgcctggaggcaaccgagtatctcgtctcagccgccgaagctggcgctatgacactctgtatcactaaccccctttgggttaccaagaccagactgatgctgcagtacgatgcagtggtcaactcgccccatcgacagtacaaggggatgttcgacaccctggtcaaaatctacaagtatgagggggtcagaggcttgtacaaggggttcgtacctggactgtttggcactagccatggggcattacaatttatggcctacgaacttctgaagttgaagtataaccagcacattaacagattgcctgaggcccagctgagtactgttgagtatatctccgtggcggcactgtcaaagattttcgccgtggccgccacctatccctaccaggtggtccgagctaggcttcaggatcagcacatgttctattctggtgtcatcgatgttatcaccaaaacatggcgcaaggagggagtcggggggttttataaggggattgcccccaatcttatccgcgtcacgcctgcctgttgtataacattcgtcgtgtatgagaacgtgagtcacttcctcctagacctgagggaaaagaggaagtag

SEQ ID NO: 205904 - DNA, 552 bp, synthetic construct
  misc_feature 1..552: note = Description of Artificial Sequence: Synthetic coding sequence
  source 1..552: mol_type = other DNA
atgaccctgtgcatcaccaaccccctgtgggtgaccaagacccggttaatgcttcagtatgatgctgtggtgaacagtccacacagacagtacaaggggatgttcgacaccttggtgaaaatttataagtatgaaggtgtaagaggactgtacaagggctttgtccctggcctgttcggcacatcccatggtgctctgcagttcatggcttatgaactgctgaagttgaaatacaatcagcacataaatagattgcccgaggcccaactgtctaccgtcgagtatatctctgtcgctgctctcagtaagatctttgccgtggctgcgacctacccctatcaggtcgtcagggcccgcttgcaagatcagcacatgttttacagtggagtaattgatgtcattacgaagacctggcgcaaggaaggagtgggggggttctacaagggaattgcgccaaatcttatccgcgtgacaccggcctgctgcattactttcgtagtttatgagaacgtaagccactttctgttggacctgcgagaaaaacgcaaatag

SEQ ID NO: 205905 - DNA, 966 bp, synthetic construct
  misc_feature 1..966: note = Description of Artificial Sequence: Synthetic coding sequence
  source 1..966: mol_type = other DNA
atggccaccggcggccagcagaaggagaacaccctgctgcacctgtttgcgggcggttgcggcgggaccgtcggggcaattttcacatgtcccttggaggtgatcaaaacacgtttgcagtctagccgactcgccctgaggacagtctactaccctcaggtccatctcgggaccataagcggagccggaatggttcggccgacttccgtaacgcctggactgttccaggtgttgaaatccatcttggagaaagaggggccaaagagcctgttcagagggctggggcccaatctagtgggagttgccccatcacgggcggtgtatttcgcatgctactcaaaagccaaagaacagttcaatggcatcttcgtgccgaatagcaacatagtccatatcttcagcgccggctccgctgccttcatcaccaatagcctaatgaaccctatctggatggtcaagacacggatgcagctcgagcagaaagtccgcggatcaaaacagatgaataccctgcagtgcgctcgctatgtctatcagactgagggcatccgcggtttttacaggggcttaaccgcaagctatgccggtatctcggaaactatcatttgttttgccatttatgaatcattgaagaagtatctcaaagaagctcctctggcctcatcggcaaatggcactgaaaagaattccactagcttctttgggctgatggctgctgccgccctgagtaaagggtgcgcaagttgtattgcctacccacacgaggtgatccggaccagattgagggaggagggtacaaaatataagagtttcgtgcagacagcccgccttgtcttcagagaggaggggtacttagcgttctaccggggcctgttcgcccagctgatacggcagatccctaacactgcaattgtgctctctacgtatgagctgatcgtctacttacttgaggatcgaacccagtag

SEQ ID NO: 205906 - DNA, 915 bp, synthetic construct
  misc_feature 1..915: note = Description of Artificial Sequence: Synthetic coding sequence
  source 1..915: mol_type = other DNA
atggagaccgtgccccccgccgtggacctggtgctgggcgccagcgcatgctgcctggcctgcgtgttcaccaatccattagaggtagtcaaaacaagattgcagctccagggtgaacttcaagccaggggaacttaccctcgcccctaccacggctttatagcaagcgttgctgcagtagctcgagctgatggtttgtggggactgcaaaaaggcctggcggctggcctgctctaccaaggccttatgaacggtgtgcgattttactgctactcactggcatgtcaggctggtttgacccagcagcctgggggtactgtggtcgccggggccgtagcaggggctctgggcgccttcgtaggaagccccgcctatctgattaaaactcagctccaagcacagacagttgcggctgttgcagttgggcaccaacataatcaccagaccgtgctcggcgcactggaaacgatttggcggcagcaaggcctccttgggctctggcagggggttggaggagcagttccaagggtgatggtgggctcggcagcacagctggccacttttgcttctgctaaagcatgggtgcagaaacagcaatggttacccgaagactcctggctggtggccttggcaggaggtatgatcagtagcatcgctgtggtcgtggtgatgacccctttcgacgtagtgagcacacgactgtacaatcagcctgtggataccgccggacggggccagttgtacggagggctgacggactgtatggtgaaaatttggagacaggagggaccgctggctctctacaaggggctgggccctgcctatctgcggctcgggcctcatacaatcctcagcatgctgttctgggatgagcttagaaagctcgcaggacgggcccagcataaagggacatag

SEQ ID NO: 205907 - DNA, 888 bp, synthetic construct
  misc_feature 1..888: note = Description of Artificial Sequence: Synthetic coding sequence
  source 1..888: mol_type = other DNA
atggacttcctgatgagcggcctggccgcctgcggcgcctgcgtgttcacaaatccattggaggtggttaagacccgcatgcagctgcagggtgagctccaggcccccggtacctatcagcgtcactatcgcaacgtttttcatgccttcattactattgggaaagtagacggactggccgccttgcaaaagggcctagcacctgcacttctctaccaattcctcatgaacggcatccgactggggacatacgggctggcagaagccggggggtatcttcatactgctgagggtacacactcccctgcccgctctgccgctgcaggggccatggccggagttatgggtgcctaccttggaagtcctatctatatggtcaagactcacttgcaggctcaggctgcctctgagatcgccgtgggccaccagtataaacaccaaggtatgttccaagccctgacagagatcggacagaagcacgggctggtgggcctctggaggggcgccctggggggtctgcccagggtgatcgtcggatcttccacccagctttgcaccttcagctcgacaaaggatcttctgtctcagtgggaaatctttccccctcagtcttggaagcttgcactagtcgccgccatgatgtccgggatcgccgtggtgctggccatggcaccatttgacgtggcctgcactaggttgtacaaccagccgacagacgcccagggcaaaaatcgagtgcccaagttcagtgccaccagctgctccgctagtgcacctttgttgggaactaaagacgtcagaattgttaaagggcagacggggcaccagctgttcaaggtgacccaagcccctggatgctccccgattctgctgggtacccaatcttag

SEQ ID NO: 205908 - DNA, 876 bp, synthetic construct
  misc_feature 1..876: note = Description of Artificial Sequence: Synthetic coding sequence
  source 1..876: mol_type = other DNA
atggacttcctgatgagcggcctggccgcctgcggcgcctgcgtgttcacaaacccactggaagtggtcaagacaagaatgcagcttcagggcgaactacaagcccctgggacttaccagaggcactatagaaatgtgttccatgctttcatcaccattgggaaagtggatggcttggcggctctgcagaaagggctcgcccctgctcttctgtatcagttcctcatgaacgggattaggctcggtacttatggcctcgccgaggcagggggataccttcacactgcggagggcacacactcacctgctcgcagcgccgcggctggggccatggctggcgtgatgggggcttacctgggctcgcccatttacatggtgaaaacacatctacaggcccaggccgcctccgagatagccgttggccatcaatacaaacatcaggggatgtttcaggctctgaccgagatcggccagaagcacggccttgtaggcctgtggagaggtgctctgggcggcttgcctagggtcatcgtgggttccagcactcagctctgtacattcagcagcacaaaggacctgctgtctcaatgggaaatctttccaccccagtcctggaagctggctctcgttgccgctatgatgtccgggatagctgtggtgctggccatggccccatttgacgttgcttgcacaagactttataatcagcctactgacgcacaggggaaaggcctgatgtaccggggcatcttagatgcccttctccagaccgctcgtaccgaaggaatatttgggatgtacaaggagccaagcccacaagtgttgagcaacatcatgcagtgcttctcagccttcaccggagatcagcggtgctag

SEQ ID NO: 205909 - DNA, 915 bp, synthetic construct
  misc_feature 1..915: note = Description of Artificial Sequence: Synthetic coding sequence
  source 1..915: mol_type = other DNA
atgatccagaacagccggcccagcctgctgcagccccaggacgtgggggatacagtggagaccctcatgctgcacccagtcataaaagccttcctttgcggttcgatctctggtacctgcagcaccctgctgttccaacccttggatttgctgaaaacccggctgcagacactgcagccatctgatcacggatcgcggcgggtgggcatgctggcggtcctcctgaaagtggttcgtacagaatccctgctgggcctttggaaaggtatgagtccgtctatcgtaagatgcgtgcccggcgttggcatctactttggcactctctactccctcaaacaatacttcctgcgcggacaccctcccacagccctcgagagcgtgatgctcggcgtaggcagtagaagcgtcgcgggtgtgtgcatgagcccaattacagtaatcaaaactagatacgagtcgggcaagtacggttacgagagtatctatgccgcattgaggagcatctaccactcagaaggtcatagggggttattcagtgggttgaccgctacactactcagggacgcccctttctcaggcatctacctgatgttctataatcagacaaaaaatatcgtgccccacgatcaggtagacgcgactttgatccctatcaccaatttctcctgtggaatcttcgccggaattcttgcctcattggtcacccagcccgccgatgtaattaagactcacatgcagctgtatcctctgaagttccaatggatcggtcaggcagtaaccctgatctttaaggactacggattgagagggtttttccaggggggtataccccgggctctgcggcgcacgctgatggccgcgatggcctggaccgtctatgaggagatgatggccaagatggggctgaaatcttag

SEQ ID NO: 205910 - DNA, 1671 bp, synthetic construct
  misc_feature 1..1671: note = Description of Artificial Sequence: Synthetic coding sequence
  source 1..1671: mol_type = other DNA
atgccccccgagcggcggcggcggatgaagctggaccggcggaccggcgctaaacctaagcgcaaacccggcatgcgccccgattggaaggctggtgcagggccgggcggcccacctcagaagcccgccccaagttctcaaagaaagccaccagcacgaccctccgccgcagcggcagccattgcagttgccgctgctgaagaggaacgcagactgcgccagcgtaacaggctgaggctcgaggaggataaacctgcagtggagagatgtctggaggagctggtattcggagacgtggagaatgacgaggatgcgctgttacggcggctgagaggcccacgagttcaggagcacgaggattcgggtgactctgaggtcgaaaatgaagctaaaggaaatttccccccccagaagaagcctgtgtgggtggatgaagaagacgaagacgaggagatggtggacatgatgaacaacagatttagaaaggacatgatgaagaatgcttccgaatctaagctgtccaaggataacctgaagaaaagactcaaagaagagttccaacacgcgatggggggcgtcccagcctgggcggaaacaacaaaacgtaaaacgtcgagtgacgacgaaagtgaagaggacgaggacgacttgttacagcgtaccggtaattttatctctactagcacttcactgccaagaggaattctcaagatgaaaaattgtcagcacgccaacgccgagcgtcctactgtggcccgaatcagcagcgtgcagttccatcctggcgcgcagatcgtgatggtggcaggtctcgataatgccgtctccctcttccaggttgatggcaagacgaatcccaagatccaatcaatctacctggagcgatttcctatattcaaagcctgtttctccgcaaatggcgaggaagtgcttgccacctcaacacacagcaaggtgctgtatgtgtatgacatgcttgcaggaaagcttatccccgttcaccaggtaaggggacttaaggaaaagatcgtgagatccttcgaggtgagtcccgacggatcatttctgcttattaacggaatcgccggctatttacacctgctggccatgaagacgaaggaactgatcggatcgatgaagatcaacgggcgtgtggcggcctccactttctcttccgatagtaagaaggtgtacgcttcaagcggagatggcgaggtctacgtttgggatgtgaactcgcgcaagtgcctgaaccgcttcgttgatgaggggtcactatatggccttagtatcgctacctcccggaatggacaatacgtggcatgtgggtccaattgtggagttgtcaacatctacaaccaggattcttgcctgcaggagaccaaccctaagcccattaaggctatcatgaatctcgtgacaggtgtaacctcccttacattcaaccctacaactgagatcctggctatcgccagcgaaaaaatgaaggaggcagtgcggctggtccacctgcccagctgtaccgtctttagcaactttcccgttatcaagaacaagaacatttcccacgtgcataccatggatttttctccgcggtcaggatattttgcactcgggaatgagaaggggaaagctctgatgtataggctgcatcactattctgatttctag

SEQ ID NO: 205911 - DNA, 1080 bp, synthetic construct
  misc_feature 1..1080: note = Description of Artificial Sequence: Synthetic coding sequence
  source 1..1080: mol_type = other DNA
atggccgaccaggaccccgccggcatcagccccctgcagcagatggtcgcctctggaaccggagccgtagtgacaagcctttttatgacgccactggatgtggttaaagttaggcttcaatcccagagaccctccatggcatcagagttaatgccttctagcaggttgtggtctctaagctacaccaagctgccatcttccttgcagagcactggcaaatgcctcctgtactgcaatggcgtgctcgaaccactgtacctgtgtcctaacggggcacgctgcgctacttggttccaagacccgacgcggtttactgggacgatggacgccttcgtgaagattgtcaggcacgaaggcacacgcaccctttggagcggcctgcccgccacactggtgatgaccgtccccgctaccgccatttactttacagcatatgaccagctcaaggcatttctgtgtggccgggctctgacttccgacttgtatgctcctatggtggccggggctctcgccaggctgggcactgttaccgtgatcagccctttggagctgatgcgaaccaagctgcaggcccagcacgtatcctatagagaactgggggcctgtgttcgtacagcggtggctcagggtggttggcgaagcctctggctgggatggggccccaccgctctccgcgacgtgccattcagtgcgttatattggttcaactacgagctggttaagtcttggctgaatgggtttcgaccaaaggatcagacatcagtgggaatgtcattcgtggcaggtggaatttccggtacagtcgctgctgtactgaccttgccctttgatgttgtaaagacacagcgccaagtagccctcggagccatggaagctgttagagtgaacccattgcatgttgactctacctggctgttacttcggcgtatccgagcggagtcgggtaccaaggggttgtttgcaggttttctcccacggattattaaggccgctccctcctgcgccatcatgatctcaacttatgaattcggcaaatcatttttccagcgtcttaaccaagacaggctgctgggcgggtag

SEQ ID NO: 205912 - DNA, 1011 bp, synthetic construct
  misc_feature 1..1011: note = Description of Artificial Sequence: Synthetic coding sequence
  source 1..1011: mol_type = other DNA
atggccgaccaggaccccgccggcatcagccccctgcagcagatggtcgccagtgggaccggtgctgttgttacaagcctctttatgacacctctggacgtagtgaaagtgaggctccagtcacagcgacctagtatggcaagcgggaaatgtctcttatattgcaacggggtcctggagcccctgtacctgtgtccgaacggggctcgctgcgctacttggttccaggaccctacccggttcactgggaccatggacgctttcgtgaagattgtacgccatgaaggcactcggacactctggtccgggctacccgctaccttagtgatgaccgtgccagccacagcgatctacttcactgcatatgaccagctcaaagcatttctgtgtggcagggccctcacctctgatctgtatgcccctatggtcgcgggcgccctcgccaggttgggtacggtcaccgtgatcagtcctctggaactgatgaggaccaaactccaggcacagcatgtgtcctatagagaactgggggcttgcgtcagaaccgctgtcgcccagggaggctggcgcagcctctggcttgggtgggggccgaccgctctgagggacgtgccttttagtgctctgtactggtttaactacgaacttgtcaagtcctggctaaatgggtttaggcctaaagaccagacttccgtcggtatgtccttcgtcgccggtggaatatcgggaacggtcgccgccgtactcacattgccttttgatgtagtgaagacacagcggcaagtcgcattaggagccatggaggctgtccgggtgaaccctttgcatgtggacagcacctggctgctgctgcggaggatcagagcagaatcagggacaaaaggcctgtttgcagggttcctgccccggatcatcaaagcggcgccaagttgcgccattatgattagtacgtacgagtttggcaagtcctttttccagcggcttaaccaggatagattgctaggtggatag

SEQ ID NO: 205913 - DNA, 1017 bp, synthetic construct
  misc_feature 1..1017: note = Description of Artificial Sequence: Synthetic coding sequence
  source 1..1017: mol_type = other DNA
atggaccccgagacccggggccaggagatcatcaaggtgacccccctgcagcaaatgctggctagttgcaccggagccatcctgacaagcgtaatcgtcacaccgctcgatgtggtgaaaatccggctgcaggcccagaacaacccactacctaagggtaagtgttttgtgtacagtaacgggctgatggaccatctgtgtgtttgcgaagaaggcgggaataaactgtggtataagaagcctggaaatttccaggggaccctggacgcatttttcaagataatccggaacgaaggaatcaaaagcctgtggagcgggcttcccccgacactagtgatggccgtgcctgccacagtcatttactttacttgctatgatcagctctccgcactccttaggagcaaattgggcgaaaatgagacatgcattcctatcgtcgccggaatcgtcgccagattcggcgccgtgaccgtgatcagtccactggaactgatcagaaccaaaatgcagtcaaaaaaattttcctacgttgaattacatcgctttgtgagtaagaaggtgagcgaagacggttggatctcactttggagggggtgggcaccaaccgtgctgcgcgacgtcccattcagcgcgatgtattggtacaactatgagattctgaagaagtggctatgcgagaaaagcggtctgtacgaaccaacatttatgattaattttacgagcggggccctctctgggagcttcgccgccgtggccacattgccctttgacgtcgtgaagacccaaaagcagacccaactgtggacatacgaatcacacaaaatctcaatgccgctgcatatgagcacctggattattatgaaaaatatcgtggccaaaaatggcttttcaggcctcttttctggtttaatacctagacttattaaaatcgcccctgcctgcgcaattatgatcagtacatatgaatttggaaaggccttttttcagaaacagaatgtaaggagacaacagtactag

SEQ ID NO: 205914 - DNA, 1113 bp, synthetic construct
  misc_feature 1..1113: note = Description of Artificial Sequence: Synthetic coding sequence
  source 1..1113: mol_type = other DNA
atgggcgcccagcccggcgagccccagaacacctgcagccggatccaaaccctgtttcgacgggtcaagactctactcatcaaagctccccctcctccgcagcccccccccccgcccccaagctggaatcctggttgcacccatgtttacggctatgccttcggacacatgcacgataataatctcgagcatctgccttctcagcaggtgttggacaccggtgagcagctaatggtgcctgtagaggtactggaggtggataataaggaagccctttggaaattccttctgtcaggtgcgatggccggcgcagtctccaggaccggcactgcccctctggatcgggccaaagtgtacatgcaggtctatagctccaagaccaacttcacaaatctgctgggcgggcttcagtcgatggtgcaggaaggcgggttccgaagcctctggcgggggaacggtattaacgtgctcaaaatagcacccgagtatgccatcaagttttcggtgtttgagcagtgcaagaactacttctgcggcattcagggatcaccaccatttcaggaaagactcctggccggttctctcgccgtggccatcagtcagactttgataaaccctatggaagtactgaagacaaggctgacgttgcggcgtaccggacagtacaagggtctcctggattgcgcccgtcagatcctgcagcgggagggaactagagcactgtaccgaggttatctgccaaatatgttgggcataatcccatacgcctgtacagatctggcggtctacgaaatgctgcagtgtttttgggtaaagtcgggccgggacatgggagatccaagtgggctagtgtccttgtctagcgtgaccctgtccacaacctgtggccaaatggcttcttaccctctgactcttgtaagaacgcgcatgcaggcccaggacacagttgaaggctctaatcccaccatgcgtggcgtgctacagcggatactggcccagcagggctggctgggtctataccgcggcatgacccccacactccttaaggttctacctgctggcggcataagttatgtggtttatgaggccatgaaaaagaccttgggcatctag

SEQ ID NO: 205915 - DNA, 729 bp, synthetic construct
  misc_feature 1..729: note = Description of Artificial Sequence: Synthetic coding sequence
  source 1..729: mol_type = other DNA
atgggcgcccagcccggcgagccccagaacacctgcagccggatccagactctctttcgcagagttaagacccttttaatcaaggctccgcccccccctcaacccccacctccgccccctagttggaatcctggatgtacccatgtgtacggctacgcgttcggacacatgcacgataacaacctagaacacttaccatctcagcaggtactcgacacaggagagcagctcatggtgcccgtcgaagtgctggaagtcgataacaaggaagccctgtggaagtttttgctgtctggggctatggctggggctgtcagtcggaccggcactgccccgctggatagagccaaggtctacatgcagttgctggggagattgagacaggagaatagactgaacctaggaggtgggggctgttccgagccgagaagccctgaccgaactcctgcttgggcaaccgaaagcactccccccagacgtacttccccgacgtgttggggcggctacagagcgtggagcagaagggctgcatctgccccatgtggaggcgcaactgcttccacttgcagccgactgctgctgtcgatgccgagttcatctccctactcctcatccgcgagaatcacgagcgtggagtataaaggaccgagacctagtcggtccgtgtcactgctcgccccgtggctgtggccttccccgcgaccctcatcaacgccttggcggtgttag

SEQ ID NO: 205916 - DNA, 957 bp, synthetic construct
  misc_feature 1..957: note = Description of Artificial Sequence: Synthetic coding sequence
  source 1..957: mol_type = other DNA
atgggcaacggcgtgaaggagggccccgtgcggctgcacgaggacgccgaagccgtgttatcctcaagtgtatcatcaaagagggaccacaggcaagtcctttctagtttactctctggcgcactcgctggggcccttgccaaaaccgctgtggcacccctagaccgtaccaagataattttccaggttagttcaaaaagattcagcgcaaaggaggcgtttcgcgtgttatattatacttatctcaacgagggatttcttagcctctggcggggcaactcagccaccatggttcgcgtggttccctatgccgcaatccaatttagcgctcacgaggagtacaagaggattctcggatcctattatgggttcagaggcgaggctcttcccccatggccacgtctgtttgctggagccttagctgggacaacagccgcctctctgacctacccattggacctcgtgagagccaggatggcagtgaccccgaaggagatgtattcgaacatcttccatgtttttatcagaatctccagagaggagggtttgaagactctctatcacggctttatgccaactgtgctcggtgtgattccctatgccggactctcctttttcacatacgagacattgaagtccttacacagggagtatagtggacggaggcagccctatccttttgaaaggatgatttttggcgcatgcgccggtctgatcggacaaagcgcctcgtacccacttgacgtggtgagaagacggatgcagaccgcaggagtgaccgggtatcctcgggcaagcatcgcgaggaccctcagaactattgtgcgggaggagggggctgtaagaggtttgtataaggggcttagtatgaattgggtgaaggggccaattgcagtggggatatcctttacgacctttgacttaatgcagattctgcttagacatctgcagagctag

SEQ ID NO: 205917 - DNA, 1011 bp, synthetic construct
  misc_feature 1..1011: note = Description of Artificial Sequence: Synthetic coding sequence
  source 1..1011: mol_type = other DNA
atgagcgtgctgttcttctacatcatgcggtacaagcagagcgaccccgagaaccccgataatgatagatttgtgctggccaagattgccacacgcaaagcatgcgggttagctctggcaaagctgggttatgctaataaccgggtggtagttctggacggcgacacacggtacagcaccttctcagaaatattcaacaaagaatacccggagcggtttatcgagtgcttcatggccgaacaaaacatggttagcgttgctctaggctgtgcttctagaggacgaacaattgctttcgcttcaactttcgctgccttcctaacgagagcatttgaccatattcgcataggcggtttggccgagtcaaatatcaacatcattgggtcgcactgcggagttagtgttggagacgatggggccagtcaaatggctctcgaggacatcgcgatgtttagaaccattccaaaatgcacaatcttctatccaaccgatgccgtaagcaccgaacacgctgtcgccctcgcagcaaacgcgaaagggatgtgcttcattagaacaacaaggcccgagacgatggtgatatatacaccacaggagcgctttgagattgggcaggctaaggttctccgccattgtgtctccgacaaggtgacagtgattggggccggaatcaccgtgtacgaagctcttgcagccgcagacgagctttctaagcaggatatttttatacgagttattgatttgttcactattaagccattggacgttgcgacgatcgtgtcttccgcgaaagcgacagaaggccggattattacggtggaagaccactatccccagggagggattggagaagccgtgtgtgccgccgtatccatggatcctgacattcaggtgcacagtctagccgtttcaggtgttccacagagtggcaaatcagaggagctgctggacatgtatgggatctccgcccgtcatatcatagtcgcagtgaagtgtatgctacttaactag

SEQ ID NO: 205918 - DNA, 870 bp, synthetic construct
  misc_feature 1..870: note = Description of Artificial Sequence: Synthetic coding sequence
  source 1..870: mol_type = other DNA
atggccacctggcggcgggacggccggctgaccggcggccagcggttgctgtgtgctggcttagcaggcactctgtcactaagcttgaccgcccccttggaacttgctgcgtatcgaaaatttgttgtcctattcactgacgatttaggacacatatcccagtggagttctattatggcaggaagcctggctggaatggtcagcactatcgttacttatccaactgatctgatcaaaacccggctgatcatgcagaacattctggagccgtcttaccgcgggctgcttcatgcattctcaaccatctaccagcaggagggcttcctcgcattgtacaggggtgtgtctctaacagtcgtaggcgccctgccattttccgctgggtcccttctagtgtatatgaacctagaaaaaatttggaacggcccaagggatcagttctctctccctcagaatttcgccaacgtatgtctggccgcggcagttacccaaacattatctttcccctttgagacagttaagcgcaagatgcaggcccaaagcccatatcttccgcactctgggggcgtcgacgtgcacttttccggagccgtggactgcttcaggcaaatcgtgaaagctcagggcgtgcttgggctttggaacggactcaccgcaaacttactgaagatcgtcccatatttcgggatcatgtttagtacatttgagttctgcaaacggatttgcctgtatcaaaacggctatatcttgagcccgctgtcttataaactcacacccggcgtggatcagagcctgcagccccaggagctgcgtgaactgaaaaaatttttcaagacacgcaagccgaaaccgaagaaaccgacgttatag

SEQ ID NO: 205919 - DNA, 681 bp, synthetic construct
  misc_feature 1..681: note = Description of Artificial Sequence: Synthetic coding sequence
  source 1..681: mol_type = other DNA
atggccacctggcggcgggacggccggctgaccggcggccagcggctgctgtgtgctggcctggccggcacactgtctctatccctgaccgccccgttagagctcgctactgtgctggctcaggtcggagtcgtgaggggacatgctcggggaccctgggcaaccggacaccgagtttggcgagcagaggggcttagagctctgtggaaaggtaacgccgtcgcatgcttgagactgttcccttgttcggcagtgcagcttgccgcctacagaaaatttgtcgtgctcttcacagacgatttgggacatataagtcaatggagctccatcatggcagggtctctggctgggatggtgagtacaatagttacttacccaaccgacttgattaagaccagactaatcatgcagaacatcctggaaccctcgtaccggggcctgctgcatgccttctctaccatctatcagcaggagggtttcttagcactgtataggggagtgtcactgaccgtggttggttccgaaccactccctcccacacaatggagatccagatgcccttttttgcgcagttcggggctgctacccgccgacagcgaaggccctggcggacccggggcgctggagtggatcgactcccaatttacagaggatagctcaattttctggaactatgtgtag

SEQ ID NO: 205920 - DNA, 945 bp, synthetic construct
  misc_feature 1..945: note = Description of Artificial Sequence: Synthetic coding sequence
  source 1..945: mol_type = other DNA
atggaggacaagcggaacatccagatcatcgagtgggagcacctggacaagaagaagttctacgtttttggagttgccatgaccatgatgataagagtgagcgtgtaccctttcacacttataaggacacgtttacaggtgcagaagggcaagagtttgtaccacggaacctttgacgcttttattaagatattgcgtgcagacggaatcactggcctgtaccgaggattcctggtcaatacctttaccttaatctcgggccagtgttatgtgacaacctacgaactgactaggaaattcgtggccgactattcacaaagcaacacagtgaaaagcctggttgctggagggtccgcatcactggtcgcacagtccatcacggtgcctattgatgtggtctcacagcacttgatgatgcaacggaagggggaaaagatgggccgatttcaggttcgcggaaacccagagggacagggggttgtcgcatttggccagacgaaggatatcattaggcagattttgcaggccgacggactccgtggcttctatagagggtatgttgccagcctgcttacatatattccgaattcagcagtctggtggcccttttaccatttctatgcggaacagctgtcatacctgtgccccaaagaatgcccccatattgtatttcaggctgtttctggccccctagcagctgcaacagctagtattttgaccaacccgatggatgtcattagaacacgggttcaggttgagggtaagaattctatcattctgacattccgccagctgatggccgaggaggggccctggggcctgatgaaaggcctttctgctaggatcattagcgcaaccccctcaactattgttatcgttgttggttacgagagtcttaaaaagctgtcccttcgcccggagttagtggactccaggcactggtag

SEQ ID NO: 205921 - DNA, 489 bp, synthetic construct
  misc_feature 1..489: note = Description of Artificial Sequence: Synthetic coding sequence
  source 1..489: mol_type = other DNA
atggaggacaagcggaacatccagatcatcgagtgggagcacctggacaagaagaagttctacgtctttggggttgcaatgaccatgatgatcagggttagcgtgtaccccttcacgctgattcgcactcggttacaagtacagaaggggaaaagtctgtatcatgggacttttgatgcctttattaaaatccttcgggcagacggtatcaccggactatatcggggctttttagtgaacacatttaccctgatcagtggccagtgctatgtcaccacgtatgaacttaccagaaagttcgttgcggactatagccaaagcaatactgttaagtctctgatggccgaagaggggccttgggggctgatgaaaggacttagcgctcggattatcagcgccacaccatccacaatcgttatcgtggtcgggtacgagagccttaagaaactgagcttgcgacccgagctggtggattcaaggcactggtag

SEQ ID NO: 205922 - DNA, 876 bp, synthetic construct
  misc_feature 1..876: note = Description of Artificial Sequence: Synthetic coding sequence
  source 1..876: mol_type = other DNA
atggaggacaagcggaacatccagatcatcgagtgggagcacctggacaagaaaaaattctacgtgttcggggtagcaatgactatgatgattcgagttagcgtatacccatttacactgatcagaacccgtctgcaggtgcaaaaagggaagtccttgtaccatggcaccttcgatgctttcatcaaaatcctgcgtgccgacggcattaccggtctctatcgcggcttccttgtgaatacattcaccctgatttctgggcaatgttatgtcaccacctacgagctaacgcgcaagttcgtggccgactactctcagtccaatactgtgaaatccctcgttgcaggcggatctgcaagcctggtggcacagtccatcaccgtgagagggaaccctgaagggcagggggtggtcgccttcggccagacaaaagacatcatccgacagattttacaggcagacggcctcagggggttctaccggggatatgtcgcctcacttctgacttacattcccaattccgccgtctggtggcccttttaccatttttatgctgaacaattgtcttacctgtgtcccaaggagtgcccgcacattgtgttccaagcagtgtcgggacccttagcagccgccacggccagcattttaaccaatcctatggacgtcatccggacacgggtgcaggtcgagggtaaaaattcgataatacttaccttccgccagttaatggctgaggaaggcccgtgggggctgatgaagggactctctgctaggatcatcagcgcaaccccctccactatcgtgattgtggttggatacgaaagcctgaagaaactttccctacgtccagaactggtcgactcaaggcactggtag

SEQ ID NO: 205923 - DNA, 741 bp, synthetic construct
  misc_feature 1..741: note = Description of Artificial Sequence: Synthetic coding sequence
  source 1..741: mol_type = other DNA
atggtgaagatctaccggcacgagagcctgctgggcttcttcaagggaatgagtttcccaattgcttctatcgcggtggtaaattcagtcttattcggcgtgtatagtaatactctgctcgttctgaccgccacctctcatcaggaaaggcgagcacagccaccatcctatatgcatatcttcttagctggatgcaccggcggctttctgcaggcctactgcctcgcacccttcgatctgattaaagttcgcctccagaatcagaccgagccccgggcacagcctggctcccctccaccgagataccagggcccagtgcattgtgcagcatccatttttagagaggaggggccccgcgggctcttccgcggtgcatgggccctgaccctgagggatactcctacagtgggcatctattttatcacctacgaaggactgtgccggcaatataccccagaaggacagaacccatctagtgccaccgttttggtggccggggggttcgctggtatcgcatcctgggttgccgccactcccctcgatatgattaagtcccggatgcagatggatggcctgaggcggagagtgtatcagggaatgctggactgcatggtgagcagtatcaggcaggaagggctcggggtgtttttccgtggcgtgactattaattcagctcgggccttccccgtaaatgctgtgacgttcctgagttacgagtatttgcttagatggtgggggtag

SEQ ID NO: 205924 - DNA, 795 bp, synthetic construct
  misc_feature 1..795: note = Description of Artificial Sequence: Synthetic coding sequence
  source 1..795: mol_type = other DNA
atgcccgtggaggagttcgtggccggctggatcagcggcgccctggggctcgtcctgggacatccctttgatactgtgaagctgttaggtttcttcaaaggaatgtcctttcccatagcaagtattgccgttgtaaacagtgtgctgttcggagtctattcaaatacccttttggtacttacagcaacaagccatcaggaacgtagggctcaaccacctagctatatgcacatctttctcgccggctgtaccggagggttcctgcaggcctactgcttggctccatttgacctgatcaaggtgagactgcagaaccagactgagccgcgcgcccagcctggtagtccccccccgagatatcagggtccggtgcattgtgcagcatccatattccgggaagagggcccgagagggttgtttcgtggcgcatgggcactcaccctgcgtgacacccctaccgtcgggatctattttattacctacgaggggttatgcagacaatacacccccgagggccagaatccgtcatctgctacagtgctcgttgcaggcggcttcgctggcatcgctagctgggtggcagccactccactcgacatgatcaaatcccgcatgcagatggacggtctgaggcggagggtgtaccagggaatgctggattgtatggtatctagcatccgacaggagggattgggtgtcttcttcaggggagttacaataaacagtgcgagggcgttccccgttaatgccgttacctttctgtcttacgagtacttgctgcgctggtgggggtag

SEQ ID NO: 205925 - DNA, 555 bp, synthetic construct
  misc_feature 1..555: note = Description of Artificial Sequence: Synthetic coding sequence
  source 1..555: mol_type = other DNA
atggtgaagatctaccggcacgagagcgcctactgcctggcccccttcgaccttatcaaggtcagactgcagaatcaaacggagccccgggcacagcccggatccccacctccccggtatcaggggccagtccactgcgcggcgtctatttttcgagaagagggacctcgggggctctttagaggggcctgggctctgaccctcagggacactccgacggtgggcatctattttatcacatatgaagggttatgtcgccagtacacccccgagggccagaatcctagttccgctaccgtccttgtggcaggggggtttgccggcattgcctcttgggtggctgctacccccctcgatatgatcaagagcagaatgcagatggatggcctacgcaggagggtttaccagggcatgctagactgcatggttagcagcattagacaggaagggctaggtgtgttttttcgtggggtgacgatcaatagtgcccgcgcattccccgtgaacgcagtgacattcttgagctacgagtacttactccggtggtggggttag

SEQ ID NO: 205926 - DNA, 867 bp, synthetic construct
  misc_feature 1..867: note = Description of Artificial Sequence: Synthetic coding sequence
  source 1..867: mol_type = other DNA
atgcccgtggaggagttcgtggccggctggatcagcggcgccctggggctggtgttgggacatccctttgacaccgtgaaagtgcggctgcagacgcagacgacctatagaggcattgtagactgcatggttaagatctatcggcatgaaagtctcctgggttttttcaaaggcatgagctttcctattgcctcaattgccgtcgtaaattctgtgctctttggcgtatatagtaataccctgctcgtgctcaccgccaccagccaccaggaacgcagggcccaacccccatcatacatgcacatcttccttgctggatgcaccggtggattccttcaggcctactgtcttgctcctttcgacctgattaaagtgaggttgcagaaccagaccgagcctagagcccagcctggcagccccccacccaggtatcaaggccctgtccattgtgcggcgagcatcttccgagaagaaggcccgcgcggtttgttccggggagcctgggcccttacgctgcgagataccccaaccgtcggcatatattttataacttatgagggcctgtgtcgacagtacacaccggaagggcagaaccctagctctgctacagtgctagtcgctggtgggtttgctggcatcgcttcatgggtggccgccaccccccttgacatgattaaatccagaatgcagatggatgggcttaggcgccgcgtgtatcaaggcatgttggactgcatggtgtcatctatcaggcaggaggggttgggagtgttctttaggggcgtgactattaatagcgcccgcgcttttccagtcaatgccgtgactttcctgagctacgaatacctccttcgttggtggggatag

SEQ ID NO: 205927 - DNA, 741 bp, synthetic construct
  misc_feature 1..741: note = Description of Artificial Sequence: Synthetic coding sequence
  source 1..741: mol_type = other DNA
atggtgaagatctaccggcacgagagcctgctgggcttcttcaagggaatgtcctttccaatcgcgtcgatcgctgtggtcaacagcgtgctctttggcgtgtacagtaatacactgctggttttgaccgcaaccagccaccaggaaagaagagcccagccgccttcctacatgcacattttcctggcaggctgcaccggggggttcctgcaggcctactgcttggccccatttgacctcatcaaggtccgattgcagaaccagacggagccgcgggcgcagccaggcagccccccgccccgttaccaaggaccagttcactgcgcggcatccatctttcgcgaggaggggcccaggggcctctttcggggggcatgggctctgacccttagggacacccctactgtgggtatttatttcattacgtacgaggggttgtgccggcaatacactccggaagggcagaaccctagtagcgcgactgtgcttgtagctggcggatttgctggtatcgccagttgggtcgcggccactcctctcgacatgataaagtcacgaatgcagatggacggcttgagacggcgggtataccagggcatgttggactgcatggtatcctctattagacaggagggcctcggcgttttctttaggggagtgacaattaactctgccagagcatttccagtgaatgccgtaacattcttgagttacgagtacttactgcggtggtgggggtag

SEQ ID NO: 205928 - DNA, 867 bp, synthetic construct
  misc_feature 1..867: note = Description of Artificial Sequence: Synthetic coding sequence
  source 1..867: mol_type = other DNA
atgcccgtggaggagttcgtggccggctggatcagcggcgccctgggtttggtgttaggccatccgtttgatacagtcaaagtcagactgcagacccaaaccacctatagggggattgtggattgtatggtgaagatatatcgacatgagtccttgctggggttctttaaagggatgagctttccaatcgcatctatcgctgtggtcaactccgtcctgttcggagtgtactcaaacaccttgctggtcctgacagccacgagtcaccaggaacggcgagcgcaacctccttcctacatgcacattttcctagccggctgcacgggaggctttttgcaggcttattgtctggctccctttgaccttatcaaggtgaggctgcaaaatcaaacggaaccaagggcccagcccggttctcctcctcccagatatcagggtccagtccactgcgctgcttcaattttccgggaagaagggcccagggggctgtttagaggcgcatgggctctgaccctgcgggatactcctaccgtgggcatctacttcatcacttatgaaggactgtgcagacagtataccccggaaggccagaatcccagtagtgccactgtcttggtggctgggggctttgctggcatcgcatcttgggtcgctgccacccccctggacatgattaagtcacgaatgcaaatggacggtctgcgccggagagtgtatcagggaatgcttgactgtatggtctcctcaattcggcaagagggcctgggtgtgtttttccgaggggtcactatcaactctgcaagagcttttcctgtgaatgctgttaccttcttgtcctatgagtacctgttacggtggtgggggtag

SEQ ID NO: 205929 - DNA, 357 bp, synthetic construct
  misc_feature 1..357: note = Description of Artificial Sequence: Synthetic coding sequence
  source 1..357: mol_type = other DNA
atgcccgtggaggagttcgtggccggctggatcagcggcgccctgggcttggtgctcggacacccgtttgataccgtgaaagttcgcctgcagacacagacaacctataggggaatagtggattgtatggtcaagatataccggcacgaaagtctgcttggattcttcaagggtatgtcattccctatagctagcatcgccgtcgttaattccgtcctatttggagtatattcaaacaccctgctagtccttaccgctacttcccatcaagaacgcagggcccagccaccttcttatatgcatattttcctggccggctgcactggggggtttcttcaggcctactgcctggcctag

SEQ ID NO: 205930 - DNA, 1257 bp, synthetic construct
  misc_feature 1..1257: note = Description of Artificial Sequence: Synthetic coding sequence
  source 1..1257: mol_type = other DNA
atgcacccccggcggcccgacggcttcgacggcctgggctaccgggggggtgcgcgggatgagcagggtttcggtggagcatttcctgctcggtctttttctaccggatcagacttaggtcactgggttactacaccccctgacatcccgggatcacggaatcttcactggggagagaaatcccctccctatggcgtccccaccacaagcaccccatatgagggcccaactgaggagccattctcaagtggcggcggaggctccgtgcagggtcagtcctctgagcagctgaaccgcttcgccggtttcggtatcggtctggctagtctgttcacagagaacgtgcttgcccatccatgtattgtgcttcgtcgacaatgccaggtgaactatcatgcccaacattatcacctgactcctttcacagtcattaacattatgtactcttttaacaaaactcagggcccccgggcgctctggaaaggcatggggtccaccttcatagtccagggcgtgacgctgggcgctgaaggaattatcagtgaattcacacctctccctcgagaggtcctacacaaatggtcacccaaacagataggcgaacatttactacttaaatcattaacatacgtagtggccatgcctttttatagcgccagtcttatagagactgttcagtcggagatcattcgagacaatactgggatcctggagtgcgttaaggagggaatcggcagggtgatcggaatgggagtccctcattccaaaaggctgttgccccttctcagtctcatcttccctacagtcctgcacggggttctccactacattatctcctcagtgatccagaaatttgttttgctaatcctgaaacggaagacttacaattcccacctcgcggagagcacaagccccgtgcagagcatgcttgatgcctattttcctgagctgattgcaaactttgccgcgtcgttgtgctcagacgtgattctgtatccgttggagactgtactgcaccggctccacatccagggcacccgcactataatcgacaatactgacctcggatatgaagttcttccgattaatacacagtacgagggcatgagggactgtatcaacacaattcgtcaagaggagggggtatttggcttctataaaggatttggcgccgtgattattcagtatacgttacatgcggcagtactccaaattaccaaaataatttactcgacgctgttgcagaataacatctag

SEQ ID NO: 205931 - DNA, 1014 bp, synthetic construct
  misc_feature 1..1014: note = Description of Artificial Sequence: Synthetic coding sequence
  source 1..1014: mol_type = other DNA
atgcacccccggcggcccgacggcttcgacggcctgggctaccggggtggtgcaagggatgaacaggggtttggtggtgcatttccagccagatcgttcagcactgggagcgatctggggcattgggttactacccccccggatataccaggctcccgcaatttgcactggggtgaaaaaagccctccatatggcgtgcctactacctcaactccatatgaaggccctacagaggaaccattctctagtggtggaggtgggtcagttcaggggcagtcttccgagcagctgaatagatttgctgggtttggaatcggattagcttcactatttactgagaatgtgttggctcacccatgtattgtgctccggaggcagtgtcaagtcaattaccacgcacagcactaccatctgactccattcacggtcattaatataatgtattcatttaacaaaacacaaggaccccgcgctctctggaaaggtatggggagcacatttatagtccagggtgtgaccttgggtgcagagggtataatctctgaattcacccccctgccacgggaggtcctccataagtggagtcccaaacagattggagagcacctcttattaaagtctctcacatatgtggtggccatgccattctattccgcttcacttatcgaaacagtccagagtatgctggatgcctactttcctgaactgatcgcgaattttgctgcctcactgtgcagtgatgtaattctctaccccctagaaactgtcctgcaccgtctgcatatccaaggtacaaggacaatcatcgacaacaccgacttgggttatgaagtcctacccatcaacacacaatatgagggaatgcgcgattgcattaacacgattcgccaggaagaaggcgtgttcggcttctacaagggctttggagcggtgatcattcagtacactttacacgctgctgtgctccagattaccaaaattatctactcgacactgttacagaacaatatctag

SEQ ID NO: 205932 - DNA, 819 bp, synthetic construct
  misc_feature 1..819: note = Description of Artificial Sequence: Synthetic coding sequence
  source 1..819: mol_type = other DNA
atgtacagcttcaacaagacccagggcccccgggccctgtggaaggggatgggaagcaccttcatcgtacagggagtcactctgggagccgaaggcataatttcagagtttacaccccttcctagagaagttctccataagtggagtcctaagcaaatcggggagcatctgttactgaaatcactcacctacgtggtggcaatgcccttctattctgcatccctcatcgaaactgtgcagtccgaaattatcagggataacaccgggattctggagtgcgtgaaggagggcattggccgcgtgatcggcatgggcgtgccccactcaaaacgcttattacccttgctgtccttaatctttccgacagtactccatggtgttctacactacatcatctcatccgttatccagaaatttgtgctccttatcttgaaaagaaagacatataacagtcacctcgccgagagcacctcgccagtccagagcatgttggatgcctattttcctgagttgattgccaacttcgctgcctctttgtgcagcgacgtgattctatatcccctggaaaccgtcctgcataggctgcacatccagggaacccgcaccatcatcgataacaccgatctgggatatgaggtcctgccgatcaatactcagtacgaaggcatgcgtgactgcattaatacgattcggcaggaagaaggtgtgtttggcttctataagggatttggagccgtgattatacagtatacacttcacgctgcggtcctccagatcactaaaatcatctattccacgctgttgcaaaacaacatctag

SEQ ID NO: 205933 - DNA, 618 bp, synthetic construct
  misc_feature 1..618: note = Description of Artificial Sequence: Synthetic coding sequence
  source 1..618: mol_type = other DNA
atgcccttctacagcgccagcctgatcgagaccgtgcagagcgagatcattcgggacaatacgggcatattggagtgtgtgaaggagggaatcggaagggtaatcgggatgggcgtgccccactccaagagactactccctttactgtctttgatctttcctaccgtactacacggggtgctacattacataatcagcagcgtgatccagaagttcgtgttactcatactgaagagaaaaacctacaattctcacctggccgagtccaccagccccgttcaatctatgctggacgcctactttcccgaactgatagccaacttcgccgccagcctctgctcagacgttatcctctaccctctggagacagtcctgcatcgccttcacatccaggggacacggacgattatcgataacactgacctcggctacgaagtcctgcccataaacactcaatatgagggtatgagggattgtatcaacacaatacggcaggaggagggagtgttcggattttacaagggttttggcgccgttatcatccagtatacactgcatgccgctgttctgcagataaccaagattatttatagcacacttctgcaaaacaatatctag

SEQ ID NO: 205934 - DNA, 984 bp, synthetic construct
  misc_feature 1..984: note = Description of Artificial Sequence: Synthetic coding sequence
  source 1..984: mol_type = other DNA
atgaagaccgagcagctgaaccggttcgccggcttcggcatcggccttgcctctctgtttaccgagaacgtgctggcccatccatgtattgtacttcggagacagtgtcaagtcaattatcacgcccagcattatcacctgactccttttaccgtcattaatattatgtattccttcaacaaaacccaggggcctcgggctttgtggaagggcatgggaagtacatttatagttcagggtgtcactctgggtgccgagggtattataagcgaattcaccccacttccgagagaggtgctgcacaaatggtcacctaagcagattggcgagcacttactgctgaagagcctgacttacgttgttgctatgccgttttactcagcatccctaatagagaccgtgcaatctgagattatcagggacaatacgggaattcttgagtgtgtcaaggaagggattggacgagtcatcgggatgggggtacctcacagcaagcgtttgctgccactcttatcccttatcttcccaacagtgctgcacggcgtgctccattatataatctctagtgtcatccagaaattcgtgctactaatcctgaagcgtaagacatataactctcacctggctgaatccacctcacctgtgcagtcaatgctggacgcttactttccagagttaatcgcaaactttgcagcctcgctgtgctcagacgtgattctgtatcctctcgagactgtgttacacagactgcacattcaaggaacccgaaccatcattgataacactgatctaggttatgaggtcctgccgattaacactcagtatgaagggatgagagactgtattaacacaattcggcaggaggaaggcgtgttcggattttataagggctttggagcggtgattattcagtacacactccacgcggctgtcctgcagattaccaagattatatactcaacgcttttgcagaataacatatag

SEQ ID NO: 205935 - DNA, 771 bp, synthetic construct
  misc_feature 1..771: note = Description of Artificial Sequence: Synthetic coding sequence
  source 1..771: mol_type = other DNA
atgggcagcaccttcatcgtgcagggcgtgaccctgggcgccgagggaattatcagtgaattcactccactgcccagggaggtgttacataaatggagtcccaagcaaatcggcgaacacctgctcttgaaaagcctgacctatgtggttgcaatgccgttttattccgccagtcttattgaaaccgtccagtccgaaatcatccgagataatactggaattttggagtgcgtgaaagaaggcatcggccgtgttatcggtatgggcgtgccacatagtaagcgcctgctgccactgctatccttgattttccccacggtacttcatggagtccttcattacatcatcagcagcgttattcaaaaatttgtgctcctgatactcaaacgcaaaacttacaattctcatcttgccgagagtacctcccccgtccagtcaatgttggacgcttattttcccgaactgattgccaacttcgcagccagcctgtgctcagatgttatactttatccattggaaactgtgctgcacagactgcatatccaaggaacccggaccatcattgacaacaccgatctcggatatgaagtgctccccatcaatacgcagtatgaagggatgcgggactgtattaacactatcagacaggaggagggcgtgtttgggttctataaaggattcggtgctgtgataatacagtacacactccacgcggccgtccttcagattacaaagattatatattcaaccttgctccagaataatatatag

SEQ ID NO: 205936 - DNA, 819 bp, synthetic construct
  misc_feature 1..819: note = Description of Artificial Sequence: Synthetic coding sequence
  source 1..819: mol_type = other DNA
atgtacagcttcaacaagacccagggcccccgggccctgtggaaggggatgggaagcacgttcattgttcagggagtcacactcggtgctgagggaattattagcgagtttaccccactccccagagaggtgttgcataagtggagtcccaagcagattggagaacatctcctccttaagtctctgacatacgtcgtggctatgcctttctactcggccagccttattgaaacagtacagagcgagataatccgagataacactgggatccttgagtgcgtgaaggaaggcatcggacgggtgatcggcatgggagtacctcattccaagcggctcctgcccttactatccctgatcttccccacagtgcttcacggtgtgctgcactacatcatatcttctgtgatacagaaattcgtgctgctgatcctgaaacggaagacgtacaacagccatctggcagaatccacctctcccgttcagtctatgttggatgcctacttcccagagctgattgccaatttcgccgcctccctttgcagtgacgtcattctttaccctcttgagacagtgttgcatcggctgcacattcagggcacacgcactataattgataacactgacttggggtacgaagtactgcccataaacactcagtatgagggaatgagggactgcatcaatacaataagacaggaggagggcgttttcggcttctataagggctttggggctgtgataatacaatatacccttcatgcggcagtcctgcagattacaaagattatatactccactctgttacagaacaacatatag

SEQ ID NO: 205937 - DNA, 2220 bp, synthetic construct
  misc_feature 1..2220: note = Description of Artificial Sequence: Synthetic coding sequence
  source 1..2220: mol_type = other DNA
atgagcagcgagagcaaggagcagcacaacgtgagcccccgggacagtgcggagggcaatgacagctacccttccggaattcacctggagttacagcgtgaatcttcgacagacttcaagcagttcgagactaatgaccagtgccggccctatcacagaattctgattgaacggcaagagaagtccgatactaatttcaaagagtttgtgattaagaaactgcagaagaattgccagtgttcaccagctaaagctaaaaacatgatactgggtttcctcccagtgcttcagtggctacccaagtacgatctcaagaaaaacatactgggagatgtgatgtccggcctcatcgtgggcatactcctggttcctcagagcatagcctattccctgctagctgggcaagaacccgtctacggactgtacaccagttttttcgcctcgataatctatttcctgctgggcacatctaggcatatctctgtcggaatctttggcgtcctttgccttatgatcggtgaaacagttgatcgggagctccagaaagctgggtatgacaacgcgcactctgctcctagccttggaatggtgtccaacgggtccacactgcttaaccacacctccgaccgcatttgcgataagtcctgttacgcgatcatggtcggaagcaccgtgacatttatcgccggcgtctatcaggtcgccatgggcttctttcaggtcgggttcgtgagcgtctatctcagcgacgctctacttagcggattcgtcaccggagcctcgttcaccatcctgacctcccaggccaaatatctgctcggactgaatttgcctcggactaacggcgtgggtagcctgattactacttggattcacgtctttcgcaacattcacaagacgaacttgtgtgaccttattacctccctgctgtgcctattagtattattgcccacaaaggagcttaatgaacacttcaagagcaagttgaaagccccgatccccatcgagctggttgtggttgtcgccgctaccttggcaagtcattttggtaagctacacgagaattacaactcctccattgccggacacatacccacaggctttatgccccccaaggtgcctgagtggaatttgatcccgagcgtcgcagttgatgctatagcaatttccattattggatttgctatcaccgtgagcctgagcgagatgttcgccaaaaagcacggatacaccgtgaaggcaaatcaggagatgtacgctataggattctgcaacattataccaagctttttccattgtttcacaacttcggccgcccttgcaaaaacccttgttaaggaatcaaccggttgtcacacccagttgagcggtgtggttacagcattagtactgctgttggtgctgctcgtcatcgcacccctcttttattctctgcagaaaagcgtgctgggagtcatcaccatcgtcaatctgaggggagccctacgcaaattccgcgacctccctaaaatgtggagcatcagccggatggacaccgttatctggtttgtcacaatgttgtctagcgcactcctcagtacagagatcggcctgctggtaggagtctgtttcagcattttctgcgtgatcctgcgcacgcagaagcctaagtcatctctgctgggtctggtggaagaatcggaagtgtttgaatcagtgtctgcttacaagaatctacaaattaagccaggaattaaaatttttcggttcgtagctcctctgtactacatcaataaggagtgcttcaaatctgcgctgtacaaacagacagttaatccgatcctgataaaagtggcttggaagaaggcagctaagcgtaaaatcaaagaaaaagtcgttacattaggcggtattcaggatgaaatgtcggtgcagctgtcacatgatcctctggagttgcacaccatagtgatagattgctctgctattcagttcctggatacagctggaatacataccctcaaagaagtccgccgggattatgaggctattggcatacaagtgcttctggcacaatgcaacccaaccgtgcgcgacagccttaccaacggcgagtactgtaaaaaggaggaagagaatttgctgttctactcagtatacgaagccatggccttcgccgaggtatcaaagaatcaaaagggggtgtgtgtgcctaacggcctgtcactctcctccgattag

SEQ ID NO: 205938 - DNA, 72 bp, synthetic construct
  misc_feature 1..72: note = Description of Artificial Sequence: Synthetic coding sequence
  source 1..72: mol_type = other DNA
atgagcagcgagagcaaggagcagcacaacgtgagcccccgggactctgccgaaggaaacgattcctattag

SEQ ID NO: 205939 - DNA, 2295 bp, synthetic construct
  misc_feature 1..2295: note = Description of Artificial Sequence: Synthetic coding sequence
  source 1..2295: mol_type = other DNA
atgatcgagcccttcggcaaccagtacatcgtggcccggcccgtgtacagtactaatgcgttcgaagagaaccataaaaagactggcaggcatcacaagaccttcctggatcacctgaaagtgtgttgcagttgctctcctcaaaaagcaaagcgcattgttctgtccttattccccattgccagctggttgcctgcttacagattaaaagagtggctcctgagcgatatcgtctctggtatttccactggaatcgtggctgtcctgcaggggctggctttcgccttactcgtcgacatacccccagtttatggcctttatgcatctttctttcccgcaattatctacctcttcttcgggacatctaggcacatctccgtgggtccgtttccaatcctgtctatgatggttggattggctgtgagcggcgccgtgtcaaaagcagttcctgaccgcaacgctaccacacttggtctccctaataactccaacaactcctctttgcttgatgacgagcgcgtgcgggtggcagctgccgccagtgtgacagtcctgtccggaatcatccagttagcattcggcattcttaggattgggttcgtggtaatctacctgagcgaatcactaattagcgggttcacaacggccgccgcagtgcacgtgctggtgtcacagctgaagttcatctttcaactgacagtgccatcccacactgacccagtgagtatcttcaaggtcctttattccgtgttttcacagattgagaagactaacatagctgacctggtcacagctctaatagtgttgttagtggtgagcatagtgaaagagatcaaccagcgctttaaggacaaactcccagtgcccatcccaatagagtttatcatgactgtgattgctgctggcgtctcctatggctgcgattttaagaacagattcaaggtggccgttgtgggggacatgaacccagggtttcaaccaccgatcacacctgatgtggaaactttccaaaacaccgttggcgactgtttcggaatcgccatggtggctttcgcagttgcctttagcgttgccagtgtgtactcactcaaatatgattatcccctggatgggaatcaggagctgatcgcccttggcttggggaatattgtttgcggtgtttttcgaggattcgctgggagtactgccctttctcggtctgccgttcaggagagcacaggtggaaagactcagatcgctgggttgataggcgccataatagtcctgatcgttgtgctggctatcggctttctgctagcacccttgcagaagtccgtcctggctgccttagcactggggaacctgaagggcatgctaatgcaattcgccgagatcggccgtctctggcggaaggacaaatatgactgtcttatttggattatgactttcatctttaccatcgtgctggggttgggtttaggcctcgccgcgtccgttgctttccaattgctcactatcgtgttcagaacccagttcccaaagtgctctacattggccaacatcggaaggacaaacatatataagaacaagaaggactactacgacatgtacgagcccgagggagtgaagattttccgctgtccttcaccaatttattttgctaatattggcttcttcaggaggaaactaatcgacgctgtgggcttcagcccactgagaattcttcgcaagcgcaacaaggcactgcggaagattcggaaactgcagaagcaggggctgctgcaggtgactcccaaaggatttatctgcactgtggatacaattaaagactcagatgaagagctggacaataaccaaatcgaggtgctggaccagccgatcaatacaaccgatctgccattccacattgattggaacgacgatctcccgttgaacatcgaggtccccaagatctctttacatagtctaatcctggacttttctgcagtgtccttcctcgacgtgtccagtgtgagagggttgaagagcattttacaggaatttattcggattaaagtggatgtgtatattgtcgggaccgacgacgatttcatcgaaaagctgaaccgatacgagttctttgatggagaggtcaagagtagcatattttttctgacaatacatgacgctgtattgcatattctgatgaagaaggactattctactagcaaatttaacccttctcaggagaaagatgggaagatcgactttacgatcaacacaaacggcggccttcgaaatagggtgtacgaggtacctgtggaaaccaagttctag

SEQ ID NO: 205940 - DNA, 1956 bp, synthetic construct
  misc_feature 1..1956: note = Description of Artificial Sequence: Synthetic coding sequence
  source 1..1956: mol_type = other DNA
atgctgctgcggaagatcatcaagcggcaggaggacatcatccggcacttctggatcatttcaaagtgcgtggtagcctcttggcttccggcctatagactcaaggagtggctactttctgacatcgtcagtggaatttccacaggcatcgtcgcagtcctgcaaggtctggctttcgcccttttggtcgacatccctccagtctacgggctctacgcttcatttttccccgctataatttacctcttcttcggaaccagcagacatattagtgtgggtccgtttcccattctcagcatgatggttggattagcagtttccggtgctgtctcgaaagccgtgccagataggaatgctacaacgctcggcctgcctaataatagcaataactccagcctgctggacgatgaacgggtgcgggttgcagccgctgccagtgttacagtgctcagcggtatcatccagctcgccttcggaatcctgaggatcgggttcgtggtgatttacctgtccgaatctctgatttccgggtttaccaccgctgcggctgtgcacgtactcgtatcccagttaaagtttatcttccagctgaccgtgccgagccacaccgatccagtgtccatcttcaaggtcttgtattctgtgttttcacagattgagaagacaaacatagcggatctggtgacagccctcatcgtcctcctcgtcgtgagcattgtgaaggaaatcaatcagagattcaaggataaactgcctgtcccaattccgatcgagttcattatgaccgtcatagccgctggtgtatcgtacggctgtgatttcaagaataggtttaaggtggcagtcgtcggggatatgaatcctgggttccagcctcccattactcctgacgtggaaacttttcagaatactgtaggggattgttttggcatcgcaatggttgcttttgccgtggccttcagcgttgcctccgtgtactcgttgaagtacgactatcctctggatgggaaccaggagttaatagctctaggcctggggaacatagtctgcggagtgtttcgtgggtttgctggctctaccgctctgtccagaagcgccgtgcaggagagcactggagggaaaacgcagattgccggcctgatcggcgccatcatcgtcctgatcgtggtccttgctattggattcctattagctcctctgcagaagtccgtgctggctgcactggctctgggaaatctcaaaggcatgcttatgcaattcgcagagatagggcgtctctggcgcaaagacaaatacgactgtctgatttggattatgactttcatattcaccatcgtgcttggtcttggtcttggcctggccgcaagcgttgcttttcagcttcttaccatcgtgtttagaacacagtttccaaaatgctctacgctcgcgaacatcgggaggaccaacatctacaaaaacaaaaaagactactacgatatgtatgaaccagagggggttaagatatttcggtgtccctctccaatctacttcgcgaacattggttttttccgccgcaagctgattgatgccgtgggcttcagcccgcttcgcatccttaggaaacgcaataaggctctgcggaagattcggaagctgcagaagcagggcctgcttcaagtgacacctattttgcaggagtttatcagaatcaaagtggacgtatatatcgttggaactgacgacgactttattgaaaagttgaataggtacgagttttttgacggagaggtaaagagttctatcttctttctgaccattcacgatgccgtgctgcatatcctcatgaagaaggactatagcaccagcaaatttaaccctagccaggaaaaggacggcaaaatcgacttcacgattaacacaaacggtggtctaaggaaccgcgtgtacgaagttcccgtagaaactaagttttag

SEQ ID NO: 205941 - DNA, 363 bp, synthetic construct
  misc_feature 1..363: note = Description of Artificial Sequence: Synthetic coding sequence
  source 1..363: mol_type = other DNA
atgatcgagcccttcggcaaccagtacatcgtggcccggcccgtgtattcaaccaatgcctttgaggaaaaccataagaagacgggcaggcaccacaagactttcctggaccatctcaaagtgtgctgcagttgctcaccccagaaggcgaaaagaatcgtcctgtcgctatttccaatcgcgagctggctcccagcttaccgtctgaaagagtggcttctgtccgatatcgtctcgggaatatccaccgggatagtggcagttctgcagggactggcctttgcactgcttgtggacatcccaccggtgtacggtctgtacgcttcattcttccccgcgatcatatacttattctttggttag

SEQ ID NO: 205942 - DNA, 2343 bp, synthetic construct
  misc_feature 1..2343: note = Description of Artificial Sequence: Synthetic coding sequence
  source 1..2343: mol_type = other DNA
atggccgcccccggcggccggagcgagcccccccagctgcccgagtattcttgctcctacatggtatcgcgccctgtgtatagcgagctggcctttcagcagcagcacgagcgaagattgcaggagcgtaagacactcagggaatcactcgccaagtgctgttcatgctctcgaaagcgcgcctttggtgtcctaaagacattggtacctatcctggagtggctgccaaagtatagggtgaaagagtggctgctgagtgatgtgatttccggggtgtccaccggactggtggctacccttcagggtatggcttatgccctccttgctgctgtgcccgttgggtacggcctgtactctgctttctttcctattctcacatactttatttttggcaccagcagacacatctctgtcggtccatttccagtagtgtcgctgatggtgggtagtgtggtcctcagcatggctcccgacgaacactttttggtgagctcaagtaacggaaccgtactgaacacaacgatgattgataccgctgcccgagacaccgcccgggttctcattgccagtgcactgacactcctggtgggtatcatacagctgatctttggtggcctgcaaattggattcattgtccggtacctggctgatccccttgttgggggattcacgacagctgctgccttccaagtcctggtgagccagctgaagatcgttttgaatgtgtctactaaaaactataatggtgtcctctcgatcatctacactcttgtcgaaatttttcagaatatcggcgacaccaatctggccgacttcaccgccggattgctgaccatagttgtgtgtatggctgtgaaggagctgaatgatcgcttcagacacaaaatccctgtcccaatccccatcgaggtgatcgtgaccatcattgcaacagccatatcatatggtgccaacctcgaaaagaattacaacgctgggattgtgaagtccatcccgagaggcttcctgcctccggaactgcctcctgtgagtcttttttccgagatgttggcggcctcattcagcatcgcggtggtggcttatgccatcgctgtctctgtcggaaaggtgtatgctaccaaatacgattacaccatagacggaaaccaggagtttattgcattcggcatcagcaatattttttcaggttttttcagctgttttgtggccactaccgccctttctagaacggctgtgcaggaaagcacggggggtaaaacgcaggtggcgggaattatttctgcggccatcgttatgatcgcaatactcgctcttgggaaactgctcgaaccactgcagaaaagtgtgttagcagctgtggttattgcaaatctcaaaggaatgttcatgcagctgtgcgacattcctcgtttatggcgccaaaataagatcgatgctgtcatatgggtctttacatgcattgtatctatcatcctgggcttggatttaggactcctagccggccttatttttgggttactgaccgtggtgttaagggtccagttcccttcctggaatggactcggttccattcctagcacagacatctataaatcaacaaaaaattataagaatattgaagagcctcaaggagtcaagattttgagattctcgtcgccgatcttctatggtaacgtggatggatttaaaaaatgtattaagtctaccgtaggttttgacgctatccgcgtctacaacaagagacttaaggctctgcgcaagattcagaagctcatcaagtctgggcagttgcgagctaccaaaaacggcatcatctctgacgctgtgtctacaaataacgcctttgaacctgacgaggacatcgaggacctcgaagagctcgatatccctaccaaagagatcgagatccaggtggactggaacagcgagttgccagtgaaggttaatgtcccaaaggtacccatccatagcctcgtgctggactgcggagctattagttttctggacgtggtcggcgtccgttcactgcgtgtgatagtaaaggagtttcagagaattgatgtgaatgtctatttcgcgagtctacaggactatgtcattgaaaaacttgagcagtgtggattttttgatgataacataagaaaagatactttttttcttacagtccacgacgccatcctttacctgcaaaatcaagtaaaaagtcaggagggacagggctcgatattagagacgattacattgattcaagactgtaaggacacacttgagctaatcgagacagagctgaccgaggaggagctggatgtacaagatgaagccatgcgcacacttgcatcatag

SEQ ID NO: 205943 - DNA, 396 bp, synthetic construct
  misc_feature 1..396: note = Description of Artificial Sequence: Synthetic coding sequence
  source 1..396: mol_type = other DNA
atggccgcccccggcggccggagcgagcccccccagctgcccgagtacagttgctcctacatggtcagccgcccagtgtactccgagttagcctttcaacagcagcatgagcggagactgcaggagcggaaaacactgcgggaaagcctagccaaatgctgctcatgctccaggaagcgggcattcggcgtgttgaaaactctggtgcctattcttgaatggctgcccaaatacagagtcaaggaatggctcctttcggatgtgatctctggggtgtcaacgggcttggtggcaaccctgcaaggaatggcatatgccctgctagcagcagtaccagtcggctacggactgtattcggccttttttccaatccttacatatttcatttttgggtag

SEQ ID NO: 205944 - DNA, 1026 bp, synthetic construct
  misc_feature 1..1026: note = Description of Artificial Sequence: Synthetic coding sequence
  source 1..1026: mol_type = other DNA
atgcggcacggcctggccgtgcccagcgtgctggccgccgtggtgattgcaaacctcaagggcatgttcatgcagctttgcgacatcccaaggctgtggcggcagaacaaaatagacgccgtgatctgggttttcacctgtatcgttagtatcatactgggtctcgacctgggattgttggcaggactcatatttggcctgctgactgttgtactgagagttcagttcccatcctggaatggactgggtagcattcctagtaccgatatatacaagagcaccaagaattataaaaacatcgaagagccccagggtgttaagatcctcagattctcgtcgccaattttttacgggaatgtggatgggttcaaaaagtgtatcaaaagcacagtgggctttgacgcaattcgagtgtacaacaagcgattgaaggccctgaggaagatccaaaagttgatcaaatccggccagctgcgtgctacaaagaatggaattatctccgacgctgtgtcaacgaataatgcttttgagccagacgaagatatcgaagacttagaagaattggacataccgacaaaggaaatcgagattcaagtggattggaactctgagttaccagtgaaggtgaacgtgcctaaggttcctatccattcactcgttttggactgcggggcaatcagctttcttgatgtggtgggcgtgaggtccctgagagtgattgtcaaggagttccagcgaattgacgttaacgtctacttcgcctccttgcaggattacgtcattgaaaagttggaacagtgcggttttttcgatgacaacatcaggaaagacacctttttcctgacggtgcacgacgcaatactgtatctgcaaaatcaagtcaaaagccaggaggggcagggaagcatccttgagactatcacattgatacaggattgcaaagatacccttgaacttatcgagaccgagctgacggaagaggagttggatgtacaggacgaggccatgcggactctcgcatcgtag

SEQ ID NO: 205945 - DNA, 1050 bp, synthetic construct
  misc_feature 1..1050: note = Description of Artificial Sequence: Synthetic coding sequence
  source 1..1050: mol_type = other DNA
atgatcgccatcctggccctgggcaagctgctggagcccctgcagaagtcagtgctagcggccgtggtgatcgcgaatctcaaaggcatgtttatgcagctttgtgatattcctcgtctttggaggcagaacaaaattgacgcggtcatttgggtttttacctgtattgttagcattatcttggggttagacctgggtctgctagcagggctgatttttggactactaactgtggtgctgcgcgttcagttccctagctggaatggcctcgggtctatcccatcgactgacatctacaagtcgacaaaaaactacaaaaatattgaagaaccacagggggtgaagatactgcgattttcttcaccgattttttacgggaatgtcgacggatttaagaagtgtattaagtccacggtcggcttcgacgccatccgcgtgtacaataagagactcaaggcgctgcgtaaaatccaaaaactgatcaagagcggtcagttgcgcgccactaagaatggcattatcagcgacgcagtgtctacaaacaatgctttcgagcctgacgaagatattgaggacctcgaggagttagacatcccgaccaaggagatcgaaatccaggtggactggaatagtgagctgcctgtgaaggtaaatgttcccaaagtccccatccacagcctggttctcgactgcggtgcaatttcattcctagatgtggtgggcgtgcgctccttgcgcgtgatcgtgaaagaattccaaaggatagatgtgaatgtgtactttgcgtcactgcaggactacgtgattgaaaaacttgaacagtgtggcttttttgacgataatatcagaaaggacaccttttttttgacagtgcacgatgccattctttacctccaaaaccaagtgaagagccaggaggggcaaggatcgatcctcgagacgataacacttatccaagactgtaaagataccctggaactcatcgaaaccgagcttacagaggaggaacttgacgtgcaagatgaggccatgcggacgttggcctcttag

SEQ ID NO: 205946 - DNA, 1104 bp, synthetic construct
  misc_feature 1..1104: note = Description of Artificial Sequence: Synthetic coding sequence
  source 1..1104: mol_type = other DNA
atgcggcacggcctggccgtgcccgtggccggcatcatcagcgccgccattgttatgatcgccattttagccctgggaaagcttctggagcccctccagaaaagtgtcctcgccgctgtggtgattgcaaatttgaaaggcatgttcatgcagctatgtgatatccctaggctgtggcgacaaaacaagatcgacgccgtgatatgggtcttcacctgtattgtgtctattattctgggactcgatctgggactcttggcgggcttaatctttggattgttaacagtggtcttgcgagtgcaatttccttcatggaatggtctcggctcaatcccctctacggatatctataagtctacaaaaaattataagaacatagaagaaccccagggtgtgaagattctgaggtttagctcccctattttttatggaaacgttgacggatttaaaaagtgcattaaatccacagtaggctttgatgccatcagagtttataataaacgccttaaggctctgagaaagatccaaaagttgattaagtctggtcagttacgcgccaccaaaaatgggataatctctgatgccgttagtacgaacaacgcctttgaacccgatgaagacattgaggacctggaagaactggacatccccacaaaggagatcgagatccaggttgattggaattccgagctgcccgtgaaggtgaacgtgccgaaagtccccatccactctctggtcctggattgtggcgccatcagctttctcgatgtcgtaggggtgagaagtctccgcgtgattgtcaaggagtttcaacgaattgatgtcaatgtttattttgccagcctgcaggactatgttatcgagaagctagaacagtgcggattcttcgacgataatatccgcaaggacacattttttcttacagtgcatgatgctattttgtacctgcagaatcaagttaaatcccaggaaggccaaggttctattctggagactatcacgctgatccaagattgtaaagacacccttgagctgatcgaaaccgaactgacggaagaggaattggacgtccaggacgaggccatgcgtacactggctagctag

SEQ ID NO: 205947 - DNA, 2235 bp, synthetic construct
  misc_feature 1..2235: note = Description of Artificial Sequence: Synthetic coding sequence
  source 1..2235: mol_type = other DNA
atggaccacgccgaggagaacgagatcctggccgccacccagcggtactatgtggagagacccatattctctcatcctgtgcttcaagagagactgcatactaaagacaaggtccccgactccattgctgacaaattaaagcaggcattcacgtgcacccctaagaaaatcagaaatatcatctatatgtttcttcccatcacaaagtggctgccagcctataaatttaaagaatacgtgctgggggatttagtctcagggattagtacaggggtgctccagttgccccaggggctggctttcgcaatgttagctgctgtacctccaatattcgggttgtattccagtttttaccccgtgataatgtactgcttcctggggactagtcggcacatcagcataggtccattcgctgtaataagtctgatgatcggaggcgtggcggttcgtctggtgccggacgatattgtgattcccgggggggtcaatgccacaaatggaactgaggctcgggatgcactgcgcgtgaaagttgctatgagcgtgacgcttctttctggaatcatccagttctgtctaggagtgtgccgcttcggattcgtagcaatctatctgacagaaccgcttgtccgtggctttacaacagccgccgcagtgcatgtgttcacatctatgcttaagtacctttttggagtcaagaccaaacgctacagcgggatcttttccgtggtgtactctactgtagccgtgctgcagaatgttaaaaaccttaacgtttgttctttgggggtgggtctgatggtgtttggtttgctcctcggaggcaaagaatttaatgaacgtttcaaggagaaattgcccgcaccaattccattggaattcttcgccgtggtgatggggaccggaatatccgcgggatttaatctgaaggagtcctataatgtggacgtggtgggcactctgcctcttggcctgctacctcccgcgaatccggacacatcactcttccatctggtttatgtagacgctattgctatcgcaatagttggctttagcgtaacgatcagcatggcaaaaaccctcgctaacaagcacgggtaccaggtggacggcaatcaggaacttattgcacttggactctgcaacagtatcgggagcttgttccaaaccttctccatatcctgctcgctgagccgctccctagttcaggaaggtacaggtggcaagacccagctcgctggctgcctcgctagtctgatgatactgctcgtcattctggctaccgggtttttgttcgagagcctgccgcaggccgtactgtccgctatagtcattgtaaatctgaagggtatgtttatgcagtttagtgatcttccctttttctggcgcacttctaagatcgagttaacgatttggttaacaacatttgtgtccagtttgtttttaggattagattacgggctaataaccgctgtgattattgccctgctcaccgtaatctataggacccagtccccatcctataaggtgctcggtaaacttccggagaccgacgtgtatatagatatcgatgcctacgaagaggttaaagagatccccggaattaagatttttcaaatcaacgctcctatatattacgccaactcagacctgtatagcaatgccctcaaacgcaagaccggggtgaaccccgcagtcatcatgggcgcccggagaaaggccatgcgtaaatatgccaaagaggttggcaacgccaatatggccaatgccacggtggtgaaggcggacgcagaagtggacggggaagacgccaccaagcccgaggaagaagatggcgaggtgaaatatcctcctatcgtaataaagtccaccttcccagaggaaatgcaaagattcatgccacctggcgataacgtgcacaccgtcatcctggactttacacaggtaaatttcatcgactccgtgggagtgaagacgctcgccggtatcgttaaggagtacggggacgtgggcatctacgtgtacctggccggatgcagtgctcaggtggtcaacgaccttacacggaaccggttttttgagaacccagccctgtgggagctgcttttccacagcatccacgatgctgtgcttgggtcccaactgcgagaggcactagccgagcaggaggcttcggccccccctagccaggaggatttggaacctaatgccacacccgcaacaccagaggcctag

SEQ ID NO: 205948 - DNA, 2058 bp, synthetic construct
  misc_feature 1..2058: note = Description of Artificial Sequence: Synthetic coding sequence
  source 1..2058: mol_type = other DNA
atggaccacgccgaggagaacgagatcctggccgccacccagcggtattatgttgagcgcccgattttcagccatcctgtgctgcaggaacggctacatacgaaggacaaagttccagattcgatcgccgataagttgaaacaggcgtttacttgtacccccaagaaaatccggaatattatctatatgtttctgccaatcaccaagtggctgcctgcctacaaatttaaggaatatgtgctgggagacttggtgagcgggattagtacgggggtgctccagcttccacagggacttgcttttgccatgcttgccgccgtgcccccaatcttcgggctgtatagtagtttttatcccgtgatcatgtactgcttcctgggcacaagtaggcatatttcgattggtcccttcgcagtgatctcactgatgatcggcggcgttgctgtccggctggtccctgatgacattgtcatcccaggtggagttaatgccaccaatggaaccgaagcccgggatgccctgcgcgtgaaagtggccatgagcgtcaccctcctgagcggtatcatccaattctgcctgggagtgtgtcgatttggcttcgtggcgatctatctaacggaaccactcgttagggggtttacaacagcagcggcggtccatgtcttcacatccatgctgaagtacctcttcggcgtgaagaccaagcgatattctgggatattcagcgtcgtgtatagtaccgtggcagtgctacaaaacgtgaagaatctcaacgtttgctctttaggcgtggggctgatggtgttcggccttttgttaggcggtaaagagttcaatgagcgatttaaagagaagttgccagcgcccattcctctggagttcttcgcagtcgttatgggaaccggcatctctgctggatttaacctcaaagaaagctataatgtggatgttgtgggcaccctgccactcggactgctgccccctgccaatcccgacacttctttgtttcacctggtatacgtcgatgcgatcgccattgctatcgtaggcttttcagtgacgataagcatggctaaaactctcgccaacaagcacggctatcaggtcgatgggaaccaggagttaattgccttgggcttatgcaattccatcggctcactgttccagacgttctctatctcgtgcagcctgagccggtctctggtgcaggaaggcactggtggaaaaacccagctcgcggggtgccttgcgtcactgatgatcctcctggtaatcttggctacaggctttctgttcgagtcactgccacaggctgtgctctccgccatcgtcatcgttaacctgaagggcatgttcatgcagttctctgacttgccatttttttggagaacctcaaaaattgagctgacaatatggctgactactttcgtaagctctctgtttctgggcctggactatggcctgataaccgccgttatcattgctctgctgaccgtgatataccggacacaatccccatcttataaggtcctgggtaaactgcctgagacagatgtctacatagacatcgacgcctatgaagaagtgaaggaaatccctgggattaagatattccagattaatgcccctatctactatgcgaacagcgatctttacagcaacgctttaaagagaaagacaggggtgaatcctgctgtgattatgggcgcccgacgcaaggccatgcgcaagtatgccaaagaagtgggcaacgccaatatggcaaacgctactgtcgttaaagcagatgctgaggttgacggggaggacgccactaaaccggaagaagaggacggggaggtaaagtatccacccatcgtgattaaatcaactttccccgaggaaatgcagaggttcatgccccctggggacaatgtgcataccgtgattctcgacttcacacaggtgaactttattgatagcgttggggtaaaaaccttggctggcatagttaaagagtacggggacgtgggtatatacgtctatctggctgggtgctcggcgttcattcaaaggtag

SEQ ID NO: 205949 - DNA, 534 bp, synthetic construct
  misc_feature 1..534: note = Description of Artificial Sequence: Synthetic coding sequence
  source 1..534: mol_type = other DNA
atgggcgcccggcggaaggccatgcggaagtacgccaaggaggtggggaacgccaatatggcaaacgctaccgtcgttaaagctgacgcagaggttgacggcgaagatgcaactaagcctgaggaagaagacggagaggtgaagtatccgccgattgttattaaaagcacgttccccgaggagatgcaaagattcatgcctcctggagacaacgttcacacagtcatccttgacttcacccaggtcaacttcatcgactccgttggtgttaaaaccttggccggcattgtgaaagaatacggtgacgtcggcatttacgtgtacctcgccgggtgtagcgcacaggttgtcaatgacttaactcgcaaccgttttttcgaaaacccagccctttgggaactgctgttccactctatccacgatgccgtgctcggctctcaactcagggaagcactggctgaacaggaggctagcgctccacccagccaggaggacctggagcccaatgcgactcccgctacgcccgaagcatag

SEQ ID NO: 205950 - DNA, 1008 bp, synthetic construct
  misc_feature 1..1008: note = Description of Artificial Sequence: Synthetic coding sequence
  source 1..1008: mol_type = other DNA
atggaccacgccgaggagaacgagatcctggccgccacccagcggtattacgtggaacgacccatctttagtcacccagtgctgcaagagagactgcataccaaagataaagtgcccgattctatagccgacaaacttaagcaggccttcacatgcacccccaagaagatccgaaatatcatctatatgtttctgccaatcaccaagtggctccccgcatacaaatttaaagagtacgtgctgggcgatctggtctctgggatatcaaccggcgttcttcagttaccacaggggctggcattcgccatgctcgctgctgttccacctattttcgggctctattcatctttctacccggtgataatgtattgctttctcggcacctctaggcatataagcataggacctttcgccgtgataagcctcatgattggcggagtcgctgtgagactggtgccagatgacattgtgatcccagggggagtaaacgcaaccaacggcacagaagcgcgcgatgccctgcgagtcaaggttgccatgagcgtgactctgctaagtggaatcattcagttttgcctgggcgtgtgtcgttttggcttcgtggccatttacctcactgagcctctcgtcagaggcttcactaccgctgcagcggtgcatgtatttacatctatgctgaagtacctatttggagtcaagaccaagagatattcgggaatcttcagcgtcgtgtacagtactgtagccgtcctgcagaatgtgaagaacctgaatgtttgctcccttggggtgggcttgatggtctttggactgcttctggggggcaaggaatttaacgagaggtttaaagaaaagctgccagcccccattccacttgagttcttcgcagtggtgatgggcacgggcatctccgcagggtttaacctcaaagaatcttataacgtggacgtagtgggtactctacctctgggtttccacactgagatgacaaggagatggcgcccttag

SEQ ID NO: 205951 - DNA, 2145 bp, synthetic construct
  misc_feature 1..2145: note = Description of Artificial Sequence: Synthetic coding sequence
  source 1..2145: mol_type = other DNA
atggaccacgccgaggagaacgagatcctggccgccacccagcggtactatgttgagaggcccatcttctcgcatcctgtgctccaagagcgcctgcacacaaaagacaaggtcccagatagcatcgctgataagctgaaacaggctttcacttgcacccccaagaaaattagaaatatcatttatatgttcttacctatcacgaagtggctacccgcttataagtttaaggagtatgttttgggagacctggtgtcaggcatttcaaccggcgtcctccagctgccccagggccttgcttttgcgatgctagcagcggtgccgcccatctttggcctctactccagcttttaccccgtgatcatgtactgttttctgggaaccagcaggcatatctctattggccccttcgcagtgatcagcctaatgatcggaggggtggccgtgaggcttgtgccagatgacatcgtgatccctgggggcgtgaacgccactaatgggaccgaggctcgcgacgcactgcgcgtgaaggtggctatgtctgttactctgctgtcaggaattatccagttctgcctcggagtgtgtcgtttcgggtttgtggccatttatctcacagagccccttgtgcgcggtttcaccaccgcagcagcagtacacgtgtttaccagcatgctgaaatacctgtttggggtcaagacaaagcgttattctgggatcttttctgtcgtgtactctaccgtggctgtactgcagaacgtgaaaaacctcaatgtctgctcactgggagtgggattgatggtttttgggctactgttgggtggcaaagaatttaacgaacgctttaaggagaaactgcccgctcccattccattggaatttttcgccgtggttatgggaacgggaataagcgccggttttaatctcaaagaaagctacaacgtcgatgtggtgggcacattgcccctgggcctcttgccccccgctaatccggacacctctcttttccatctggtgtatgtggacgccatagccatcgctatcgtgggattttcggtgacaatttctatggccaaaacactcgccaacaagcacgggtaccaggttgacggtaatcaagaactgatcgcactgggcctctgcaattcaatcggctccctgttccagacatttagtattagctgcagtttaagcagatcactggtccaggaaggtacaggcggaaagacccaattagctggttgtttggcctctttaatgattttgctagtgattctggctacaggcttccttttcgagagtctacctcagaccatatggctcacaaccttcgtgtccagtctgttcttgggcttagactacggcctgatcaccgctgtgatcatagcactgctcaccgttatctatcggacccagagtccaagctacaaggtgctgggcaagctgcccgaaaccgacgtgtacatagacattgatgcatatgaggaggtgaaagaaatccctgggattaagatattccaaataaacgcccctatttactacgcaaactctgatctctactctaacgcattgaagagaaaaaccggcgtgaacccggccgtgattatgggggctcggagaaaggccatgcgcaagtatgctaaggaggtgggaaacgccaacatggctaacgccaccgtggtcaaggccactcaggatgcagaagtggatggcgaagacgctaccaaacctgaggaggaagatggcgaggtgaagtacccccccatcgtcatcaaaagcaccttccctgaggaaatgcagagatttatgcctcccggagataatgtgcacacggtcattttggactttacacaggtgaacttcatagactctgttggcgttaaaaccttggcaggtatcgtaaaagagtatggcgacgtgggtatttacgtgtacctggccggttgctccgcccaagtggtgaatgacctgactagaaaccggttcttcgagaatcctgcattatgggagctgttgtttcattctattcacgatgctgtactaggttctcagcttcgcgaggctctggctgagcaggaagcaagcgcgccccctagtcaggaagacctcgaacctaatgctactcccgcaactccagaagcgtag

SEQ ID NO: 205952 - DNA, 2241 bp, synthetic construct
  misc_feature 1..2241: note = Description of Artificial Sequence: Synthetic coding sequence
  source 1..2241: mol_type = other DNA
atggaccacgccgaggagaacgagatcctggccgccacccagcggtactatgtggaacggccaatcttcagccaccccgtactgcaggaacgcctccataccaaagataaggtgcctgactctatcgcagataaactcaaacaggcctttacttgcacgccgaaaaaaatccggaatattatctacatgttcctgccgataaccaaatggctgcccgcctacaagtttaaggagtatgttcttggcgatcttgtttctggcatctccactggagtgctccagctgcctcagggcctagcctttgccatgctggctgcagtgcctcctattttcggtctgtattccagcttctaccctgtgataatgtactgtttccttggcacctcacgacacatttccatcggcccgtttgccgtgatatctctaatgattggcggggtcgctgtccgactggttcctgatgatatcgtgatccctggcggtgtcaacgccactaacggcaccgaggctagggatgccctgcgtgtcaaagtcgctatgtccgtcacgctgttgtcgggtattatccagttttgtctaggcgtgtgcagatttggcttcgtggcaatttatctgacagagcctttggtgagagggttcacaacagctgcagccgtccatgtgttcacaagcatgctgaagtacctctttggagtgaagaccaaacgctacagcggaatcttcagtgttgtgtactcaacagtggcagtgttgcaaaacgtgaagaatttgaacgtgtgtagcctgggagttggactgatggtttttggcctgttgctgggtggcaaggagtttaacgaaaggttcaaggaaaaactcccagcgcctataccactcgagttcttcgctgtggttatgggaactggaatttctgcaggctttaatttaaaagaatcgtataatgtggacgtggttgggaccctgcctttagggctgctgcctccagccaaccctgatacatcactcttccacctggtatacgtcgatgccatcgccatagcaatcgtcggattttccgttactatctctatggccaaaacgcttgccaacaagcatggctaccaagttgacggtaatcaggagctcattgcattggggctgtgcaacagtatcggttccctgttccagacctttagcatctcatgtagcctgtctagaagccttgttcaggagggcacggggggcaagacacagttagccgggtgtctggcctcactcatgattctgttggtcattcttgcaacaggcttcctttttgagtctttgccacaggctgtgctgtcagccattgtgatcgtgaatctgaaagggatgtttatgcagttctccgaccttccttttttctggcggacctcaaaaatcgagcttaccatctggttaacgacttttgtgtcaagcctatttttagggttagattacgggctcattactgcggtgatcattgctcttctaactgtgatttaccgcacccagtctccttcttataaggtgctgggcaagttacctgaaactgatgtatacatcgacatcgacgcttacgaggaggtcaaagaaattcctggtatcaaaattttccagataaatgcccctatctactatgcaaatagcgatctgtactctaatgccctgaagcggaagacaggggtgaatccggctgtgattatgggcgccagaaggaaagccatgagaaagtatgctaaagaggtcggcaatgcaaatatggccaatgccaccgttgtgaaagctacccaggacgctgaggtggacggcgaagacgccacaaaacctgaagaggaagatggagaagtgaaataccctcctattgtgattaaatcaacgttccccgaagagatgcagagattcatgccccccggcgataacgtgcatacggtaatcctggatttcacccaagtcaactttattgactctgtcggcgtcaaaactctggccgggatcgttaaagagtatggggacgtgggcatctacgtctatcttgccgggtgttccgcccaggtcgtcaacgacttgactagaaaccggttcttcgagaaccccgctctgtgggagctgttgtttcatagtattcacgacgccgtcctcggcagccaattaagagaagccctcgctgaacaagaggcatccgccccaccatcccaggaggacttggaacccaatgccacacccgccacaccagaagcgtag

SEQ ID NO: 205953 - DNA, 2124 bp, synthetic construct
  misc_feature 1..2124: note = Description of Artificial Sequence: Synthetic coding sequence
  source 1..2124: mol_type = other DNA
atggaccacgccgaggagaacgagatcctggccgccacccagcggtattatgtcgagcgtcctatttttagccatcccgtccttcaggaaaggttacacaccaaggacaaggtcccggactcaatcgctgataagctgaagcaggccttcacttgtacaccaaagaaaatccggaatataatttatatgttcctcccgataactaaatggctgccggcatataaattcaaggagtatgtgcttggcgacttagtgtctgggatcagcacgggagtgctgcagttgcctcagggaccgttcgccgtgatctcgctgatgatcggaggggtcgccgttaggcttgtgccggacgatatcgtgatcccggggggtgtgaacgcgaccaacggcacagaggcccgagatgctctcagggtgaaggtagccatgagcgtgaccttgctgtccggaatcattcaattctgtctcggggtttgcagatttggcttcgtggcaatttacctcacagagcccctcgtacgcggtttcaccactgctgcagcagtacacgtgtttacttccatgctgaaatacctgtttggggtgaaaacgaagcgttattcgggaatcttcagcgtggtttactctaccgtagctgtcctgcaaaacgtcaagaaccttaacgtgtgctccctgggggtcgggctgatggtgttcggtcttctgctgggagggaaggaatttaatgaacgattcaaggaaaagctcccagccccaattccgctggagtttttcgcagtcgtgatgggaaccggtatcagtgccggttttaacctgaaagaatcttataacgtcgatgtggtgggaaccctgccgctcggtcttctgcctcctgctaatccagacaccagcctgtttcacctagtttatgtggacgcaattgcaatcgcgatagtgggctttagcgtgaccatcagcatggcaaagacactcgctaataaacatggctaccaagttgacggcaatcaggagcttatcgctctgggtctttgtaatagtattgggagcctatttcagacattcagcataagctgctccctgtccagatctctggtccaggaggggacgggtggaaagacacaactggccggatgcctcgcctcactcatgattctcttggtaattctggcaacaggatttctgttcgaatctttgccacaggctgtcctctcagctattgtgatcgtaaacctaaaaggaatgtttatgcagttcagtgaccttccctttttctggcgtacgagcaagatcgagctgaccatttggctcacaactttcgtttcctcgctttttttagggctggattacggcctcatcacggccgtcatcattgcattgctgactgtgatatatagaacacaatcgccaagttataaagtgctgggaaaactgcccgaaaccgatgtgtacatagatatcgatgcttatgaagaggtcaaggaaattccagggatcaagatctttcaaattaacgctcctatctactacgccaatagtgatctttattccaatgcactgaaaaggaaaactggggtgaatcccgccgttatcatgggcgctaggagaaaagcaatgcgcaaatacgcgaaggaagtggggaacgcgaatatggccaatgcgaccgtggtaaaggcagacgctgaggtggatggggaggatgccactaagcctgaggaggaggatggtgaagtaaagtacccccctatcgtaatcaagtcgaccttcccagaggagatgcagcggttcatgccacccggggacaacgtgcatactgtcattctggactttacacaagttaacttcatcgacagtgtgggggtcaagacactcgccggaattgtcaaggaatatggagatgtgggtatctacgtgtatctcgccggctgttccgctcaagtagtaaacgatttaactaggaatagattttttgaaaacccagcactgtgggagttgctcttccactcaatccacgatgccgttctggggtctcagctccgtgaggccctggctgaacaggaagcctctgccccgccatcccaggaggaccttgagccaaatgcaaccccggccacccccgaagcttag

SEQ ID NO: 205954 - DNA, 2139 bp, synthetic construct
  misc_feature 1..2139: note = Description of Artificial Sequence: Synthetic coding sequence
  source 1..2139: mol_type = other DNA
atggaccacgccgaggagaacgagatcctggccgccacccagcggtactatgtagagaggcctatttttagccaccctgtcctccaagagcggttgcacaccaaagataaagtgcctgattcgattgccgataagctaaagcaggcctttacatgcacccccaagaagatcagaaatataatctacatgttcctgccaattacaaagtggctacccgcttataagttcaaggagtacgtgctgggcgacctagtgagcggtatttctactggcgtccttcagctgccacagggcctggccttcgccatgttggccgctgtgccgcccatatttggcctgtactcttctttctacccagtgatcatgtactgttttctgggaactagccggcacataagtatcggaccttttgcagttattagcttaatgattggtggggtggccgtccgcctcgtgcccgatgatattgtcattcctggcggcgtgaatgctaccaatggaacagaagcccgggacgcacttcgcgtcaaggtagccatgagcgtgacgctgctgtctggcataatccagttctgtctcggagtttgtcggttcggctttgtcgcgatatacttaaccgagccattggtacggggtttcaccacagctgcagccgtgcatgtcttcacgtctatgctcaaatacttatttggggttaagactaaacgctacagcgggatcttctccgtggtgtattcgaccgtcgccgtgctgcagaacgttaagaacctcaacgtatgttccctgggggtcggtttgatggtgtttggactattattgggggggaaagaattcaatgaaagatttaaggagaaactgccagctcccattcccttggagtttttcgctgtcgtcatggggacaggtattagtgccggctttaatctgaaagaaagctataacgtggacgtggtgggcaccctgcctctggggttgttaccacccgcaaatcccgatacaagtttgttccatctggtgtacgtcgacgccatcgcaatcgctatcgttggattctctgtcacaatcagtatggctaagacactggccaacaagcacggctaccaggtggacggcaatcaggaactgattgcattgggtttgtgcaattctatcgggagcctgttccaaactttcagtatcagctgctcgctgtcacgctcacttgtccaggaaggcacagggggcaaaacacagctggcagggtgtctcgcttctctgatgatcctgctagtgattctggcgacaggcttcctcttcgagtccttgccgcagacaatctggcttaccaccttcgtttcatcactttttctgggtctagattatgggctgattaccgcggtgatcattgctctgcttacagtaatttatcgaactcaatctccttcatacaaagtgctcggcaagctcccagagaccgatgtgtacatagacatcgacgcctatgaggaggtgaaagagatccctggcattaaaatatttcagattaacgcgccaatttattacgccaatagtgatctctattccaacgccctgaagcggaagacaggagtgaatcctgcagtcattatgggcgcaagaagaaaggcaatgcgcaagtatgccaaggaggtaggcaatgctaacatggccaatgccacagtggtaaaggcagatgctgaggtggatggcgaagacgctacgaagccagaagaggaggatggcgaggttaaatacccaccaatcgtgattaagagtacatttccagaggaaatgcagaggtttatgccccctggggataacgtgcacactgtaatactggatttcactcaagtgaattttattgactcagtgggtgtcaagacactggcgggcatagtgaaagagtacggggacgtcggtatctacgtgtatctggctggatgctctgcccaggtcgtcaacgacctgactcggaaccggttttttgagaatccagcgctctgggagctgcttttccatagtatccatgacgccgtacttgggtctcagctgcgcgaggccctcgcagaacaggaggcctccgccccaccatcacaggaggacctggaaccaaacgctaccccagccactcccgaggcgtag

SEQ ID NO: 205955 - DNA, 1551 bp, synthetic construct
  misc_feature 1..1551: note = Description of Artificial Sequence: Synthetic coding sequence
  source 1..1551: mol_type = other DNA
atggaccacgccgaggagaacgagatcctggccgccacccagcggtattatgtggagcgccccattttctcccaccctgtgctacaagagcgactgcacacaaaggacaaggtcccagattccattgcagataaattaaaacaggcgttcacgtgtacacctaaaaaaattcgtaatattatttacatgtttttgccaatcactaaatggctgcccgcctataaatttaaagaatatgtactcggagatttggtgtcgggcatctcaactggcgtcctgcagttacctcagggtcttgcatttgcaatgttggctgcggttcctccgatttttggtctgtacagttccttttaccccgtgatcatgtactgcttcctcggcacttctagacacatctctatcggcccattcgctgttatttccctaatgataggtggagtggcagtgcggctggtccccgacgacatagtcataccaggcggcgtcaacgccacaaacggtaccgaggcaagagacgctctgagagtgaaggtggcaatgtccgtgacattgctgagtggcatcatccaattctgtcttggagtctgcagatttggctttgtagccatttatcttaccgagccgctggtgcgcggttttacaaccgcagccgcagtgcacgtgttcacttctatgctaaaatatctattcggagtcaagactaaacgatactccgggatcttctccgttgtttacagtactgttgcggtgctgcagaacgtgaagaatttgaatgtgtgcagtctcggcgtcggtctgatggtgttcggactgctgctgggtggcaaggagttcaacgagagatttaaagagaagctgccagcccccatacctttagaattcttcgctgtggttatggggaccggcatcagcgcgggttttaaccttaaggagtcttacaatgtagacgtggttggtaccctcccactgggattgctccctcccgccaatcctgacacttctttgtttcacctcgtgtacgtggacgcgattgcgatagccatcgtgggtttttccgtaactatcagcatggccaaaaccttggccaacaaacacggctatcaggtggacggaaaccaggaactaatcgcccttggtctgtgcaattctatcgggtcactgtttcagacattctccatctcatgttccctctctaggtccttggtgcaggagggtacgggcggaaaaacccaactggcggggtgcctggcatccctcatgattttacttgtgatcttggccacagggtttctcttcgagtcccttcctcaggcggtgctgtcagcaattgtgattgtgaatctgaagggcatgtttatgcagttttcagatctccccttcttttggaggacgagcaaaattgaattaacaatctggctgaccacattcgtttcttcactgttcttaggtctagactacggcctgataactgccgtgattatcgccctgctaactgtgatctaccgcactcagtcttttcacaccgaaatgactaggcgctggagaccctag

SEQ ID NO: 205956 - DNA, 1422 bp, synthetic construct
  misc_feature 1..1422: note = Description of Artificial Sequence: Synthetic coding sequence
  source 1..1422: mol_type = other DNA
atggaccacgccgaggagaacgagatcctggccgccacccagcggtactatgtcgaacgccccatcttctcccaccctgtgctgcaggagaggttacacaccaaggacaaggtacctgatagtatcgctgacaagcttaaacaggctttcacatgcactcccaagaagatcaggaacatcatatacatgtttctcccgatcacaaaatggctgccagcttacaaatttaaagaatacgttttaggagatttagtcagtggtatttccaccggggttttgcaactcccacagggcctggcatttgccatgctggccgccgtgccccccatcttcggcctgtacagctccttctaccccgtgattatgtattgcttcctcggaacctcccgccacatcagcataggacccttcgcagtgattagcttgatgataggcggagtggccgtgagactcgtccccgatgatatagtaatccccggaggcgtaaacgctaccaatggcactgaggccagagacgccctgagggttaaggtcgctatgtccgtaactcttttatccggtatcattcaattttgcttgggagtgtgtcgattcggtttcgtggccatttacctgaccgaaccactggtgagaggctttaccacagccgcagccgtgcacgtgttcacatccatgctgaagtacctgtttggggtgaagacaaaaagatacagcggaatattttcagttgtgtatagtactgtcgccgtactgcaaaatgtgaagaatcttaatgtgtgcagcctgggcgtgggactaatggtgtttggcctgttactgggcggcaaggagttcaacgagaggtttaaggagaaactccctgctcccatcccacttgagttctttgcggttgtaatgggcaccggcattagcgctggcttcaatctgaaagagtcttacaatgtcgatgtcgtggggaccctcccactcggtctgttgcctccggccaatccagacacgagtctgttccacctggtgtatgtagatgccatcgctatcgcgatcgtcggcttttccgttacaattagcatggccaaaacactcgccaacaaacatggctatcaagttgatgggaatcaggagctcatcgcactagggctgtgtaatagtattggtagtctcttccagactttcagtatttcttgctccctctctcgctccctggtccaagaagggactggcggaaagacccagcttgcggggtgtttagctagcctgatgattctgctggtgattcttgcaactggatttttgttcgagtccctgccgcagaccatttggctcacaacattcgtctcaagtctgtttttggggctggattacggccttatcacagctgtcatcatagccctcctgactgtgatctaccggacccaaaggtag

SEQ ID NO: 205957 - DNA, 2139 bp, synthetic construct
  misc_feature 1..2139: note = Description of Artificial Sequence: Synthetic coding sequence
  source 1..2139: mol_type = other DNA
atggaccacgccgaggagaacgagatcctggccgccacccagcggtactacgtcgaacgcccaattttttctcatcccgtgctacaggaaaggctacacacgaaggacaaggtaccagattccattgcggataagcttaaacaggccttcacttgcacacctaaaaagatcagaaacatcatttatatgttcctgcccatcactaagtggctgccagcctacaagttcaaagagtatgtgttaggggaccttgtctcaggcatttccacaggcgttctgcagttgccacaaggactggctttcgccatgctggccgccgtgccgccaatctttggcctatattcctccttttatcctgtgattatgtattgttttctgggtaccagccggcatatctctatcggaccttttgccgtgatttctctgatgataggcggagtcgccgtgaggctggtacccgacgatatcgtgatcccaggtggagtgaatgcgacaaatgggaccgaagcccgcgacgccctgagggtgaaagtagccatgtcagtcacattgctcagcgggattatccagttttgtctgggtgtctgcagatttggcttcgtagccatctacttgacagaacctctggtcagaggtttcactaccgccgccgcagtacacgtctttacgtcaatgctgaaatacctgttcggagtaaagaccaaaaggtacagtgggattttctctgtggtgtactctactgtggccgttctgcagaacgtcaagaacctgaatgtatgcagcctgggggtcggcctgatggtgttcggactgcttttagggggaaaggagtttaatgagcggtttaaggagaaactgcccgcccctatccctctcgagttcttcgccgtcgtcatggggacaggaattagtgcaggcttcaatctcaaggaatcttacaatgttgacgtggttgggacattgcctctgggccttctgccgccagccaatcctgatacctctttgttccacctggtttacgtggacgcaatagcaatcgcgattgtcggtttcagcgtcaccatctccatggcgaagacgctcgcgaataagcacggctatcaagtggacgggaaccaggagctgatcgcactgggcctctgtaatagtatcgggagtcttttccagacattcagcatctcttgctcgctaagccggagcctggttcaagaggggaccggcggtaaaactcagctagcgggctgcttagcttccctcatgatcctgctcgtgattctggctacaggttttctgtttgaatcgcttcctcagaccatctggctgacaactttcgtgagttctttgtttttgggtttggattacgggctgattacagcagtcatcatcgccttattgaccgtgatctatcgaacacagagtccatcctacaaagtgctgggaaaactgcctgagaccgacgtgtatatcgacatcgatgcttatgaggaggttaaagagatccctggcattaaaatttttcagatcaatgcacccatttattatgctaattctgacctttacagcaacgctcttaagaggaagacaggagttaacccggcagtcattatgggagctcgaagaaaggctatgcgcaagtacgccaaagaggtgggcaatgcaaatatggctaacgcaactgttgtgaaggccgacgcagaggtggacggagaagatgcaaccaaaccagaagaagaggatggcgaagtgaaatacccaccgatcgtgataaaaagtactttcccagaagaaatgcagaggttcatgcctcccggtgataacgtacacaccgtgatcctggacttcacccaggtcaatttcattgatagcgtgggagttaagacattggcgggaattgtaaaggagtacggcgacgtgggcatttacgtgtatctggctggttgttctgcccaggtcgtcaacgacttaactcgcaacaggtttttcgaaaacccagccctgtgggagttacttttccactccattcacgatgctgtcctgggctcccagctgagggaagcccttgccgaacaggaagctagtgctcccccttctcaggaagatctcgagcctaatgccacacctgctactcctgaagcatag

SEQ ID NO: 205958 - DNA, 1344 bp, synthetic construct
  misc_feature 1..1344: note = Description of Artificial Sequence: Synthetic coding sequence
  source 1..1344: mol_type = other DNA
atggaccacgccgaggagaacgagatcctggccgccacccagcggtattacgtggagcggccaatcttttcgcaccccgttcttcaggagcggctgcacacaaaggataaagtgcctgactccatcgcagataaactcaagcaggccttcacatgcacacctaagaagatccgcaacattatttatatgtttttgcccatcacaaagtggctgcccgcctataagttcaaggaatatgtgctgggagatcttgtatcaggaatctccacaggcgtcctgcagctgccacagggtttagcatttgctatgcttgcagctgtgccacctatcttcggcctgtatagctctttctaccccgtcattatgtattgtttcttaggaacaagccggcatatcagcatcggtccatttgctgtaatctcactgatgatcggcggagtggctgtgcggctagtcccagacgacatcgtcattcctggtggcgttaacgctaccaatggcaccgaggcgagagacgctctgcgggtgaaagtggcgatgtcagttacccttttgtccggtataatccagttttgcctgggagtctgccgctttggattcgtggctatatatttgacggaacccttggtcagaggtttcaccacggcagctgccgtgcacgtgttcacgtccatgcttaagtacctattcggcgtgaagaccaagcgatattctggcattttctccgtcgtctacagcacagtggccgtactgcagaatgttaagaatctgaacgtttgctccttaggtgtcgggctaatggtttttggcctcttgctcggtggcaaagaatttaatgagaggtttaaagagaaactcccggcccccatcccactggagttttttgccgttgtaatgggtaccggaatttctgctgggttcaacctgaaggagagctacaacgtggatgtggttggtactctacccctggggttgctgccgcccgccaacccagacacttcacttttccatttggtatacgtcgacgccattgcgatcgcgatcgttggattttcggtgaccatctcaatggccaagactctggccaacaagcatggatatcaagtggatggaaatcaggagcttatcgcactgggcctctgtaatagtattggatccctgttccagacattctccatcagttgttccttatcccggtcactggtgcaagagggaactggcggcaagacacagacaatctggctcacaacattcgtgagcagtctgttcctagggcttgactacggacttattaccgcggtgatcatcgcgttattgacagtcatttatcgcacccagaggtag

SEQ ID NO: 205959 - DNA, 1956 bp, synthetic construct
  misc_feature 1..1956: note = Description of Artificial Sequence: Synthetic coding sequence
  source 1..1956: mol_type = other DNA
atgggcctggccgacgccagcggcccccgggacacccaggccctgctctcggccactcaagcaatggatctgaggcggcgcgattaccacatggaacgacccctgctgaatcaagagcaccttgaggagctaggccggtgggggtccgcacccagaacacatcaatggaggacatggctacaatgttcaagagctcgggcttacgcactgctactgcaacacctccccgtgctcgtatggctgccaaggtatcccgtgagagactggctacttggggacctcctgtctggcctgtcggtggccattatgcagctcccccaaggtctggcctacgctctgctggccggcctgcccccagtcttcgggttatatagctccttttatcctgtctttatctactttctgtttgggacaagccgccatatctctgtggttctggaggtgtgctggaagctgcctcagtccaaagtcggaactgtggtcactgccgcggtggcgggtgttgtcttagtggtggttaaattgctcaacgacaagctccagcagcagctccctatgcctatccctggggaactcctgaccttaattggggctacagggatctcatacgggatggggttaaagcataggtttgaagtagacgtggtgggaaatatacctgcaggcctcgtccctcccgttgcgccgaacactcagctttttagtaagttagtcggaagcgccttcactatcgcagttgtgggctttgccatcgcgatcagccttgggaagatctttgcactcagacatggctatagggtggattctaaccaggagttagtggccctcggcctctcaaacctcattggtggtatttttcagtgcttccccgtttcctgctccatgtcccggagcctggttcaagagagcacaggcggcaactcacaggtggccggagctatatcatcactgttcatcttattgattatcgtcaagttaggagaactgtttcatgacctgcctaaggcggtgctcgcggccatcataatcgtgaatttaaagggaatgttgcggcagttgtctgatatgaggtctctttggaaagcaaacagagccgacctccttatttggctagttaccttcacagccacaatcctactgaaccttgacctgggattggttgtggcggtgattttttcactgcttcttgtggtcgtccgcacccagatgccacactactccgtgctgggccaggtgcccgataccgatatctatcgcgatgtcgcggaatatagcgaggctaaagaggtcaggggagtaaaagtgttccgatcatcagctaccgtgtatttcgccaatgccgagttctactctgatgccctgaaacagagatgtggcgtggacgtggatttcctgataagccagaagaagaaattactcaagaagcaggagcagctgaagcttaaacagcttcaaaaggaggagaagctgaggaaacaagccgcctcccccaagggggctagcgtttccatcaatgtaaataccagtctggaggatatgaggtctaataacgttgaagactgcaaaatgatggtcagctccggagataaaatggaagacgctaccgccaacggtcaagaggatagtaaagctcccgatgggagtactctgaaagccctggggcttccccaacctgactttcactccctgatcctggatctgggcgccctgagttttgttgatactgtgtgcctaaaatcattgaagaacatctttcacgattttcgcgagatcgaggtggaagtgtacatggccgcatgccatagccctgttgtgagccaactggaggctggccattttttcgacgcctccataactaaaaaacatctatttgcatccgtgcacgacgctgtgacattcgcactgcagcatcccagaccagtgcccgattctcccgtatccgtgacccgcctctag

SEQ ID NO: 205960 - DNA, 2217 bp, synthetic construct
  misc_feature 1..2217: note = Description of Artificial Sequence: Synthetic coding sequence
  source 1..2217: mol_type = other DNA
atggacctgcggcggcgggactaccacatggagcggcccctgctgaaccaggagcacctcgaagaactaggccggtgggggtctgccccccgcacacatcagtggcgtacctggctccaatgtagtcgagctcgggcctatgcgttactgctgcagcatctgcccgtgctcgtctggctcccccgatacccagtccgggattggcttctcggcgatctgttgagcggcctaagtgtcgccatcatgcaactcccacagggattagcgtatgccctgttggcgggcctgccacctgtctttgggttgtacagcagcttctaccctgtttttatttatttcctgtttggcacctcccggcatatctctgtgggcaccttcgccgtcatgtcagtcatggtcgggtctgttactgaatccctggccccgcaggctttgaatgactcaatgatcaatgaaacggctagggatgctgcccgcgtccaggtggcctctacattaagcgttttggtgggactcttccaggtaggactaggccttattcatttcgggttcgtggtcacctacctcagcgaacccctggttcggggttacactaccgcagccgctgtccaggtcttcgtgtctcaattaaagtacgtgtttggcttacatttatcttcacattcaggcccgctctcgctgatctacaccgtgcttgaagtctgctggaaactgcctcagagtaaggttggaacagtagttaccgcggccgtggccggtgtggtgctcgtggtcgtaaagctgctgaatgacaagctccaacagcaattaccaatgccaatccccggcgaactgctcacgctaattggagcaaccggcattagctacggaatgggccttaaacatcgctttgaagtggacgtggtgggcaacatccccgcaggtttggtacctcctgtcgccccgaatacacagctcttttctaagctggtggggagtgccttcaccattgctgttgttggcttcgccatagcaattagcttgggtaaaatcttcgctctgcgccacggatatagagttgactccaatcaagaactcgtggcactcggcctcagcaatcttataggcggcatctttcagtgctttcccgtctcctgctctatgagccggtctctggttcaggagtccactggcggtaactcccaagtggctggggccatctccagtctgttcatactcctaattattgttaaactgggggagctgtttcatgacctgcccaaggcagttctggcagcgatcattattgtgaatctgaaaggaatgttacgtcagctttctgacatgcgcagcctgtggaaggctaaccgggcagatctattgatttggcttgtgaccttcacggctaccatcctgctaaatttggatttagggctggtggtcgccgttattttttctctcctacttgtggtggtcagaacccagatgccccattacagtgtgctcggacaggtcccggacactgacatttacagggacgtcgccgaatactctgaggccaaggaggttcggggggtcaaagtgttccgctccagcgctacggtgtactttgcaaacgctgaattctatagcgacgccctgaagcagcgctgcggagttgatgttgacttccttatctcacagaagaaaaagttattgaaaaagcaggagcagctgaagttaaaacagctccagaaagaagaaaagttgcgtaaacaggcggcctcccctaagggcgcctcggtgtcaataaatgtgaatacctcgctggaggatatgcgaagtaataacgtggaggattgcaagatgatgcaagtatcaagtggggacaaaatggaggatgctacagcaaatggccaggaagactccaaagctcccgatggttccaccttaaaggcactcgggctccctcagccggattttcatagtctaatcctcgacttaggggctctgtccttcgtcgataccgtctgtctgaaaagtttaaaaaacatcttccacgacttcagggaaatcgaagtagaggtgtacatggccgcgtgccatagtccagtggtctctcagctggaggccggccatttttttgatgcctccataacaaagaagcatctttttgctagcgtacatgatgctgtgacctttgcccttcagcacccccgccctgttccggactccccagtgtccgtcacacgattatag

SEQ ID NO: 205961 - DNA, 2223 bp, synthetic construct
  misc_feature 1..2223: note = Description of Artificial Sequence: Synthetic coding sequence
  source 1..2223: mol_type = other DNA
atgggcctggccgacgccagcggcccccgggacacccaggccctgctcagcgcaacccaggccatggatctgaggcgccgcgactaccacatggagaggcctctgttgaaccaggagcatcttgaggagctaggacgctggggctcagccccgaggactcatcagtggcgtacctggcttcagtgttctcgggcaagggcttacgccctactgctccagcatctgcccgtgttagtctggcttccaaggtatccggtccgtgactggctcctgggagatctgctttcagggctttcagtggctataatgcagctccctcagggcctggcttacgctttgcttgctggtctgcctcccgtgttcggactctactctagtttctacccggtgttcatatattttctgtttggtacttcccgccatatctctgtggggaccttcgccgtgatgtctgtaatggtaggaagcgtgacagagtccctcgcaccacaggctctaaacgactctatgatcaatgaaaccgccagagacgctgcacgcgtgcaggtagccagcaccctctctgttctggttggactgttccaagtgggcctgggtcttatccatttcgggtttgtggtgacatatttgagcgagccccttgtaagaggatatactacggccgctgcggtgcaggtatttgtgagtcaactcaaatatgtgttcggcctccatctgagcagtcacagcggaccactcagtcttatctacacagttcttgaggtgtgctggaagctgccccagtctaaagtcggaacggtggttacagctgccgttgctggggttgtccttgtagtggtaaaactgcttaacgataagcttcaacaacagttacccatgccgatcccaggcgaactgcttaccctgattggcgcaaccggcatatcctatgggatgggcctgaagcatcgtttcgaggtggacgttgtcgggaatatccccgctggacttgtccccccagtggccccgaatacccagttattctccaagctggtaggctctgcattcacaatagcggtggtgggctttgccattgctatctccttaggcaagatattcgcactgagacacgggtacagggtggacagcaaccaagaactagtggcactgggactcagcaatctaattggcggtattttccaatgcttcccggtgtcctgctctatgagccggtccctggtgcaggagtctaccggtgggaactcccaggtggccggtgctatttcatccttattcatactcctgattatcgtaaagctcggtgaactattccacgacctacccaaggccgttctcgcagcaataatcattgtcaacttgaagggaatgctgcgacaactctcggacatgcgttcactctggaaggcgaacagggccgacttgctcatctggctggtgaccttcacagccaccattctgctgaacctcgatttaggtctagtggtggccgttatttttagcctgttattggtcgtggttagaacacagatgccacactattctgtactgggccaggtgccagacactgacatatatcgagacgtggccgaatacagcgaggccaaagaagtccggggcgtaaaagtgttcaggtcatcagcaactgtgtactttgctaatgccgaattttatagtgatgctctaaagcagaggtgtggcgttgatgtggatttcctaatctcacaaaaaaaaaaattgctaaagaagcaggagcagctgaagctcaaacagctgcaaaaggaagaaaagctgcgaaaacaagctgggccattgctctcagcctgcctcgccccccaacaggtttcctccggtgataaaatggaggacgccacagctaacggtcaggaagatagcaaagccccagacggctcaactttgaaagccttgggcctgccgcaacctgactttcacagcctcattctcgaccttggagccctctcatttgtggacaccgtctgtttgaagagcctcaagaatatcttccacgattttcgcgagattgaagtagaggtctacatggcggcctgccacagcccggttgtgagccagttagaagcaggacacttcttcgatgctagcattaccaagaaacatctgttcgccagcgtgcatgatgcagttacatttgcactgcagcatccccgaccagtcccagacagtcccgtgtccgtgactcgcctgtag

SEQ ID NO: 205962 - DNA, 2280 bp, synthetic construct
  misc_feature 1..2280: note = Description of Artificial Sequence: Synthetic coding sequence
  source 1..2280: mol_type = other DNA
atgggcctggccgacgccagcggcccccgggacacccaggccctgttgagcgcaacccaagcgatggatcttcgccgtcgcgactaccatatggaaaggccgctccttaaccaggagcatcttgaggaactcggccggtggggcagcgcccccagaacacatcaatggaggacatggctccagtgcagcagggctagagcctacgctctactgctccagcacctgccagtgctggtgtggctcccacggtatccggtccgcgattggcttctcggcgacctgttgtccggactgagcgtggcaataatgcaactgccacagggactcgcctatgcgctcttggccggactgccaccagtgtttggcctgtacagcagcttctatcccgtgttcatctactttctcttcgggacctcacgacatatctctgtgggcacctttgctgtcatgtccgtgatggtaggatctgtaaccgaaagccttgcaccgcaggctctcaatgacagcatgatcaacgagacagcccgggatgccgccagagttcaggtcgcttccacactgtctgtgctggtcgggctgttccaggtgggcttgggcttgatacacttcggctttgtggtgacttacctctccgaacctctggtaagaggctataccactgcagccgcggtccaggtgtttgtcagtcaattgaaatatgtatttggcctgcatcttagctctcactctgggcctttgagcctgatttacacagtgcttgaagtgtgctggaagctgccccagagtaaagtcggaactgtcgtcacggctgcagtcgcaggggtggtgcttgtcgtcgttaagctacttaacgacaagctgcaacagcaactcccaatgcccattcctggagagctgctcacattaataggagctactggaatcagctatgggatgggactgaagcatagatttgaagtggacgtggtcggaaacatccctgccggcctggtgcctcctgtagcccctaacacacaactgttcagcaagctggtggggtccgcctttactattgccgtcgtgggcttcgctatcgctatttccttaggcaagatctttgctctgcgccatggttaccgggttgatagtaatcaagaactggtcgcgctgggccttagtaatctgatcggaggaattttccagtgtttcccggtgtcttgcagcatgtcaaggagcctggtgcaggagtcaacgggcgggaatagccaggttgctggcgccattagcagcctgtttattctgctgatcattgttaaactgggagaattatttcatgatcttccaaaagcagtgctcgcagccattattattgtgaatctgaaggggatgctgcgacagttgagcgacatgaggtctctgtggaaagccaatagggcagacttgttgatctggttggtaaccttcaccgccaccattcttctcaatctagatcttggtctggtagtggctgtgattttcagcctgctccttgtggtagtgcgcactcagatgcctcactacagcgtacttggacaggtaccagacaccgatatttacagggacgtggcagagtactctgaggcaaaggaggtcaggggtgtgaaagtgtttaggtcaagcgcaaccgtgtactttgcgaatgccgaattttattctgacgctctgaagcaacggtgcggagtcgacgtggactttctgattagccagaagaagaaacttcttaaaaagcaggagcagctgaagctgaaacagctgcaaaaggaggagaagcttcgaaagcaggctgcatcacccaagggcgccagtgtctcaatcaatgttaacacatccctggaggacatgaggtcaaataacgtggaggattgtaagatgatgcaggttagttccggggataaaatggaagatgctactgcaaacggccaggaggattccaaggcccctgacggtagtacgctaaaggccctggggcttccccagcccgattttcactctctcattcttgatctcggagccttatcatttgtcgatacagtctgtctcaagagcctgaagaacattttccatgacttccgggagatcgaagtcgaggtatatatggcagcctgtcactcccctgtggtttcccagctggaggccggtcattttttcgacgcttccatcaccaaaaagcatctgtttgcaagcgtgcatgacgccgttaccttcgctctgcagcacccgaggccagtgcctgacagccccgtgtcagttactcggctgtag

SEQ ID NO: 205963 - DNA, 2277 bp, synthetic construct
  misc_feature 1..2277: note = Description of Artificial Sequence: Synthetic coding sequence
  source 1..2277: mol_type = other DNA
atgggcctggccgacgccagcggcccccgggacacccaggccctgctttcagccactcaggccatggacctcaggcgcagagattatcatatggaaagacccctgctgaatcaagagcacctggaggagctaggtcgctggggctctgcgccacgcacccatcaatggcggacctggctgcagtgttcaagggctagagcatacgcactgttgctacaacacctgcccgttttggtctggttgcccaggtatccagtacgggactggctgctgggggaccttttgtccggactgagtgtagctatcatgcagctgccccaggggctagcttacgctctcctggcggggctgccccctgtgtttgggctgtactcatctttttaccctgtctttatctattttctatttgggacctcccgccacattagcgtcggtacttttgcagtaatgtcggttatggtgggctctgtgaccgagtccctggccccgcaggcccttaacgactccatgataaatgaaacagcacgggatgccgcccgagtgcaggttgcatcgacactcagtgtgctggtgggactgttccaggtcggccttgggttaattcatttcggcttcgtcgttacatatctatccgagccattagtcagagggtacaccacagccgcggcggtgcaggtgtttgtatcgcagctgaagtatgtcttcgggctccatcttagtagtcatagcggtccgctgagtcttatttacacagtgctggaagtgtgttggaagctgccacagagcaaggtgggcacagtggtaacagcagccgttgccggcgtagttttggtagtcgtaaagctgcttaacgacaaactccagcagcaacttcccatgcctatcccaggagagctcctgactctcataggcgccacgggcatctcctatgggatgggtctcaagcacagattcgaggtcgatgttgtgggaaatatcccagccggtctggtcccgccagtcgcccctaatacccagctgtttagcaagctggttggctctgccttcactattgccgtggtaggctttgccatcgccattagtctgggcaagattttcgctcttagacatggctacagggtggatagcaatcaagaactggttgcactcggcctctcaaatctaattggaggcattttccagtgcttccctgtaagctgttcgatgagtcgtagcctggtacaagagagcacaggcggtaattcacaagtggcaggagcaatctcatcactctttatcctgctcattattgtaaaactcggggaactttttcatgatctccctaaggctgtgttggccgccattatcattgtgaaccttaaagggatgctgagacaactgagcgatatgaggagtctgtggaaagctaacagagcagaccttctgatctggttagtgacctttactgcgaccattctcctgaatctggatctcgggctagttgtggctgtgattttctctctgcttctggtggttgtccggactcaaatgccacactacagcgtgctggggcaggttcctgatacagatatttaccgcgacgtcgcagaatatagtgaggctaaggaggtacggggcgtaaaagtgtttagaagctccgccacggtgtatttcgccaatgcagagttttattccgatgcactgaaacaacggtgtggagtggacgtcgacttcctgatctcccagaagaagaagttgctgaagaagcaagagcagctgaaacttaagcagctgcagaaggaggagaaactgcggaagcaggccgcttcacctaaaggagcctccgtgagcatcaatgtgaatacctcactcgaagatatgcgcagcaacaacgtcgaagactgcaagatgatggtctcaagcggcgacaaaatggaggatgccactgcaaatggacaggaagatagcaaagcccctgacggttcaaccctgaaagcactggggctaccgcagcctgattttcactccctgattctggatttgggcgccctgagtttcgtcgacacagtgtgcctgaaatctctcaagaacatattccacgacttcagagagatcgaggttgaggtttatatggcagcttgccatagccccgtggtgtcacagttggaggccgggcatttttttgacgccagtataactaagaaacacttattcgcctctgtgcacgacgctgtaacattcgcactccagcacccacggcccgtcccagattcacccgttagcgtcaccagactatag

SEQ ID NO: 205964 - DNA, 2262 bp, synthetic construct
  misc_feature 1..2262: note = Description of Artificial Sequence: Synthetic coding sequence
  source 1..2262: mol_type = other DNA
atgggcctggccgacgccagcggcccccgggacacccaggccctgctcagcgcgacccaagcaatggatttgagaaggagggactaccatatggagagacctctgctgaaccaggagcacctagaagagctggggaggtggggatcagctccacgcacgcaccagtggcgaacctggctgcaatgctcgagagcaagagcgtacgcattactgctgcagcacctgcctgtgcttgtgtggctgcctagatatccagtaagggactggctgctaggggatctgctctctgggctgagtgttgccatcatgcagcttcctcaagatcttttgtcccgactgcactgctatcacagcaccctgggcctcgcatatgccctcctggctggactgccacccgtcttcggactctattcctctttctacccagtatttatttacttcctgttcgggacgtcccgtcacatctctgttggcactttcgcggtgatgtccgttatggtaggtagcgtcactgagtccctcgcccctcaggccctgaacgactctatgatcaatgagacagcgagagacgccgcacgcgtccaagtggcctcaacgctcagtgttttggtagggctgttccaggtggggttgggtttgattcattttggctttgtggttacctacctgtccgagccgctggtaaggggatacacgaccgccgcagcagttcaagtgttcgtttctcagctgaagtatgtatttggacttcatctgagttcccattctgggcctctttctctgatttacacagtactcgaggtctgttggaaacttccccagagcaaggtagggactgttgtgactgccgctgtcgcaggcgtggttctggtagtggtgaagctgttgaacgacaaattgcagcagcagctccctatgcccattcccggtgaactgttgaccttgattggggccacaggtatttcatacggaatgggccttaaacaccggttcgaagttgatgttgtggggaacatacctgcaggactggtcccgcctgtggccccaaatacccaacttttcagcaagctcgtgggatctgcctttactattgctgtagtggggttcgccatcgctatcagcctgggcaagattttcgccttgcggcacgggtaccgggtggatagcaaccaggagctggtggccctgggcttatctaatttaattggggggatctttcagtgttttccggtctcttgtagcatgagtcgctctctcgtgcaggaatcgactggcggcaactcgcaagtggcaggtgccatctcctcactcttcattctcctcattatcgtgaagctcggggagttgttccacgacttgcccaaggcagtgctggcggcaatcatcatcgttaacctgaaagggatgctgcgacagttgtcagacatgcgctctctgtggaaagccaaccgcgcagacctgctgatctggttggtgacttttaccgcaaccatcctgctaaacctggatctcggactggtcgtagcagtgatcttctctttgcttctcgttgtcgtgaggacacagatgcctcactacagcgtgttggggcaggtgcccgacacggatatctaccgtgatgtagctgaatattcagaagctaaagaggtccgcggcgttaaggtgttccggagttccgctacagtgtacttcgccaacgcggagttctacagtgacgccctgaaacaaaggtgcggggttgacgtggatttcctgatctcgcaaaaaaaaaagctgctcaagaagcaggagcaactgaagcttaagcagctgcagaaagaagagaaattacgcaaacaagccggtcctctgttgtcagcatgcttagccccacagcaagtgtcctctggagataagatggaggatgcaacggcaaacggccaagaggattctaaagcacctgacgggagcaccttgaaagcgttgggtttacctcaacccgactttcattcactgatactggatctgggcgccctgtccttcgtggacacggtctgtcttaaatccctcaagaacattttccacgactttcgggaaatcgaagttgaagtctatatggccgcttgccactcacctgtcgtctcacagctggaggccgggcacttctttgacgcttcaatcactaaaaagcatctgtttgcatccgtgcatgacgccgtgacattcgctctgcagcatcctaggccggtgcccgatagccccgtttcggtaacgcgtctgtag

SEQ ID NO: 205965 - DNA, 2172 bp, synthetic construct
  misc_feature 1..2172: note = Description of Artificial Sequence: Synthetic coding sequence
  source 1..2172: mol_type = other DNA
atgggcctggccgacgccagcggcccccgggacacccaggccctgcttagcgctacccaagctatggaccttcggcgcagagactaccacatggaaaggccactgttaaatcaggaacacctggaggagctcggccgctgggggagcgcccctaggacacatcaatggagaacttggctgcagtgtagccgggctcgggcttatgctttgctattacagcacctccctgtgctagtctggctacctaggtacccagtccgggattggctcttgggcgatttgctatccgggctgtcggtcgctatcatgcaactgcctcagggcttagcctacgcactgctggccggcctacccccagtgtttggcctgtactctagcttctacccggtctttatctatttcctcttcggcacctccagacacatctccgtggcgacccccgggcctttaccactactgacggcccccggcaggccgacaggcggggcaggtcccgatccattgcgcctccggggccacctgcccgttcggacctcatgccccaggttataccactcctgtagttgcgctggtctgcggctgacagcccaggtgtgcgtgtggcctccctcagagcagccgctttgggccactgtgccacacctcctccttgaggtttgttggaaacttccacagagtaaggtgggaaccgtggtaacagccgccgtcgcaggggtcgtgctggtggtggtgaagctccttaatgacaaactgcagcaacagttaccaatgccaattcctggggagctccttacactcatcggggcaaccggaatcagttacggaatgggattgaaacaccggttcgaggtggacgttgtggggaacatcccggcagggctggtacccccggtagctcctaatacccagctcttttcaaaactcgtggggtccgccttcactattgcagtagtcggtttcgctatcgccatatcattggggaaaatttttgctctaaggcacggataccgcgtcgattccaatcaagagctggtcgccctcggtctctccaacctgattggcgggatttttcaatgctttcccgtgagctgttctatgtccaggtccctggtgcaagaatctactggcggaaacagtcaggttgccggggcaatatctagtcttttcatccttctcataattgtgaaactgggcgaattgtttcacgacttgccgaaggcagtgttggccgccatcattattgtaaatctcaagggtatgctgagacagctttctgacatgcgcagcctgtggaaggctaacagagctgacctgcttatttggctggtcacattcacggcgacaatcctattaaatctggacttaggactggtcgttgccgtaatcttctccctgctattggtcgtggtacgcactcagatgccccattatagcgtcctggggcaggtccctgacaccgacatataccgtgatgtcgcagaatactccgaggccaaagaggtgagaggagttaaagtcttccgtagctcagccaccgtgtatttcgcgaatgcagaattctatagtgacgccctcaaacagaggtgcggggtggacgtcgatttcctcatctcacaaaagaaaaaactacttaagaagcaagaacagctgaagctcaaacagctccagaaggaagagaagttgcgcaaacaagccgcctctccaaaaggcgccagcgtgtccattaacgtgaatacctcccttgaagacatgaggtccaataacgtcgaagactgcaagatgatgcaagtgtctagtggggacaaaatggaagatgccacagcgaacggccaggaggacagtaaggccccggatggctccacgctaaaagccctcgggctaccccagcccgacttccatagtctgattttggatctgggggctctctctttcgtcgatacagtatgccttaagtccctcaagaatatcttccacgacttcagagagatagaagtggaggtttatatggccgcctgtcacagtcctgtcgtgagccaactggaagccggccacttcttcgatgcgagcattaccaagaaacacctgtttgcttctgtgcatgatgctgtgacatttgcactgcagcatccacgcccggtgccagactctcccgtgagtgtgacacgtctgtag

SEQ ID NO: 205966 - DNA, 1941 bp, synthetic construct
  misc_feature 1..1941: note = Description of Artificial Sequence: Synthetic coding sequence
  source 1..1941: mol_type = other DNA
atgcgggcccccggcgccggcgccgccagcgtggtgagcctggccctcctgtggctgctgggacttccatggacatggtccgcagcggctgccttaggtgtctacgtaggctcaggcggatggcgcttcttgagaattgtctgcaaaactgctcgtcgggaccttttcggcctgtccgtccttatacgcgtgaggcttgagctcaggcgccatcagagagctggccacacaattccgcgcatttttcaggccgttgtgcagaggcagcccgagaggctggcactcgttgacgccggcaccggcgaatgctggacatttgcccagctggatgcatactcaaacgctgtggctaatctgttccggcagctgggtttcgctccaggagatgttgtggccatttttctcgaggggcgccctgaattcgtcggactatggctcggcctggccaaagcaggcatggaggccgccctcctgaatgtgaatctgcggagagaacctttggcattttgtttagggacatcgggagcaaaagccctgatttttgggggtgaaatggtggccgccgtggcagaagtttccggtcacttaggcaagtcccttatcaagttctgcagcggggatcttgggcctgagggtattctgcctgatacccacctgctggacccgctgctcaaagaagcttccaccgccccactggctcagatcccatctaaaggaatggacgaccgcttgttttacatttacacctccggcaccacaggactacctaaggccgcaattgtggtgcatagtcgctactatcggatggccgcttttggccaccatgcttatcggatgcaggcagctgatgtgctgtatgactgtcttcctttataccattccgctgggaacatcataggtgtggggcagtgcctcatctatggcctcacagtggtcctaagaaaaaagttcagcgcctcaagattctgggacgactgcattaagtacaattgtacagtggtgcagtatatcggcgaaatctgtcgatacttgctcaaacagccagtgagggaagccgagcggagacacagagtgcgattggccgtggggaacgggctgcgccctgctatatgggaagaatttacggaacgcttcggggtgcggcagatcggggaattttatggagctacagagtgcaattgcagtatcgcgaatatggacggtaaggtaggatcctgcggatttaactcacgcatcctcccgcatgtgtacccaattcggttggttaaagtcaatgaggatacaatggaactactcagggatgcccaggggctgtgtatcccctgccaggctggcgagcccggcctccttgttgggcagattaatcagcaggaccccctgaggcgttttgacgggtacgttagcgaatctgcaacttccaagaagatcgcacattcagtgttttctaagggcgatagcgcctacctcagtggcgatgtcctggtgatggacgaattagggtacatgtatttccgcgatcggtcaggggacactttccgctggcgcggcgagaacgtcagcaccaccgaagtggaaggtgtgctgagtaggttgctgggacagactgacgttgcggtttatggcgtggcagtaccgggggtcgagggtaaggctgggatggcagctgtggctgaccctcactctctcctggatcctaacgcaatctatcaggagctgcagaaggttcttgctccttacgcacgcccgatctttctgcggttgctaccacaggtcgatacaaccgggacatttaagatccagaaaacccggctgcagcgagagggtttcgaccccagacagacatctgatcggctattttttctggatctgaagcagggtcactatctacccctgaacgaggctgtgtataccagaatctgctcaggagcctttgccctctag

SEQ ID NO: 205967 - DNA, 723 bp, synthetic construct
  misc_feature 1..723: note = Description of Artificial Sequence: Synthetic coding sequence
  source 1..723: mol_type = other DNA
cccgagttcgtgggcctgtggctgggcctggccaaggccggcatggaagctgctctgctcaatgttaatctccgtagggagccgttagccttctgtcttggaacctccggtgctaaggctctaatcttcggtggagagatggttgccgccgtggcagaagtctcaggacatctggggaaaagtctaatcaagttttgcagcggcgatctgggacccgaaggaattctgccagatacccacctcttggacccccttcttaaggaggcaagcactgcgccgctcgctcaaattccctctaaggggatggacgatcgcctgttttacatatatacgtcaggaacgaccgggcttccaaaagccgcaatcgtcgtgcactccagatactaccgtatggctgcattcggccaccacgcctataggatgcaagccgctgacgttctctacgattgcctgccgctgtatcattccgccgggaatatcatcggcgtgggccaatgcttgatatatggactgaccgtggtcctccgaaagaaattctctgctagtagattttgggacgattgcatcaaatataactgcacttggcatgggcctagctggactgagaagttagaaccccagaggaacccatgtctgtccgccgcgctggtaccattgtgcttgcctccgcttccagcctttcaaccactctcacctagtatacctgtccccgtatggccatag

SEQ ID NO: 205968 - DNA, 1941 bp, synthetic construct
  misc_feature 1..1941: note = Description of Artificial Sequence: Synthetic coding sequence
  source 1..1941: mol_type = other DNA
atgcgggcccccggcgccggcgccgccagcgtggtgagcctggcccttctctggttattgggactcccctggacttggtctgcagccgctgctttgggcgtttatgtggggtctggaggctggcgctttctgcgtattgtgtgtaagaccgctcggcgggatctgtttgggctctctgttctgatacgcgtgcgccttgagcttaggcgtcatcaaagagctggccatactatccctaggatttttcaagctgtcgttcagaggcagcccgagcgcttggcactggtcgatgcaggtacgggcgagtgctggacctttgctcagctggatgcgtactcaaatgctgttgctaacctctttcgtcagcttgggttcgccccaggagatgtggtcgccatatttttggaggggaggcctgagtttgtggggctatggctggggttagcgaaggcgggcatggaggccgccctcctgaacgtaaacttgcgaagggagccgctggccttctgcttagggaccagcggcgcaaaagcactgatttttgggggggagatggtggccgccgttgcggaggttagcgggcacctggggaaatccctgatcaagttttgctctggggatttggggcccgagggtattttgcccgatactcacctcttggatcctttgcttaaggaggccagcactgcacccttggctcaaattccctctaagggcatggacgaccgtctcttctatatctatacttctggcacaacaggtttgcctaaggctgctattgtggttcactccagatattaccggatggctgcctttgggcaccacgcgtatcgaatgcaggcagcagacgtgctgtatgactgtctgcctctgtaccacagcgcaggaaatatcataggcgttggccagtgcctgatatacggattaacagtggtgttgcgaaagaagttctctgccagtaggttttgggacgattgcataaagtataactgcacagtggtgcagtatatcggggaaatctgccgctatctccttaagcagccagtccgtgaggccgaaagacggcatagagtccggcttgctgtgggtaacggcctccgccccgccatctgggaagaattcactgaaagatttggtgttcgccagattggcgagttttacggggccacagaatgcaattgctcgattgcaaatatggacggcaaggtagggagctgtggatttaattctcgcatcctgcctcatgtgtatcctattaggctcgtgaaagtgaatgaggataccatggaactactaagggatgcccagggactctgtatcccttgccaagctggtgagcctggcttgctggtaggtcagattaatcaacaggacccactcaggcggttcgacggttacgtatctgagtcggccactagtaaaaagattgcgcacagcgttttctcaaaaggcgactccgcctatctgagcggcgacgtgctcgtgatggacgagctgggatacatgtacttccgagaccggtcaggagatacctttaggtggcggggggaaaatgtgtcgaccacagaggtggagggggtgctctcgaggcttctaggacagacagatgttgcagtctatggtgtggcagtgcccggcgtagagggaaaggctggaatggccgccgtggctgaccctcattcattattagacccaaatgccatctatcaggagcttcaaaaggtgctggcaccctacgctcgccctatcttcctgcgccttctgccgcaagtggacacgactggtactttcaaaattcagaagacgcggctgcagcgggaaggcttcgacccacgccagacgtcagatagactatttttcctcgatttaaaacaaggccattacctgccacttaacgaggctgtctacactcgaatttgttccggagcctttgccctttag

SEQ ID NO: 205969 - DNA, 1863 bp, synthetic construct
  misc_feature 1..1863: note = Description of Artificial Sequence: Synthetic coding sequence
  source 1..1863: mol_type = other DNA
atgctgagcgccatctacaccgtgctggccggcctgctgttcctgccactgcttgttaacctgtgttgcccatacttctttcaggacatcgggtacttccttaaagtagcagctgtgggtcgtcgggtgcgatcctatggcaaaagacgaccggcaagaactatcttacgagcatttctcgagaaagcaagacaaacacctcataagcccttcctgctcttccgggatgagactttgacctacgcgcaagtggaccggcgctctaaccaggtggctcgcgcactccacgatcaccttggtttacgacagggggattgtgtcgccctactgatgggaaatgagcccgcatacgtgtggctctggctcggattggtgaaactgggctgtgctatggcctgtctgaattataatattcgggccaaaagcctgttacattgcttccagtgctgcggtgcgaaggttctgctagtctcccccgagctccaggctgcagtcgaggagattctgcccagcctaaagaaagacgacgtttctatttattacgtcagtcgcacctccaatacagatggcattgatagtttcctggacaaggttgacgaggtgagcacagaacctattcctgagagttggcgctctgaagttacattttcaactcctgcactgtacatatatacatcagggaccacaggactgcccaaggcagccatgatcactcatcagagaatttggtacggaaccgggctgaccttcgtgagcgggctaaaggccgacgacgtcatctatatcactctgcccttttaccacagcgcagctctgttgatcggcatccacgggtgtatcgtggctggcgctaccctagctttaaggaccaaattttccgcttctcagttctgggatgactgccggaaatacaatgtcactgtgattcagtatattggtgagcttcttcgatacttatgcaactcccctcagaagccgaatgatcgagatcataaggtgcgcctggccttgggcaacggcttgaggggggacgtctggcggcagttcgtcaaaagattcggggatatctgcatctacgagttttacgccgcgactgaaggaaatataggttttatgaactatgcccgtaaggtcggggccgtcgggcgcgtcaattacctccagaaaaagatcatcacatatgatctgattaagtacgatgtcgaaaaggatgagcccgtgagggacgagaacgggtactgcgtgagagtccctaagggagaggttggacttctcgtttgtaaaatcacacaactgactcccttcaatggttacgcaggggcaaaagctcagaccgaaaagaagaaacttcgggacgtcttcaaaaaaggggacctctattttaatagcggtgatctgctgatggtggaccacgagaacttcatatacttccacgacagagtcggcgacacatttcgatggaaaggggaaaacgttgcaacaaccgaggtagctgacacagttggtctggttgacttcgtgcaagaagtcaatgtctatggcgttcacgtccccgatcatgaaggacgcatcggcatggcttccatcaagatgaaggagaaccatgagtttgacggaaaaaaattattccagcacatcgccgactatcttcccagttatgctagacctcggttcttgcgaattcaggacactatcgaaattacaggtacatttaagcatcgaaagatgacactggttgaggaaggcttcaatccagccgtaatcaaggacgccctctactttttggacgatacagctaaaatgtacgtccccatgactgaagacatctacaacgctatttcggccaagacactcaagctttag

SEQ ID NO: 205970 - DNA, 1704 bp, synthetic construct
  misc_feature 1..1704: note = Description of Artificial Sequence: Synthetic coding sequence
  source 1..1704: mol_type = other DNA
atgctgagcgccatctacaccgtgctggccggcctgctgttcctgccactgctggttaacctctgctgtccttacttctttcaggatatcggctacttccttaaagttgctgccgtgggtcggcgggtgagatcatatgggaaacgacggccagctcgtaccattttacgggccttcctggagaaagcccgacaaacaccgcacaagcccttcctgctgtttcgggatgagacactgacctatgcacaggtcgatcggaggtctaatcaggtcgcacgtgcgctgcacgatcatctaggactgcgacagggcgattgcgtagcactccttatgggcaatgagcccgcctacgtgtggctgtggttgggtctggtaaagttaggttgtgccatggcgtgcctcaactataatatccgggccaaaagcctcctgcattgcttccaatgttgtggcgccaaggtcctcttggtctcaccggaactccaagctgcagtggaggagatcctaccctcgttgaaaaaggatgacgtgtctatctattacgtgtcaaggacgtcaaacaccgacggaattgactcattcttggacaaagtggatgaagtgagcaccgagcctatccctgaaagctggcggagcgaggtgactttcagcaccccggccctttatatttacacttccggaaccactggagcgacactcgcactgcggaccaagttctctgccagtcaattctgggacgattgtagaaagtataatgtcaccgtaatccagtacatcggcgagctccttcgatacctctgcaactctccccagaaaccaaacgatcgggaccataaggttcggctcgcgcttggcaacggcctacgcggcgatgtgtggcggcagttcgttaaaagattcggtgacatttgtatttatgaattttacgccgcgaccgaggggaacataggattcatgaactatgctcgcaaagttggcgctgtcggcagggtcaattacctccaaaaaaaaattatcacctacgacctgatcaaatatgacgtggagaaagatgagccagtgagagacgaaaatggctactgcgtacgcgtcccaaagggggaggtgggcctcctggtatgcaagattacgcagttaacccccttcaacggctacgccggtgccaaggctcaaaccgagaaaaagaagctgagagatgtcttcaagaagggtgatctttatttcaacagcggtgatctattgatggtcgaccatgaaaacttcatatatttccacgaccgcgtcggagacaccttccgctggaagggcgaaaacgtcgcaaccaccgaagtcgccgatactgtgggcctcgtcgattttgtgcaggaagtcaatgtgtacggcgtccacgtgcctgaccacgaaggcaggatcggaatggcgtctatcaagatgaaagaaaaccacgagtttgatggcaaaaagctgttccagcacattgccgactatcttccctcttatgcacggcctcggtttctgcgtatacaggacaccattgagatcacggggacattcaagcaccgcaagatgacgttggtggaagaaggctttaaccctgctgtaatcaaagatgccttgtattttctggacgacaccgccaaaatgtatgtgccaatgacggaggacatttataacgctatatccgcaaagacgctgaaattgtag

SEQ ID NO: 205971 - DNA, 2436 bp, synthetic construct
  misc_feature 1..2436: note = Description of Artificial Sequence: Synthetic coding sequence
  source 1..2436: mol_type = other DNA
atgcccaagccccccaagccccggaacaacctggaggaccggcacaaccctggcatccagggccgccgcgagcatcggcccggtccgggaagagttagggccgcttctagccctgggggctctgctcctagggcagagaggcgcctctggggggaagggtgggaatccggcgccgccccccatccacactccagtagagtgtcagccctcaggccatgcggagtggtaggggcttgggtggggatgggcgtgtgccagaggacccgcgccccgtggaaggagaaatcccagctcgaacgggcggcgctcggctttaggaagggggggtcgggtatgtttgcttccggctggaaccaaacagtgccgatagaggaggctggaagcatggccgccttactccttttacctctactccttctccttccgctactgctgcttaagctgcacctgtggccacaactgcggtggttacctgccgacctcgcttttgcagtgcgggccctgtgttgcaaaagggccttaagagcccgcgccctggctgctgcggccgccgacccagagggaccagaaggcggctgttcgctcgcctggcgactggcagagctggcccagcagcgcgccgcccacacctttctcatacatgggagccgccgcttctcttacagcgaagcagagagggaatccaaccgcgcagcaagggcctttctgcgcgctctcggctgggactgggggcctgatggaggtgattccggcgaagggtcggcgggagaaggcgagcgtgccgctcctggtgccggagatgcagccgccggctcaggtgccgaatttgccggaggggatggcgctgcccgcggtggtggggccgcagcacccttatcacccggtgccactgtggccctgcttctacccgccggtcctgagttcctgtggctttggttcggactcgcaaaagccgggcttaggaccgcatttgtgcccacggcactacgcagaggccccttactccattgcttgcgttcatgcggggcccgcgccttagttcttgctccagagttcctggagtcacttgaacctgatctccctgctctacgcgccatgggtctgcatctttgggcagccggaccagggacacacccggccggtatctcagatctgcttgctgaagtctcggccgaagtggacggcccggtgccaggttacctgagcagccctcagagcatcaccgatacatgtctctacattttcacaagtggaactacaggattgcctaaggccgctcggatcagccatctgaaaatcctgcagtgccaggggttttatcagctgtgcggagtgcatcaggaagatgtgatttacttggcactccctttatatcatatgtcggggagtctgttggggatcgtggggtgcatgggcatcggagctacggtagtgttaaaatcaaagtttagcgctgggcagttttgggaggactgtcagcaacatagggtcactgtgttccagtacataggcgaactgtgtcgctatctggttaatcagccaccaagcaaggctgagcggggccacaaagtaagactggctgtgggcagcggtctgcgcccagacacatgggagagattcgttagaaggtttgggcccctccaggttctcgagacctatggccttacagagggcaatgtcgccaccattaattacacaggccaacggggcgcagtaggacgggcttcctggctgtacaaacacatatttccattctctctcatccgctatgatgtgaccacaggtgaaccaattagggacccacaaggacattgtatggcgacttcacctggagagcccggactactggtagccccagtctctcagcagtcaccgttcctgggatacgctggaggcccagagctggcacagggaaagttattgaaggacgtgtttagacctggtgacgtgttttttaatactggagacctgcttgtgtgtgacgatcagggatttcttcgcttccacgatagaacgggggatactttccgttggaaaggggagaatgttgccacaacagaagtcgcagaggttttcgaggccctggatttcctccaggaagttaatgtttacggagtgaccgtgcccgggcatgagggtcgtgccgggatggcagcactcgtacttcgcccccctcatgcgcttgatctcatgcagttgtatacccatgtgagcgagaacctgcccccatatgcccgcccccgcttcctgcgcctgcaggaaagtctagctacaaccgagacattcaaacagcagaaggtacgtatggccaatgagggctttgacccatctaccttgtctgaccccctgtacgtgctggaccaggccgtgggagcatacttacctttaactacagctcggtactcagcccttctggccggaaatctccgtatttag

SEQ ID NO: 205972 - DNA, 2193 bp, synthetic construct
  misc_feature 1..2193: note = Description of Artificial Sequence: Synthetic coding sequence
  source 1..2193: mol_type = other DNA
atgggcgtgtgccagcggacccgggccccctggaaggagaagagccagttggagagagccgcactggggttccggaaggggggaagcggcatgttcgcttccgggtggaaccaaacagtgcccatcgaggaggccggaagcatggccgcactgctcctgctgccattgctgctgctcctgcctttacttctgttgaaactgcacctgtggccacagctgcgttggctgccggccgaccttgcatttgcagtgcgagccttatgctgcaagcgggctctgcgcgctcgggccctcgccgctgccgctgccgatccagagggccccgaaggaggctgtagcctggcctggagactggctgaacttgctcaacaaagagctgcccacactttcctgattcacgggagcaggcgcttttcctattccgaagccgaacgggaaagtaatagggcagcacgcgctttccttagagcactggggtgggactggggccccgatggtggagattcaggagaaggctcggcgggcgagggggaaagagcagcccccggtgccggcgacgctgccgctggaagtggggccgaattcgcagggggcgatggggccgcccggggtgggggtgctgctgcccccttgtcgccaggtgcaaccgtggccttactgttgccggctggccccgagttcctgtggctgtggtttggcctggccaaggccggtctaaggaccgcctttgtacctactgctctacggcgcggtccgctgttgcactgtctgcggtcatgcggcgctcgggctctggttcttgccccagaatttctggaaagccttgagcctgacttgcctgcactgagagcaatgggcctgcatttgtgggccgccggtccaggtactcaccccgcgggcataagcgacttgctggcagaggtaagcgcagaggttgacggaccagtgcctggctatctgagttcaccacagagtatcaccgacacttgtctgtacatcttcacatcagggacaaccggcctacccaaagccgcaaggatttcccacttgaaaatactccagtgtcagggtttctaccagctctgtggcgtgcaccaggaagatgtgatttatctcgccctgccactatatcacatgagcggcagcctgctcggtattgtgggatgtatgggaatcggtgcgacagtggtccttaaatccaagttttccgccggacagttctgggaggattgtcagcaacatagggtgaccgtgtttcagtacattggcgaactgtgtcgttacctcgtgaaccagcccccgtccaaagcggagcggggccacaaggtgcggcttgcggtcggcagcggccttcgtccggacacctgggaacgctttgtaagaaggttcggaccactgcaagtgctcgaaacctacggcttaacagagggaaacgtggcaacgatcaattacaccggccagagaggcgctgtgggtcgcgcaagctggctttataaacatatttttccattcagtctcattcgctacgatgtgactaccggggagcccattcgcgatccacaggggcattgcatggccacatcccccggagagcctggactccttgtcgccccagtgtctcagcagtcgccgttcctgggatatgccggtgggcccgagctcgcgcagggaaagctgctgaaagatgtttttaggcccggagatgtgttcttcaataccggggatcttctggtgtgcgatgaccagggctttcttagattccatgatagaaccggggatactttcaggtggaagggtgagaacgttgcgacgaccgaggtcgcggaagtgtttgaggccctggatttcctccaggaggtgaatgtctacggcgtcacagtgccagggcacgagggccgagcaggcatggccgccctcgttcttcgcccacctcacgcactcgacctgatgcaattgtacacacatgtaagtgagaacctgccgccttacgcgcgtccaaggtttttgagactgcaggagtccctggctaccaccgaaacatttaagcaacagaaggttagaatggctaacgagggattcgatccctccacactgtccgaccccctctacgttctagatcaagccgtgggagcctatttacctttgacgaccgcacgttacagcgcgctgctggctggcaacctgcgcatatag

SEQ ID NO: 205973 - DNA, 1932 bp, synthetic construct
  misc_feature 1..1932: note = Description of Artificial Sequence: Synthetic coding sequence
  source 1..1932: mol_type = other DNA
atgctgctgggcgccagcctggtgggcgtgctgctgttcagcaagctggtgctgaagctgccctggacacaagtgggcttcagcttgctgtttctttacctgggttccggaggatggaggtttatccgggtttttattaagactattaggagggacattttcggggggttggtcctgctcaaagtgaaggccaaagtaagacagtgtctccaggagcgaaggacggtgccgatcctctttgccagtaccgtccgcaggcaccctgacaaaacagcactgatttttgaaggaaccgacactcactggaccttccgccagctggacgaatacagttcctcagttgccaactttttgcaggctagaggcctggctagcggtgatgtagccgctatattcatggagaacaggaacgagttcgtcggcttgtggctgggaatggcaaagttgggggtcgaggcagccctgatcaacacaaatctgcggagagatgccctgctgcattgcctgactacctctagagcaagagccctggtttttggaagcgagatggcatcagctatctgcgaggtccacgcctctcttgatccaagtctgtcactcttttgctctggatcatgggaacctggcgcggtgccgccatctaccgagcacctggatccactgcttaaagacgcccccaaacacctcccctcatgccctgacaaggggttcactgacaagctcttctatatctacaccagcgggaccaccggcctcccaaaagctgcaatcgtggtgcattcccgctattacaggatggcggccttggtttattatggatttaggatgaggccaaacgatatcgtttacgactgcctgccgctgtaccatagtgccggaaacatagtggggatcggccagtgcttgctccacggaatgacggtcgttatccggaagaaattctccgccagcaggttctgggacgactgcattaagtataactgcactatagtgcagtatattggggaactgtgtcggtacctgctcaatcaaccgccacgggaggcagagaaccaacatcaggtgagaatggctctggggaacggactgcgacagagcatctggactaattttagtagtcgtttccacatcccacaagtcgctgagttttatggtgcgacagaatgtaattgttctctgggaaactttgatagccaggttggggcctgcggatttaacagtaggatactgtcatttgtttatcctattagacttgtgcgggtgaacgaggatacaatggagctgattcgcggcccagacggagtatgtatcccatgccagcccggtgaaccaggccaactggtgggacggatcatacagaaggatccactcaggcgcttcgatggatacctgaaccagggtgccaataacaagaaaatcgccaaagacgtgttcaagaagggagaccaggcctacctgaccggagacgtgctggtgatggacgagctaggatacctgtacttccgggacagaactggagatacatttagatggaaaggggagaatgtctctaccacagaagtggaggggaccttgtcccgactgctagacatggcagatgtcgcagtctacggagtggaagttccgggcacggaaggacgcgccgggatggccgcagttgcttcccctacagggaactgcgatctcgaaagatttgcccaggtgcttgaaaaggagctccctttatatgcgaggcctatttttttgagactgctgcccgagctgcataaaacgggcacttataaattccagaaaaccgaactcagaaaagagggcttcgaccccgcaatcgtgaaagatcccttattttacctcgacgcacagaaaggacgttacgtgcccctggatcaggaggcctactctcggatacaggcaggagaggagaagctctag

SEQ ID NO: 205974 - DNA, 714 bp, synthetic construct
  misc_feature 1..714: note = Description of Artificial Sequence: Synthetic coding sequence
  source 1..714: mol_type = other DNA
atgcccctgaccctgagcaccctgctgcagcccggccggatctggacagggcgacgggcagccgagcccaccccagggcataatgccgcatggtccctctctggtgggggggcagctgtactgcaggctggagccgaaaccgctctggaccccggtggaattctgccggtggtgcctcttctcggcatatggaggctggccttacacccaggcctacatcaggatcaccaggcatatctcacaggggacgttctggtgatggatgaattggggtacctgtacttccgggatcgaacaggcgataccttcaggtggaaaggcgagaacgtgtcaaccactgaggtcgagggaaccctaagccgtctcttggatatggcggatgtggccgtttacggggtcgaggtgcctggtacagagggccgtgctggaatggccgcagtggcgtcccctaccggtaattgcgatctggagcggttcgcccaggtcttggagaaagaattacctttgtacgctagacctatttttctccgcctgctacccgagctacacaagactgggacctataaattccaaaaaaccgaactccgaaaagagggatttgatcctgccatcgtgaaagacccacttttctatctggatgcacagaagggacgatatgtgccactggaccaggaggcctatagcagaatccaagccggggaagaaaagttgtag

SEQ ID NO: 205975 - DNA, 2073 bp, synthetic construct
  misc_feature 1..2073: note = Description of Artificial Sequence: Synthetic coding sequence
  source 1..2073: mol_type = other DNA
atgggcgtgcggcagcagctggccctgctgctgctgctgctgctgcttctgtgggggctcggtcagccagtctggcccgtcgctgtcgctctcactctgaggtggctgctgggggaccccacctgttgcgtcctgctggggctcgcaatgctcgcaaggccctggctagggccttgggtaccccacggcctgtccctagccgccgctgccctggctctcaccctgctgcccgcccggctacctccgggcctgcggtggcttcccgcagacgtgattttccttgccaagatcctacatttgggactcaaaattagaggatgtttgtcaagacagccgccggacacgtttgttgatgccttcgagaggcgcgcccgcgcacagcccggaagagccctgctggtatggaccggtccaggggccggcagtgttacattcggagaactcgacgctagggcatgtcaggcggcatgggctctgaaggctgagctgggcgatccagcgtccctgtgtgccggagagcccaccgccttactggttctggcatctcaggctgtccccgctttatgtatgtggctcggcttggccaaattgggatgtcctaccgcttggatcaatccacacggtcggggcatgccccttgcgcactctgtcctgtctagcggcgcacgagtcttagttgtcgatcccgacctgcgggaaagcctggaggagattcttcctaaactgcaagccgaaaatattaggtgtttctacctgagccacactagccccacaccaggcgtgggcgcgctcggtgccgccctggatgctgcaccatcccatcccgttcctgccgatctaagggcaggtattacatggcggtcaccagcactcttcatctatacctccgggacaactggcctgccgaagcccgctatcctcactcatgagcgtgtactgcagatgtccaagatgttaagtctgagcggcgcaacggcagacgatgtggtctatacggtcttgcccctttaccatgtgatggggctcgtggtgggcatcctcgggtgcctggatctcggcgctacctgcgtgctcgctcctaagtttagtacctcttgcttctgggatgactgcaggcaacacggtgtgactgtgatcctttatgtcggggaactgctgaggtacctctgcaatatacctcaacagccggaagatcgcacccataccgtgcggttagcaatgggtaatgggcttcgggccgatgtttgggagacatttcaacagagatttgggccaattaggatctgggaggtgtacgggagtaccgagggaaatatgggactcgtgaactatgttgggagatgcggggcccttggcaaaatgagctgcctgcttcggatgctcagcccattcgagctggttcagttcgacatggaggccgctgagcctgttagggacaatcagggcttttgtattcctgtagggctgggtgaacctggcctcctgctcactaaagtagtctcccaacagcccttcgtgggctacagagggccccgagaactcagcgaaagaaagctggtcagaaacgtgagacagagcggcgatgtgtattacaacaccggcgacgtcctcgctatggatagagaaggctttctctatttcagagacaggctgggcgataccttccgctggaaaggcgagaacgtgtccacacatgaggtggaaggcgtgttatctcaggtggacttcctgcagcaggtgaatgtctatggcgtttgcgtccccggatgcgaaggaaaagtgggcatggcagccgtacagctcgcccccgggcagacattcgacggtgaaaagctctatcagcacgtgagagcttggctacccgcttatgcgaccccacatttcatccggatacaggacgccatggaagtcacatcgacattcaagctgatgaagactaggctcgtgagagaggggtttaatgtgggaattgttgtcgaccctttgttcgttctggataatcgagcccagagctttcgtcctctcactgcagagatgtaccaggctgtgtgcgagggcacctggcgactgtag

SEQ ID NO: 205976 - DNA, 1950 bp, synthetic construct
  misc_feature 1..1950: note = Description of Artificial Sequence: Synthetic coding sequence
  source 1..1950: mol_type = other DNA
atggagaacgaccccagccggcggcgggagagcatcagcctgacccccgttgccaaagggctggagaatatgggggccgactttctcgagagtttagaagagggacagttacctaggtccgacttatccccagcagaaataaggtcttcctggtcagaggccgcccccaagccctttagcagatggcggaacctccagccggcactccgagcccggagcttttgtagagagcatatgcagttgttccgctggatagggacgggcctgctgtgcaccggtctgtctgcctttctcctggtcgcctgcctccttgatttccagagggccctggcactgtttgttctgacttgcgtggtgctcacgtttctgggccatagactgctgaagcggctgctcggcccaaaattaaggcgttttctgaaacctcagggccaccctagactgctgctgtggtttaagaggggattggccctcgctgcatttctgggcctggttttatggctgtctcttgatacttcacagagaccagaacagttggtcagtttcgccgggatctgtgtgtttgtcgcgctgctgtttgcctgttctaagcatcactgcgccgtctcttggcgtgccgtgtcttggggtctgggtctgcaatttgttttggggctgttggtcatccgaacagaaccaggctttatagcttttgaatggttaggcgagcagataagaatctttctctcttacacaaaggccggtagctcttttgtatttggagaggccttggtgaaagacgtgttcgccttccaggtgcttcctataattgtattcttttcatgcgtgataagcgtgttatatcatgtgggccttatgcagtgggtgatcctgaagatagcttggcttatgcaggtgacgatgggcacaactgcaaccgagactctgtcagtggcggggaatatatttgtgtcacagactgaagcccctttacttatcagaccttacctggctgacatgaccttatcggaggtgcatgtggtcatgacaggggggtacgccacaatcgcggggtctttgctgggggcttatatctctttcggcatcgacgccacctcgctgatagctgctagtgtgatggccgcaccatgcgccctggccctgtccaaactggtgtatcccgaggtggaagagagcaaatttagacgtgaagaaggggtgaagctgacatacggggacgcccaaaatctcatagaagccgcctcaacaggtgccgcgatatctgtgaaagtcgtggcaaacatagctgccaacttaatcgccttcctggccgtgctggacttcatcaacgcggctcttagttggctaggagacatggtcgacatacagggcttatcctttcaattaatctgttcttacatcctgcgcccagttgctttcctcatgggagttgcctgggaggattgcccagtcgtggctgagctgctcggaatcaagctctttctgaatgaatttgtcgcctatcaggacctgagtaagtacaaacagaggcgcctggctggcgctgaagaatgggtgggtgaccggaaacagtggatctctgtcagagcggaagttctgaccacgttcgccttgtgcggcttcgccaattttagtagcattggcattatgttggggggtttgacctcaatggtgccccaacgaaagtcagattttagtcagatcgtgctgcgcgctctttttactggagcatgtgtgtcactcgtaaacgcgtgtatggctggaatcctctatatgccgaggggggcagaagtggactgtatgtctcttttgaacactacgctgtccagttcctcgttcgaaatctaccagtgctgtagagaggcttttcagagtgtcaacccggaattctcacctgaagctctggacaattgttgcaggttttacaatcatacaatttgtgctcagtag

SEQ ID NO: 205977 - DNA, 528 bp, synthetic construct
  misc_feature 1..528: note = Description of Artificial Sequence: Synthetic coding sequence
  source 1..528: mol_type = other DNA
atggagaacgaccccagccggcggcgggagagcatcagcctgacccccgtggcgaaaggtttggaaaatatgggcgcagacttcctggagtccctagaggagggccagctgcctcgtagcgacctgagcccagctgaaattagatcctcttggtcagaggctgcacccaagccattttcccgctggagaaacctacagcccgccctgagagcacgcagcttctgccgtgagcatatgcagctgttccgatggattggcactggccttctatgcacgggactgtcggcattcttgcttgtggcctgtttgctggacttccagcgcgcgctcgccctgtttgtactgacctgtgtggtgctgactttcctcggccatcgactgttaaagcggctgctaggtcctaagctgagacgattcctcaagccacaagggcacccccggctgttgctgtggttcaagagagacccacggccatggagcaaggaaggacctaatcagtacttgccccagatcacctggaccgtttag

SEQ ID NO: 205978 - DNA, 1950 bp, synthetic construct
  misc_feature 1..1950: note = Description of Artificial Sequence: Synthetic coding sequence
  source 1..1950: mol_type = other DNA
atggagaacgaccccagccggcggcgggagagcatcagcctgacccctgtagctaagggacttgagaatatgggcgccgattttctggaatctcttgaggaaggacaactcccccgctcggacctgtccccagcagagattcgtagctcttggtccgaggccgctccgaaacctttcagtaggtggcggaatttgcagccggccttaagagccagatcattttgccgtgaacacatgcagctgtttcgatggatcggcacgggcttgctttgcacaggcttatccgctttccttctagtcgcttgtcttctggacttccagcgcgcacttgcgctgttcgtgctcacatgcgtcgtcctgacattcctcgggcatcgcctgttgaaaagacttctcggccccaagttgcgacgctttctgaaaccacaaggccatccccggttgctgctgtggttcaagcgcgggctggcactggccgccttcctgggtttagtgttgtggcttagcctggacacttcccagcgacccgagcaactcgtgagctttgccgggatctgtgtcttcgttgctcttttatttgcttgctccaagcaccactgcgctgtgagctggcgtgccgtgagctggggcttgggtctccagttcgttttggggctgctggtgattcggaccgaaccggggtttatcgcttttgagtggcttggagaacagatacgaatatttctcagttataccaaggccggttcaagctttgttttcggcgaagcccttgtgaaagacgtgtttgcattccaggtgctccccattatagtatttttctcatgtgtgatctccgtcctttaccacgttgggctgatgcagtgggtgattcttaaaattgcctggctgatgcaggtgaccatgggaaccaccgcaaccgaaacgcttagtgtggccggcaacatcttcgtgagccaaacggaggccccacttttgattagaccttacctcgcggacatgacccttagtgaagtgcatgtggtgatgacaggcggctacgcaaccattgcaggaagtttacttggcgcatatataagtttcgggatcgacgccacatcgctaatagccgctagcgtgatggcggccccatgtgccctggccctctctaagctagtctatcctgaggtggaggagtcaaaatttcgccgcgaagagggcgtcaagctgacttacggcgatgcacagaatctgattgaagctgcatccacaggagctgcaatcagcgtcaaggtggtggcaaacatcgccgcgaatctgatcgcgtttcttgctgtgctggacttcatcaatgcagccctttcctggctgggtgatatggtagatatccagggactttcattccagttgatatgtagctatatcctcagaccggtcgctttcctaatgggagttgcctgggaggactgtccagtcgtagccgagcttctaggaattaaactgtttctgaacgaatttgttgcttaccaggacttaagcaaatacaaacaacggcggctcgctggcgccgaagaatgggtgggagatcggaaacaatggatatccgtcagggcagaagtccttacaaccttcgctctctgtggattcgcaaatttttctagcataggcatcatgcttgggggacttaccagcatggttccccagcgtaagagtgatttctctcaaatcgtgcttcgggcgctgtttacaggggcctgtgtcagcctggtaaatgcatgtatggccggaatcttgtatatgcccaggggggccgaagtggattgtatgtcattactcaacactactttgtcttcgtcctcctttgagatataccagtgctgtcgcgaggcatttcagtcagtgaatcctgagtttagtcctgaggcccttgataactgctgtagattttacaaccacacgatctgtgctcagtag

SEQ ID NO: 205979 - DNA, 1632 bp, synthetic construct
  misc_feature 1..1632: note = Description of Artificial Sequence: Synthetic coding sequence
  source 1..1632: mol_type = other DNA
atggagaacgaccccagccggcggcgggagagcatcagcctgaccccagtggctaagggactggaaaacatgggggcagactttctggagtcacttgaagaggggcagctgcccagatcagatctgtctcccgctgagatccgttcctcatggtcagaagcggccccaaagcccttctcccgctggcggaacctgcagccggctctgcgcgccagatcattctgccgggagcacatgcagttgttccgttggatcgggacaggactgttgtgcacagggctatcggcgtttctgcttgtggcctgtttgctggattttcagagggccctcgccttgtttgttcttacatgcgttgtgttaactttcctgggccaccgcttgcttaagcggctgttgggcccaaaactgcggcggttcttaaagccccagggacaccctagactacttttatggtttaaaagaggactggcacttgctgccttcctgggactggtgttgtggctatcgctcgacacctcacaaagacccgagcagctggtgtcatttgcaggaatatgcgtgtttgttgctctgctgttcgcttgttcaaaacaccactgtgctgtgagctggagggctgtctcgtggggcctaggattacagtttgtgctcgggttgttggttattagaactgagccaggcttcatcgccttcgaatggcttggggagcagatccgcatcttcctgtcctacaccaaagcaggatcctcatttgtgtttggggaggccttggtgaaagacgtgttcgcttttcaggtcctgccaataattgtgttcttcagctgtgtaatttctgtgctttatcacgtggggctgatgcagtgggtgattctgaagatcgcttggctgatgcaggtgacaatggggactaccgcaaccgagaccctgtctgttgccgggaacatctttgtctcacagaccgaggctcccctgttaattcgcccttatttggccgacatgacactgtctgaggtgcatgtcgttatgacaggcggatatgccactatcgccggatcactgctcggagcatatataagttttggcattgacgccaccagcctcatcgcagccagcgttatggcagctccctgtgcactggcgctcagcaagcttgtttaccctgaagtggaggagagtaaatttagacgagaagagggggtaaaattgacctacggcgatgcacagaacctcatcgaagctgctagcactggcgccgcaatttcagtcaaagtggtcgcaaatatcgccgccaatttgatcgcattcctggctgtgctggacttcattaatgctgccctaagctggttgggtgatatggtggacattcagggcctgtccttccagctgatctgctcatatatcctgcgccccgttgccttcctaatgggtgtagcctgggaagactgccctgtggtggcagagctactgggaattaaattgttcctcaatgagtttgttgcctaccaagatctttctaagtacaagcagcgaaggttagctggcgccgaagaatgggttggggatagaaagcagtggatctcgcgccgagggctagccatgctgactaggctggttcttaatagttggccgtag

SEQ ID NO: 205980 - DNA, 1911 bp, synthetic construct
  misc_feature 1..1911: note = Description of Artificial Sequence: Synthetic coding sequence
  source 1..1911: mol_type = other DNA
atggagaacgaccccagccggcggcgggagagcatcagcctgacccccgttgctaaagggctagagaacatgggcgccgatttcctcgagtctctcgaagaggggcaacttcccaggagcgaccttagtcccgccgagattcggtccagctggagcgaggctgcacccaagccgtttagccgatggagaaatctgcagcccgccttgcgggctcggagcttctgtcgtgagcacatgcagctttttcgttggatcggcactggactcctgtgcacgggactgtccgcctttctcttggtggcctgtctgctagatttccagcgagcactcgccctgtttgtactgacctgtgtggtgctcaccttcttgggacaccgcctgctcaaacggcttctcggacccaaactccggcgattcctcaagccccagggccatccccgattgcttctgtggtttaagcggggcctggccttggcggcctttttggggctggtcctgtggctcagtctggacacatctcagcggccagagcaactcgtgtcgtttgccggaatttgcgtatttgttgcccttctctttgcctgctccaagcatcactgtgccgtctcttggcgcgccgtctcatggggcttgggcctgcagttcgtgttgggacttctcgttattagaacagagcccggcttcatagcctttgaatggttaggtgaacagatccgaatctttctgtcttatactaaggctggatctagctttgtatttggggaggccctggttaaggacgtcttcgccttccaggtgctccccattatcgtattctttagttgtgtgataagtgtgctctatcacgtgggactgatgcaatgggtgattctgaaaattgcctggcttatgcaggttaccatgggaaccaccgctactgagaccctgagcgttgctggcaatattttcgtgagtcagaccgaggcacccctacttatccgtccgtacctggctgacatgaccctgtctgaagttcatgtggtgatgacggggggctacgcaacgattgccggaagcttactgggagcttatatctccttcggcatcgatgcaacttcgctaatcgctgcaagcgtgatggccgctccatgcgccctcgcactgagtaaactggtgtatccggaagtggaggaaagcaaattccgcagagaagaaggggttaaactgacatacggagacgcgcagaatttgatcgaagctgccagtaccggtgcagctattagtgttaaagtcgtggctaacatagctgcaaatcttattgccttcttagcggtgttggatttcatcaatgcggccctgtcatggctgggggatatggtggacatccagggactcagtttccagctaatttgttcctacatcctgagacccgtggctttcttgatgggcgtggcctgggaggattgccctgtcgtggccgagcttctgggaatcaagttgttccttaatgagttcgttgcgtaccaggatctgagtaagtacaagcagcggcgtctggccggcgcggaggaatgggtcggggatcggaaacagtggatttcggttagggctgaggtgttgaccacattcgctctgtgcggctttgcaaacttcagttccataggaattatgttggggggactgactagcatggtgcctcagaggaagtcagactttagccaaatcgtgctacgagccctctttaccggagcttgcgtgtccctcgtcaacgcgtgtatggcagggatcctgtatatgccccgcggagctgaggtggattgcatgtccttactgaatacgaccctgagctcgagttccttcgagatctaccagtgctgtcgtgaagccttccagcgcatcttcaagagtacacctgccgagagtcaaccgtag

SEQ ID NO: 205981 - DNA, 864 bp, synthetic construct
  misc_feature 1..864: note = Description of Artificial Sequence: Synthetic coding sequence
  source 1..864: mol_type = other DNA
atgcagctgttccggtggatcggcaccggcctgctgtgcaccggcctatcggccttcctgttagtggcctgcctattagacttccaaagggctttggctctcttcgtgttaacttgtgtcgtcctgacatttctgggccacagactccttaagagattacttggccccaagttgagacggttcctcaaacctcaggggcatcctaggttactcctctggttcaagagaggcctcgccctggccgcatttttgggcctcgtgctttggctctccctggacacaagccaaagaccagaacagctcgtgtcctttgccgggatttgtgtgttcgttgcactgttgtttgcttgctcgaaacaccattgtgccgtgtcttggcgtgccgtgagctgggggttggggctgcagtttgtgttgggcctgctggtgatcagaactgagccgggtttcatagcatttgagtggttgggtgaacagattcgtatattcctaagctataccaaagctggatccagcttcgtgttcggcgaggctctcgtgaaagacgtctttgcattccaggtgctccccattatcgtctttttttcctgtgttatctccgtgctgtaccatgttggcctcatgcagtgggtcatactgaagattgcctggctgatgcaagtaacaatggggaccactgccacggaaacactgtccgtagctggcaacatattcgtgtcccagacagaggcccccctgttaattagaccctacctcgccgacatgaccctgagcgaagtccatgtggtaatgaccggtggttatgcaaccattgctgggagtttactaggtgcctacatctcttttggactggaaaaactatag

SEQ ID NO: 205982 - DNA, 1452 bp, synthetic construct
  misc_feature 1..1452: note = Description of Artificial Sequence: Synthetic coding sequence
  source 1..1452: mol_type = other DNA
atggagaacgaccccagccggcggcgggagagcatcagcctgacccccgtcgcgaaaggtctcgagaacatgggggctgacttcctggaaagcttagaggaggggcagcttccacgaagcgatttatcaccagcagagataaggtcctcctggagcgaagcagcccccaagcctttctccaggtggcgcaatctacaacccgccctcagagccagatcattctgcagggagcacatgcagctttttcgttggattggcaccggattactgtgtactggactatccgcgtttcttctagtggcatgtctcctcgacttccagagagctctggcactcttcgtgctgacgtgcgtcgtgcttaccttcttaggtcatcggttactgaagagactgctcggtccaaagcttagacgcttcctgaaaccccaaggacacccgaggcttcttttgtggtttaagagagggcttgccctggcagcgttcctaggactcgtgctctggctatctctggatacttctcagcggcccgagcagctcgtgtcgttcgctggtatctgcgtttttgtcgctctcctttttgcgtgtagcaaacaccactgtgccgtgagctggcgggcggtttcctgggggctggggcttcagttcgtcctcggcttgcttgtaattaggacagagccgggatttattgccttcgagtggctgggggaacagataagaatttttctgtcatacacaaaagcgggcagttcatttgtgtttggagaagccctagtcaaagacgtgttcgcatttcaagtgcttccaatcattgttttttttagctgcgtgatcagcgttctgtaccatgttggtctgatgcaatgggtaatactgaagatagcctggctcatgcaggtgactatgggaaccacggctactgagactctctccgtcgccgggaatatctttgtctcccagaccgaggccccactactcattaggccctacctggccgatatgaccctttccgaagtgcacgtcgttatgactggcggatacgcaactattgccggcagcctccttggagcctacatcagtttcggggtacgggctgaggtcctcacaacctttgctctgtgcggcttcgcgaatttttcatccataggaattatgctaggaggattgacatccatggttccccagcgcaaatccgatttttctcagattgtcttaagagccctttttaccggtgcctgtgtaagcctggtgaatgcctgtatggcaggtatcctgtacatgccgcgcggcgcggaggtcgattgcatgagtctcttgaatactacacttagctctagttcttttgaaatttaccaatgctgtcgagaggctttccaaagtgtgaaccctgagtttagccctgaagctcttgataactgttgcagattttataaccatacgatctgcgctcagtag

SEQ ID NO: 205983 - DNA, 1977 bp, synthetic construct
  misc_feature 1..1977: note = Description of Artificial Sequence: Synthetic coding sequence
  source 1..1977: mol_type = other DNA
atggagaaggccagcggccggcagagcatcgccctgagcaccgtggagacagggacagtcaaccctggcctggaactgatggagaaagaagtagagcccgaggggtccaaacggactgatgcacaagggcatagccttggcgacggactcggtcctagcacatatcagcggaggtcccgatggcctttttccaaagcgcgaagcttctgcaagacccacgccagcctttttaaaaagatcctgctcggcctgctgtgcctggcatacgccgcctatctgctcgctgcatgcatactgaatttccagcgggccctggcattgtttgttataacttgcttggttatattcgtgctggttcacagcttcctgaaaaagcttctcggaaagaagctcactagatgtttgaaaccctttgagaattcaagattacgcctatggactaagtgggtcttcgccggggtgtctttggtgggcctcatcttatggttggccctggatactgcccaaaggcctgagcagcttatacctttcgccgggatctgtatgttcattctgatcctgttcgcctgcagcaagcaccactcggcagtcagctggagaaccgttttttcaggactgggtctccaatttgtcttcggcattctagtcatccgaactgatctcggctacacagtgttccaatggctcggagagcaggtccagatttttctgaactacaccgtggccggctctagtttcgtgttcggtgataccctggtcaaggacgttttcgcgttccaggcactgcctatcatcatcttttttggctgcgttgtgtccattctctactacttaggattagtgcagtgggtggttcagaaagttgcatggttcctacaaatcacgatgggcacgactgctacagagactctcgccgttgccggcaatattttcgtcgggatgactgaggctccactgctcatcagaccatatttgggggacatgacactatcagagatccacgccgtcatgacggggggttttgcaaccatcagcggaacggtgctcggtgcctttatagcattcggcgtcgacgcaagttccctaattagcgcaagtgtcatggctgctccatgcgcactcgcaagtagcaaactggcctatcccgaagtggaggagtctaaatttaagtcagaggaaggagtgaaactccctcgaggaaaagaaagaaatgtgctggaagccgccagcaacggagcagtggacgcgatcggtctggcaaccaatgtggctgccaatctcatcgcattcctcgctgtgctggcctttataaacgctgccctatcctggctcggggaactcgtcgacattcagggtctcacgtttcaggtgatctgcagttacctcttgaggcccatggtcttcatgatgggtgtcgagtggaccgactgtccgatggttgccgagatggtggggatcaagttttttattaacgagtttgtggcatatcagcaactatctcagtacaagaataaaagactctccggtatggaggagtggatcgaaggagaaaagcagtggattagcgtgagggccgaaattataacgacctttagcttatgtggattcgccaatttgagtagcataggaatcacattgggcggtctcacctccatcgtaccacacagaaagtcggacctctcgaaggtagtggtgagggcactgtttacaggagcttgcgtgtccctgatttccgcctgtatggccggtatcctgtatgtccccagaggcgcagaagcggattgcgtatcattcccaaatacctctttcacgaaccggacgtatgagacatacatgtgttgccgaggtctttttcagagtacgtctctcaatgggaccaatccccccagcttctctgggccatgggaggacaaggagttttccgctatggctttaaccaattgttgtggcttctacaataatacagtctgtgcttag

SEQ ID NO: 205984 - DNA, 2076 bp, synthetic construct
  misc_feature 1..2076: note = Description of Artificial Sequence: Synthetic coding sequence
  source 1..2076: mol_type = other DNA
atggagctgcggagcaccgccgccccccgggccgagggctacagcaatgtggggtttcagaacgaggaaaactttctggagaacgaaaatacttctgggaataattccatccgctccagagcagtccagagtagggagcataccaacactaaacaggacgaggagcaggtgactgtagagcaggactcaccacggaaccgggagcacatggaagatgatgacgaggaaatgcaacagaagggctgtctggaaagacggtacgacacagtctgtggattctgtcggaaacataagaccacactgcgtcacataatttggggtatactcctcgccgggtacctggtgatggtgattagtgcttgcgtacttaattttcaccgcgccttgcccctctttgtcataacagtggcggcaattttcttcgttgtgtgggatcatctaatggccaagtatgaacatagaatcgacgagatgctgtctccgggtcgccgactgctcaatagccactggttttggctaaagtgggtgatttggtcctctctcgttctggctgttatcttctggctggcgttcgataccgccaagttgggacagcagcagctggtcagctttgggggcttgatcatgtatattgtcctactgttcttgtttagtaaatatccgacgcgtgtttactggaggccagtcctctgggggataggcctgcagttcctcctggggctcttgattttgcgcacagaccctgggttcatcgcctttgactggctgggaaggcaggtgcaaaccttccttgagtatactgacgctggggcgagtttcgtgttcggtgaaaagtataaggatcattttttcgccttcaaagttctgccaattgtagtgttcttcagcacagtgatgtctatgctctactacttgggacttatgcaatggatcattaggaaggtggggtggattatgttggttactactggaagtagtcctattgagtccgtggtggcctctggaaatatatttgtcggccagacagaaagcccccttctggtccggccatacctgccctacatcaccaagtccgaactgcatgcaatcatgacagccgggttttccactatcgccggctcagttttgggggcttacatctctttcggggtaccttcgtcccatctgcttactgcgagcgtgatgagcgctcctgccagccttgctgctgctaaattgttctggcctgagactgaaaaacccaagatcaccttaaagaacgctatgaagatggaaagcggggatagcggtaacttacttgaggccgcgacacagggtgccagcagcagcatttcactcgtcgcgaatattgccgtgaacctgatcgctttcctggctctcctgtctttcatgaacagcgccttgagttggttcgggaacatgtttgactatccacagctcagctttgagttgatttgcagctacattttcatgcctttctcttttatgatgggcgtggagtggcaagatagttttatggtggcccgactcattggatataagacattcttcaacgagttcgtggcatatgagcaccttagcaagtggatccacctgagaaaggaaggtgggcccaaatttgtgaatggggtccagcagtacatttcgatcaggtccgaaatcattgccacttacgcattgtgcgggttcgctaatattgggtccctcgggatcgtgatcggcggcctcacctctatggctccttctcggaagcgagatattgcttctggcgcggtccgcgctctgatcgccggcactgtcgcctgtttcatgaccgcatgcatagcagggatcctcagcagtaccccggtcgacatcaattgtcaccacgtcttggaaaatgctttcaactcaaccttcccaggcaataccacaaaagttatcgcctgctgccagtccttgctttcttccacagtggccaaaggtcctggggaagttatccctgggggcaaccacagcctttactctctgaagggttgttgtactctgctaaatccgtcaacctttaactgcaatggcataagcaataccttttag

SEQ ID NO: 205985 - DNA, 1869 bp, synthetic construct
  misc_feature 1..1869: note = Description of Artificial Sequence: Synthetic coding sequence
  source 1..1869: mol_type = other DNA
atggaggacgacgacgaggagatgcagcagaagggctgcctggagagaagatatgacacagtctgtggcttttgcaggaaacacaaaactactctgaggcacatcatatgggggatactactagccggatacctcgtgatggtgattagcgcttgtgtgctgaatttccaccgggctctgccgctcttcgtgattacggtcgctgccattttcttcgtcgtgtgggaccatctgatggccaagtatgagcaccgcatcgatgaaatgctcagccctgggagacgcctgttaaacagccactggttctggctaaagtgggtgatttggagcagcttagtgctagcagtcatcttttggctagcctttgatactgcgaaactaggacagcaacagcttgtgtcattcggcggtttgattatgtatatcgtgctgttatttctgttctcaaaatatcccacccgagtgtactggcggcctgttctctggggaatcggccttcagtttctgttggggcttctgatcttgcgtacagatcccgggttcatcgcctttgactggcttggacgccaggtgcagaccttcctcgaatataccgacgcaggcgcgagctttgtctttggcgaaaaatacaaggaccacttttttgcttttaaggttctgcccatcgtggtattcttctctactgttatgtccatgctctactaccttggcctcatgcagtggataatacgtaaggtggggtggatcatgctcgttaccacgggctcgagccccatagaaagcgtggtcgccagcggtaacatcttcgtaggacagactgagtcccctctgttagtcagaccatatctcccctacatcacgaaatccgagctgcatgccataatgaccgctggattctcaaccattgcaggttccgttctgggcgcatacattagctttggggtcccatcttctcacctcctgactgcctctgtcatgtcggcccccgcctccctggctgccgccaagctgttttggccagaaactgaaaagccaaagatcaccttaaagaatgcaatgaaaatggagagcggagatagcggcaatctccttgaggccgctactcagggcgcctcttccagcatttctttggtggctaatatcgccgtgaatctgatagcgtttctggccctgctcagcttcatgaacagcgcactctcgtggttcggtaacatgtttgattatccccagctgtcgtttgagctgatctgcagctacatatttatgcccttctcttttatgatgggcgttgagtggcaggatagttttatggtcgctagactgattggctataaaacgttcttcaatgaattcgtggcctacgaacacctgtctaaatggattcatctgaggaaagagggggggccaaaattcgtcaatggcgtccaacagtacatttcaattagatccgagattattgccacatacgccctgtgcgggttcgccaacatcgggtctctcggaattgtaattggaggtctgacatccatggctccgagccgcaagcgtgacattgcttctggcgccgtgcgggccctcatagcggggactgtggcatgtttcatgacagcttgcatcgcaggaatcctgagctccaccccggttgatatcaactgccaccatgtattagagaatgcatttaattctactttccctggaaataccactaaggtgattgcatgttgtcaaagcctgctgagcagcaccgttgccaagggtcctggggaagtaatccctggcgggaaccatagtctgtatagcttgaagggttgttgtaccctcctgaatccatctacatttaactgtaatggtattagcaacaccttttag

SEQ ID NO: 205986 - DNA, 1608 bp, synthetic construct
  misc_feature 1..1608: note = Description of Artificial Sequence: Synthetic coding sequence
  source 1..1608: mol_type = other DNA
atgcggcgggagcggacccggggcccccaggcctgggagttccccagccccaccaagagcggttgctcactgcagtccttatcgagggatctgagagagctgcgggagggagagaaaccagaagatcaggcagagacggaggagagctggcaaggactcgctagaaagacgccgggaaaggcctgcgctccggagggcggctcctgccagcccgggaaaaccgaaaacaccataactatgacaaccagccaccagcctcaggatcgctacaaggctgtatggctaatcttttttatgctggggttggggactttacttccctggaattttttcatgaccgccacccagtatttcacgaatagattagatatgagccagaacgtgtcccttgtgactgcggagctaagtaaagacgcccaggcgtccgctgcccctgctgcccccctgcctgaacgaaattctctctctgcaatcttcaataacgttatgacattgtgcgctatgcttcctctcctgttattcacctacctgaattctttcctgcatcagagaatcccacagagtgtgaggatactgggaagcctcgtggcgatcctgctggtgtttctgattactgccatcttagttaaggtgcagctggatgccctacccttttttgtgattactatgattaaaatagtgctcattaacagtttcggtgcaatattgcagggttcactgttcggcttggcaggcctcctcccggcttcctacacagcacctatcatgagcggacagggtttggcaggtttctttgccagcgtggctatgatctgcgcaattgcttcgggctcagagctgtccgaaagtgctttcggctacttcattaccgcctgtgcggtgatcatccttactatcatttgttacctgggactgccccggctggaattttaccgctactaccagcagcttaagctggaagggccaggagaacaggagaccaaactggatttaatatcaaagggcgaggagcctcgtgctggaaaagaggaaagtggggtgagtgtgtcaaattctcaacctaccaacgaatcacactccatcaaggccatacttaagaatatctctgtcctggccttcagcgtgtgcttcatcttcacaatcacaattgggatgttccctgccgtgacggtggaagtgaagtcctctatcgcgggtagttccacatgggagaggtacttcatccccgtgtcatgctttcttacatttaacatctttgactggcttggccggagccttaccgccgtattcatgtggcccggtaaagatagtcggtggttacccagcttggttcttgcgaggctcgtattcgttcccctgctgctactgtgtaatatcaaacctcgtagatacctaacagtcgtgttcgagcatgacgcttggtttatatttttcatggctgctttcgcgttcagcaacggctatttggcctccctttgtatgtgtttcggtccgaaaaaggtcaaacctgccgaggctgaaactgctggcgccataatggccttcttcctttgcctgggactggcactcggtgcagtgttctcgttcctgtttagggccattgtatag

SEQ ID NO: 205987 - DNA, 1371 bp, synthetic construct
  misc_feature 1..1371: note = Description of Artificial Sequence: Synthetic coding sequence
  source 1..1371: mol_type = other DNA
atgaccaccagccaccagccccaggaccggtacaaggccgtgtggctcatcttcttcatgctcggtctagggacactcttaccctggaacttctttatgaccgccacacaatactttacaaataggcttgacatgagtcagaacgtgtccctagtgactgctgaactctcgaaagatgcacaggccagcgctgctcccgctgcccctctaccagaacgtaactcattgagcgccattttcaataacgttatgaccctgtgcgctatgcttccgctgctgctgtttacatatcttaatagcttcctccaccaacggattccccaatctgttagaatcctgggctccctagtggccatattacttgtgtttctcattacggctattttagtgaaggtccagctcgacgctttgcctttcttcgttatcactatgattaaaatagtgctgattaattcctttggggccattctgcaagggagtctgttcgggttagcagggttgctccccgcgagctataccgctcccattatgagcggacaagggttggctggttttttcgccagcgtcgccatgatatgcgcaatcgcatcaggctcggaactcagcgagagcgcatttggatattttattaccgcatgtgccgtaataattctcactatcatttgctatttagggctcccccgcctcgaattttaccgttattaccagcagctaaagttggaagggcctggggagcaagagactaagctcgacttgatcagcaagggagaggagcccagggcagggaaagaagagagcggcgtatccgtctcaaacagccagccaacgaacgagtcacattctattaaggccattctgaagaacatctctgtcctggctttctcagtctgtttcatctttacaattacgataggcatgttcccagctgtaaccgtggaggtaaagagttctatcgccgggagctctacctgggagaggtatttcatacctgtgtcttgcttcttaacatttaatatcttcgactggcttgggaggtctttaactgctgtgttcatgtggccaggcaaagacagcagatggctgccatcactcgttctggctcggctggtgttcgtcccccttttactcttgtgtaacatcaagccaagaaggtatctgactgtggtctttgaacacgacgcctggtttatttttttcatggccgcatttgccttctccaacggctatctcgcttcgctatgcatgtgtttcggccccaagaaagtcaagccagcagaagcagagacagctggtgcaattatggcattcttcctctgtttgggactagcactgggtgctgtctttagtttcttgttcagagcaattgtctag

SEQ ID NO: 205988 - DNA, 1371 bp, synthetic construct
  misc_feature 1..1371: note = Description of Artificial Sequence: Synthetic coding sequence
  source 1..1371: mol_type = other DNA
atgaccaccagccaccagccccaggaccggtacaaggccgtgtggctgatttttttcatgctcggactggggacgctgttgccttggaactttttcatgaccgccacacagtacttcacaaatagattggacatgagccagaacgtgtccctggtgaccgctgaactgtcaaaggatgcacaagccagcgccgctcctgcggccccgttacctgagcggaattccctcagtgccatttttaataatgttatgaccctttgcgctatgttgcctctgcttttatttacctacctgaacagctttctgcatcagcgcattcctcagtctgtgaggatccttggatcgctggtcgccattctcctcgtatttcttatcaccgcgatcctggttaaggtccagctggacgcattgcctttctttgtgattacaatgattaaaatagtactgattaacagcttcggagccattttgcagggatctcttttcgggctggccggcctgctgcctgcgagctatactgctccaataatgagcgggcaaggcttggccggattctttgccagcgtcgctatgatctgcgccattgcctccggatctgaactgagcgagtctgcttttggctacttcatcactgcatgtgccgtaatcattctgactataatttgttacctcgggctgcctcggttggagttctaccgttactatcagcagttgaagctggaaggacccggcgagcaggagactaagctggatctcatttcaaagggggaagagccacgcgctggcaaagaggagtccggggtgtccgtgtcgaactcccaaccaaccaacgaatcccacagcatcaaggccatcttgaagaacatcagtgttctcgcattttccgtctgctttatttttacaataacaattggaatgttccccgccgtaacagtcgaggtgaagtcatctatcgctgggtcttccacatgggagcggtattttatccccgtctcttgttttctgacttttaatatttttgactggctgggcaggtcgctgaccgcggttttcatgtggcccggcaaggacagtcgatggttgcccagtctagtcctggcacgactggttttcgtgccacttctcctgttgtgcaacataaagccccgccgctacctgacggtagtgttcgagcacgatgcgtggttcatcttcttcatggccgcctttgcattctccaacggctaccttgcctccctttgcatgtgcttcggtcccaagaaggtcaagccagccgaggcggagacagcaggagccattatggcattttttctgtgccttggccttgctttgggcgcggtcttttcgtttctgtttcgggccattgtctag

SEQ ID NO: 205989 - DNA, 1371 bp, synthetic construct
  misc_feature 1..1371: note = Description of Artificial Sequence: Synthetic coding sequence
  source 1..1371: mol_type = other DNA
atgaccaccagccaccagccccaggaccggtacaaggccgtgtggctgatcttttttatgctgggtttgggtacactgctgccttggaatttttttatgacagctacacagtacttcaccaacaggcttgacatgagccagaacgtgtccctggtaacagccgagctttccaaggatgcacaggcgagtgccgctccagcggccccattacctgagaggaactccctgagcgcgatcttcaacaacgtcatgactctttgcgccatgcttccattgttgctctttacatatttgaactcattcttacatcaaaggattcctcagtccgtccgcatcctgggtagccttgtggcaattctgttggtgtttctgattaccgctatattggtgaaagtgcagctagatgcccttcctttcttcgtgattaccatgatcaagatcgtgctgatcaactcttttggcgcaattcttcagggcagcctgttcggccttgccggcctgctgcctgcaagctatactgcccccataatgtcaggccaaggcctggccgggtttttcgccagtgtcgccatgatttgtgctatcgcttctggtagtgagctttcggagagtgcatttggttatttcattaccgcttgtgcagtgatcatcctaacaatcatatgctacctcggcctgccaaggctcgagttctatagatactaccaacagctcaaactggagggccctggagaacaggagactaaactcgacctgattagtaagggggaagaacctcgggcgggaaaggaagagtccggagtcagcgtgtccaattcccagcccaccaacgaaagtcactcaatcaaggcaatccttaaaaacatcagcgtcctggcgttctctgtgtgctttatcttcaccattactattggtatgtttccagccgtgacggtggaggtaaagtcctcaatcgccggctctagtacctgggagcgctattttatcccagtgtcatgcttccttacattcaatatcttcgactggctaggccggtcacttaccgctgttttcatgtggcctggcaaagactctcgctggctccccagtctggttttggccagattggtatttgtgcccttgctactcctgtgtaatataaaaccccgccggtacctcacggtcgtgtttgagcacgacgcctggttcatattcttcatggctgctttcgcctttagcaacgggtacctcgcaagtctgtgtatgtgtttcgggcccaagaaggtcaagcccgcagaagccgagacagccggtgccatcatggctttcttcctatgcctcggactagccctgggggccgtcttctcgtttctgtttcgtgctatagtgtag

SEQ ID NO: 205990 - DNA, 1371 bp, synthetic construct
  misc_feature 1..1371: note = Description of Artificial Sequence: Synthetic coding sequence
  source 1..1371: mol_type = other DNA
atgaccaccagccaccagccccaggaccggtacaaggccgtgtggcttatctttttcatgctagggcttggtaccctccttccctggaatttttttatgaccgcaacgcagtatttcaccaatagacttgacatgtcacaaaatgtttcattggtgactgcggagctgagcaaggacgctcaagcatccgcagctccagcagcaccgctacccgaacggaattcactgtctgcgatcttcaataacgtgatgaccctgtgcgccatgcttccgctgctcctgtttacctacttaaactcctttcttcatcaaagaatcccccagagcgtgaggattttgggcagtctagtcgctattctcttggtgttcctcatcacagccatcctcgtcaaggtgcagctggacgccctaccttttttcgtcatcactatgataaagatcgtgttaataaactctttcggcgctattctgcagggaagtctcttcggcttggccggcctgctaccagcgtcatacactgcgcctataatgtctggacaggggctggcgggtttttttgctagtgtagccatgatttgtgcaatagctagtgggtcggagttatctgaatcagctttcggttactttatcactgcttgtgctgtcatcattcttacaattatctgctatctcggtttgcctcggctagaattctaccggtattatcagcagttgaaactggaggggcctggagagcaggaaacaaaactggacctgatttccaagggagaagaaccccgtgctggaaaggaggagtctggagttagcgtgtccaatagtcaacctaccaacgagtctcacagcatcaaggccatcttgaagaacatttcggtgctggcattctccgtctgtttcatcttcactatcacaatcggaatgttccccgcagtcaccgttgaagtgaaaagctcaattgccgggagtagcacatgggagcgctattttatccccgtgtcctgtttcctgacatttaatatattcgactggctagggaggtcactgaccgctgtgtttatgtggcccggaaaggattccaggtggctgcctagtctggtgctggctcgcttggtttttgtgccacttttattgctgtgtaatattaaacctcgccggtatctgactgtggtttttgaacacgacgcatggttcattttttttatggccgcatttgccttcagtaatggatatctggcttccctgtgcatgtgcttcggacctaagaaggtcaagccagccgaggctgagactgcgggagccattatggccttttttctctgtttgggtctggctttgggggcggtcttctcatttttgttccgtgccattgtctag

SEQ ID NO: 205991 - DNA, 1371 bp, synthetic construct
  misc_feature 1..1371: note = Description of Artificial Sequence: Synthetic coding sequence
  source 1..1371: mol_type = other DNA
atgaccaccagccaccagccccaggaccggtacaaggccgtgtggctcatattcttcatgcttggtctggggacactccttccttggaacttctttatgacggcaacccaatacttcaccaatagattagatatgagccaaaatgtcagtctcgttacggccgaattgagcaaggatgcacaagcgtccgcggcaccagccgcccctctcccagagaggaacagcttaagcgcaatctttaataacgttatgaccctctgcgccatgcttccacttctattatttacttacctcaatagctttctgcatcagaggatcccacaatccgtgcgtatccttggctcactagtggcaatcctcctggtgtttctgattaccgcaattctggttaaggtccagctggacgcactacccttctttgtgatcacgatgattaaaatcgttctgattaacagtttcggtgctattctgcaaggttccctgtttgggcttgccggactgctgcccgcctcctataccgcccctattatgtcaggacaggggttggccgggttctttgcttccgtagccatgatctgtgcaatcgccagcgggtccgagttatcagagagcgcttttgggtatttcatcactgcatgtgccgtgattattctcaccattatttgctatctgggacttcccagactagaattctatcggtactatcagcagttgaaactcgagggacccggcgagcaggagactaaactggatttgatcagtaagggagaggagccacgagccggaaaggaagaaagtggagtaagcgttagtaactcgcagcctacaaatgagagtcactctattaaggcgatcttgaagaatatcagcgtgctggcattctccgtttgcttcatcttcacaatcaccattgggatgttcccagcagtcacagtggaggtcaaaagctcaatcgcgggctccagcacatgggagcggtatttcatccctgtgagttgcttcctgacgttcaatattttcgactggctgggacgctctctgactgccgttttcatgtggcctgggaaggactctcgatggctgcctagcctggtactagcacggttggtgtttgtgcccctgttgttgctctgcaacatcaaacctcgtaggtacttaactgtcgtgttcgaacatgatgcctggtttatcttttttatggccgcctttgccttctcaaatggttacctggctagcctgtgtatgtgttttggccctaagaaagtgaaaccggcagaggcggagactgctggggcaatcatggcatttttcctatgcttgggactggctctgggtgctgtcttctcttttctgtttcgagccattgtctag

SEQ ID NO: 205992 - DNA, 1371 bp, synthetic construct
  misc_feature 1..1371: note = Description of Artificial Sequence: Synthetic coding sequence
  source 1..1371: mol_type = other DNA
atgaccaccagccaccagccccaggaccggtacaaggccgtgtggctgatcttttttatgcttggcttgggcactttgcttccttggaacttctttatgacggccacacagtacttcactaatcgacttgatatgtcacagaatgtctcgctggtaaccgcagaactcagcaaagatgcacaagcgtccgcagccccagccgcaccactccctgagcgcaactctctgtccgcaatattcaacaatgtgatgacactgtgcgctatgctgcccctgctgctgtttacatatctgaactctttcctccaccaacgcataccccagagcgtgagaattctggggagcctcgttgctattctgcttgtatttctgatcacagccatcctggtaaaagtgcagctggacgctttaccattcttcgtgattacaatgatcaagattgtcttgataaatagtttcggcgctattcttcaaggatccctgttcggcctggccgggctgcttccagcctcatacactgcgccaatcatgtccggtcaggggttggcaggcttcttcgcatccgtggccatgatttgcgccatcgcatccggaagcgaactttccgaatccgccttcggatattttatcacggcctgtgccgtgataatactcacaattatctgttacctgggtcttcctaggcttgagttttaccgctactatcagcagctgaagttggagggaccaggtgagcaggagaccaagctggatctgatcagcaaaggggaggagcctagagccgggaaggaagagtctggggtgagtgtaagtaacagccagccaacgaatgagtcgcattcaattaaagccatcttgaaaaacatttccgttctggctttttcggtgtgcttcatttttactatcacaattgggatgttccccgccgtgacagtggaagtcaaatcctccatagccggcagttccacctgggaaagatactttatacccgtgtcatgctttctgacatttaacatattcgattggcttgggaggtcgctgacagctgtgtttatgtggcccgggaaagattctagatggctgccttcccttgtcctggcccggctcgtgttcgttccactcctgctgttgtgtaacattaagccccgacggtatctcacagtggtcttcgaacatgatgcatggtttatcttctttatggcggcttttgccttttctaatggatacctcgcctccctttgcatgtgctttggcccgaaaaaggtcaagcccgccgaggctgagacagccggggccataatggccttttttctttgtctgggacttgccctgggcgccgtgttttcctttctgttccgtgccatcgtttag

SEQ ID NO: 205993 - DNA, 1371 bp, synthetic construct
  misc_feature 1..1371: note = Description of Artificial Sequence: Synthetic coding sequence
  source 1..1371: mol_type = other DNA
atgaccaccagccaccagccccaggaccggtacaaggccgtgtggctcatcttcttcatgcttgggcttggaactctgctcccatggaatttcttcatgacagccacgcagtatttcacaaacagactcgatatgtcccagaatgtgtccctggttaccgccgaactgtctaaggacgcgcaggcttcagcggctccagccgctccgctacctgagaggaatagcctgagcgctatatttaacaacgtgatgacactgtgtgctatgctgccgttgctgctgttcacatatctcaactcattcctgcaccaacgcatcccacagtcagtgcggatcctgggttcactggtcgcaattttgctcgtttttctgatcacagccatccttgtgaaggtgcagcttgatgctctgcccttctttgtcattacaatgatcaaaatagtactgatcaactcctttggcgccatccttcaaggatccctattcggactggcgggcctgctgcctgcctcctatacagctccaattatgtcaggccagggtctggctggtttttttgcctccgtggccatgatatgtgcaatcgcatcaggatcggagctcagtgaatctgcattcggctacttcatcaccgcatgcgctgttataatcctgactatcatttgttacctcggcctgcctagactggagttttatagatattaccaacagctcaaacttgaaggtcctggggagcaggagacaaagttggatctgatctcgaaaggcgaggagccccgcgccgggaaagaagagtccggcgtgagcgtatctaacagtcaacccacgaacgagtcccatagtatcaaggcgatactaaaaaatatttccgtgctagcattcagcgtatgctttatctttaccatcaccatcggcatgttcccggccgtaacagtggaggtcaagagctccattgccggatcctctacctgggaaagatactttattccagttagctgttttctaacttttaacatattcgactggcttggccggagcctaaccgcagtgtttatgtggcctggaaaagattcccgctggttaccttccctcgtgctcgctcggttagtgtttgtgcctctcctgctgctttgcaacattaagccacgccggtatcttactgttgttttcgaacatgacgcttggttcatcttctttatggcagcgtttgccttcagcaacggctatttggcctccctgtgcatgtgctttggccctaaaaaagtgaaacccgctgaggctgagaccgctggcgcaattatggctttctttctctgtctgggcttggcactgggtgctgtcttcagcttcctttttagagccatcgtctag

SEQ ID NO: 205994 - DNA, 1371 bp, synthetic construct
  misc_feature 1..1371: note = Description of Artificial Sequence: Synthetic coding sequence
  source 1..1371: mol_type = other DNA
atgaccaccagccaccagccccaggaccggtacaaggccgtgtggttgatctttttcatgctgggactgggaaccctgctgccttggaatttctttatgactgctacccagtattttacgaaccgccttgacatgtcacagaacgttagtctggtcaccgcggagctgagcaaggacgcccaggcttccgccgctccagccgccccactaccagagaggaattcactaagtgcaatctttaataatgtgatgacactttgcgcgatgctcccactgctcttatttacctatctcaactcgtttttgcaccaacggatcccccaatcagtccgcattctcggcagcctcgtcgccattctgctagtcttccttatcactgcaatcctggtcaaggtacaattggatgccttgccattctttgttatcacaatgataaaaatcgtgctcatcaatagttttggtgctattcttcagggaagcctatttggcttggcaggcctcctccctgcctcctacactgcccccataatgtccggccagggccttgccggcttttttgcctcggtggccatgatctgcgccattgcaagcggctctgagctgtccgaaagtgcatttggttatttcatcactgcctgtgctgtaattatattaactatcatctgctacctgggactgccgaggctagagttttataggtactatcagcagctgaagctcgaggggcctggggagcaggagaccaagctggacttgataagcaagggcgaagaaccgcgcgcgggcaaggaggagtccggcgtgtctgtttccaacagccagcccacaaatgagagtcattccatcaaggcaattcttaagaacatctcagttctggcattctcagtctgttttatatttacgatcactattggaatgttccctgcagtcacggtggaagtaaagagctctatcgcagggagctctacatgggaacgctatttcattcccgtctcctgctttctgactttcaatatcttcgattggcttggaagatcgctgacagccgtttttatgtggcccggcaaggatagtcggtggctaccttcgctcgtgctggcccgtttagtattcgtgcccttgttgcttctctgtaacattaagcccaggaggtatctgaccgtcgtgtttgaacatgacgcttggttcatctttttcatggcagcattcgccttttctaatggatatttagctagcctttgtatgtgttttggtcctaaaaaggtgaaaccggcagaggccgagacagccggggcaataatggctttctttttgtgcttgggcctggcactgggagcagtattctctttcctcttccgggctattgtttag

SEQ ID NO: 205995 - DNA, 1371 bp, synthetic construct
  misc_feature 1..1371: note = Description of Artificial Sequence: Synthetic coding sequence
  source 1..1371: mol_type = other DNA
atgaccaccagccaccagccccaggaccggtacaaggccgtgtggcttatttttttcatgttaggtcttggcaccttgctcccgtggaacttcttcatgactgcaacccaatacttcaccaaccgtctagacatgtctcagaacgtcagccttgtgaccgcagagttaagcaaggatgctcaagccagtgccgctcccgccgcccctctgcccgagcggaattccttatcagccattttcaataatgtcatgaccctatgcgcgatgctcccactgctgctgtttacatacctgaactcctttcttcaccagaggattccacaatcagtgcggatcctgggctctctcgtggcaatcctgttggtgtttcttatcacagccatcctggtaaaggtccagctggacgcattgccatttttcgtgatcactatgatcaagatcgtccttattaattctttcggtgccatccttcagggtagtctgttcgggttagctggcctgctccccgcgtcgtacactgcccctataatgtccgggcaaggactggcaggtttcttcgcctccgtagctatgatctgcgctattgcaagcggcagcgaactgtccgagtccgcctttggctacttcattaccgcatgtgctgtgatcatcctcacgatcatctgctatctggggttaccacgactggagttctacaggtattaccaacagctgaaactcgaaggccccggcgagcaggaaacaaaactggacttgatctctaagggcgaggaaccacgagcaggcaaagaagaaagcggagtatccgttagcaacagccagccaactaatgaatctcacagcatcaaggcgatcctcaaaaatatctcggtgttagccttctctgtctgttttatcttcacaatcactataggtatgtttccagctgtcactgtggaggtcaaatcctctatcgccggaagtagcacatgggagcggtacttcatccctgtgagctgttttctgacatttaatatcttcgactggctcggccgttcactgacggccgtgttcatgtggcctgggaaggattcgagatggcttccctccttagtgttggcgagacttgttttcgtgcccctcctcctgctatgtaatattaaacctagacgttatcttaccgttgtcttcgaacatgatgcctggttcatcttctttatggctgcctttgccttcagcaatgggtacttggcgtcattatgtatgtgttttggtccaaagaaagtcaaacccgctgaggccgagaccgccggcgcgatcatggccttcttcttgtgcttagggctggccctgggggcagtattcagctttctgttccgggcgattgtgtag

SEQ ID NO: 205996 - DNA, 510 bp, synthetic construct
  misc_feature 1..510: note = Description of Artificial Sequence: Synthetic coding sequence
  source 1..510: mol_type = other DNA
atgcggcgggagcggacccggggcccccaggcctgggagttcccctcaccgaccaaatccggctgctcgcttcagtcactatccaggtacaaagctgtgtggttgatcttctttatgctgggactcggcacgctccttccttggaatttctttatgactgccacacagtattttactaaccgcctcgatatgtctcagaacgtgtcactcgtcacagccgagctgtccaaggacgctcaggcttctgcagctccggccgcacccctgccggagagaaactccctatctgctatttttaacaacgtgatgaccctgtgcgctatgttgcctctactgcttttcacttatttaaactcttttcttcaccagcgtatcccccagtctgtgcggatcctagggtcgcttgtggcaattttgctagtgtttttgattacagcaattctcgtcaaggtgcagctggatgctctgcctttctttgttatcacaatgataaagatcgtgctgatctag

SEQ ID NO: 205997 - DNA, 1371 bp, synthetic construct
  misc_feature 1..1371: note = Description of Artificial Sequence: Synthetic coding sequence
  source 1..1371: mol_type = other DNA
atggcccggggcgacgccccccgggacagctaccacctggtgggcatctcctttttcattctgggtctgggtacgctgctgccctggaacttctttattacggctatcccttattttcaggcgcgcctggccggggccgggaatagcacagcaaggattctgagcacaaaccataccgggccagaggatgcgttcaattttaacaactgggtcactctcctctctcagctcccccttttactatttacactcctgaattcatttctatatcagtgtgtgcccgagactgtcagaatcctaggctccctacttgccatcctattgctgttcgcactaacagccgcgctggttaaggtcgacatgtcccctgggcccttctttagcattaccatggcttccgtttgtttcataaatagcttttccgcagtgttgcaaggcagtctgtttggccagcttggcaccatgccctctacatatagcactttgttcctgtcaggacaggggctggcgggaatctttgctgcactcgctatgttactgtccatggctagcggggtggatgctgaaacttccgcgctcggctactttatcacaccgtgcgtggggatcctgatgtccattgtgtgttacctcagtctgccccacttgaagtttgctagatactatttagccaacaaatccagtcaggcccaggcacaggagctggagacaaaggcagaactgctgcagagcgatgaaaatggaataccttctagtccacagaaggtggcgcttacgttggatctggatcttgaaaaagagcctgagtctgaacctgatgaaccacagaagccggggaagccttcagtttttaccgtgtttcaaaaaatttggctaacggcactctgcctcgtgcttgtgttcacagtcacgctgtcagtgttccccgcaatcactgctatggtaacgagctctacgtcgcctggaaagtggagccaattttttaatccaatctgttgttttcttttgtttaatattatggactggttgggacggtctttgacaagctatttcctttggccggacgaggacagtagactgctgcctctcctcgtctgtctgcgattcctgtttgtcccactcttcatgctgtgccacgtgccccagagaagtaggctcccaatcctattcccacaagacgcatattttatcaccttcatgctcctcttcgcagtgagcaacggttacctcgtgagtctgacaatgtgtctggcccctcgccaggtgttgccccatgaaagggaagtagctggcgctctgatgaccttctttctggcgcttggtttaagttgcggggcttccctgtcatttcttttcaaagcccttctctag

SEQ ID NO: 205998 - DNA, 1371 bp, synthetic construct
  misc_feature 1..1371: note = Description of Artificial Sequence: Synthetic coding sequence
  source 1..1371: mol_type = other DNA
atggcccggggcgacgccccccgggacagctaccacctggtgggcattagctttttcattcttggtctgggcaccttgctaccatggaacttctttattactgcaatcccatacttccaagcccgactagcaggtgcgggaaactctacagccagaatactgagcactaaccacaccggacctgaggacgcattcaattttaacaattgggtgacactcttgagtcagctgccacttctgctcttcaccttattaaatagcttcttgtaccagtgtgtacccgagacggtccggattcttgggtccctactggccatactgcttctgtttgctctgaccgcagctctcgttaaagtcgacatgtccccaggaccatttttctctatcaccatggcctctgtgtgctttattaactcattcagcgcagttttgcagggaagcctctttggacagctcggaaccatgccctctacttacagcacattgtttttgtccggccagggcctcgccgggatattcgccgccttggccatgcttcttagtatggcctcaggcgtggacgccgagacaagcgccttgggatactttataactccctgcgtaggcattctgatgtcaatcgtgtgttatctctctcttccccacctcaaatttgcacggtattatcttgccaacaaaagctctcaggcgcaggcccaggaacttgagaccaaagcagagcttctgcagagtgatgaaaacggtattcctagttcaccccagaaagtggctctgacacttgatctagacctggagaaggaacccgagtccgagcctgacgagccacagaaacccgggaaacccagcgtgttcaccgttttccagaaaatatggcttacggcgctgtgccttgttctggtgtttacagttacacttagcgtattcccggcgataaccgctatggttacctcttccaccagccccggcaaatggagtcagttctttaacccaatctgttgctttcttctcttcaacattatggattggttagggaggtccctgacaagctacttcctctggcctgacgaagattctcggctcctgccactcctcgtctgcctgcgttttctgttcgtgcctctcttcatgctttgccatgttcctcaacgtagccggctgcccatcctgttcccccaagacgcctactttatcacgtttatgctgttattcgcggtctccaacggttatctcgtcagcctcactatgtgtctcgcccctcggcaggtcctgcctcacgagcgcgaggttgcaggcgctctcatgacctttttcttggctttaggcctatcctgtggagctagcctcagctttctgttcaaagccctcctctag

SEQ ID NO: 205999 - DNA, 1371 bp, synthetic construct
  misc_feature 1..1371: note = Description of Artificial Sequence: Synthetic coding sequence
  source 1..1371: mol_type = other DNA
atggcccggggcgacgccccccgggacagctaccacctggtgggcattagtttcttcatactgggactcggcacccttttaccttggaacttctttatcacggctataccctactttcaagcgcgccttgccggggccggcaattccacagccagaatcctaagtaccaatcatacgggccccgaagatgcgttcaactttaacaattgggtgactttactcagtcagctcccattattattgttcactctacttaactcttttctttaccagtgcgtgccagagactgtgagaattctgggctctctgctggccatcctgctgcttttcgcccttacagcagcccttgttaaggtggacatgtctccagggccttttttctccatcactatggcatccgtatgctttattaattctttttccgcggtgctccagggctcgctgttcggacagctaggtactatgccctcaacatactccactctctttttgagtggacaggggcttgctggcatttttgcagcgttggcgatgttgctgagcatggcctcaggtgtggatgccgagaccagtgccctgggctacttcattacaccgtgcgtgggaatcctgatgagcatagtgtgctatctgagcctcccccatctgaagttcgcccgctactacctggctaacaagtcatcacaagcccaagctcaggaacttgagaccaaggctgagttgctgcagtccgacgagaatggaatcccatcatcaccacagaaggtggcactcaccctagacctggacctagagaaagaacccgaaagtgagccggatgagcctcaaaaaccaggaaagccttccgtgtttactgttttccagaagatatggctcaccgcattatgcctggtgctggtattcaccgtcaccctgtcagtcttcccagcaattaccgccatggtgacaagcagcacgtccccgggcaaatggtctcagttctttaatcctatttgctgtttcctgctgtttaacatcatggactggctgggcagaagtttaacgtcctacttcttatggcccgatgaggattcccggctgttgccactgctcgtctgtctgagatttctgtttgtccctctgtttatgctgtgtcatgtccctcaacgctcccgacttcccattctctttccccaggatgcttactttattacgttcatgctcctgtttgctgtgtctaacggatacttagtgtctctaacaatgtgcctggctccaagacaggttttgccccacgaaagagaagtagcaggcgccctcatgacattttttctggccttgggtctgtcctgcggcgcgagtctgtcattcctttttaaggcactcttatag

SEQ ID NO: 206000 - DNA, 1428 bp, synthetic construct
  misc_feature 1..1428: note = Description of Artificial Sequence: Synthetic coding sequence
  source 1..1428: mol_type = other DNA
atggccgtggtgagcgaggacgacttccagcacagcagcaacagcacatatcgcaccacctcctctagccttcgggccgatcaggaggccctgctcgagaaactcctggatcggccacctcccggtctgcagagaccggaggacaggttctgtggcacatatatcattttcttctctctgggtatcggtagtttgctgccatggaatttctttattactgctaaggaatattggatgttcaaactcaggaattccagcagccctgcgacaggcgaagaccctgagggtagtgacatactcaattacttcgagagctacctagccgtcgcctccaccgttccatccatgctttgcttggttgcaaactttctgctggtgaatcgggtcgcagtgcatattagggtgctggcgtccctgaccgtaatccttgccatattcatggtcatcacagcgctggttaaagtagacacttctagctggaccaggggatttttcgcagtcactatcgtctgtatggttattctgtcaggagctagtacagtgttcagctcatccatatatgggatgactggaagtttccccatgcggaacagtcaggctcttatttcgggtggtgcaatgggaggcacagtctctgccgtggcctcactggtagatctggccgctagtagcgatgtgcggaactcggctttggcattcttcttaacggctacagtcttcctggtgctctgtatggggctgtacctactgcttagccgactggaatacgcccggtactacatgagacctgttttagccgcacacgttttctccggggaagaggagctgccacaggacagcttgagtgcgcccagcgtggccagcagattcatcgattcccacacacctcctcttaggcccatactcaagaaaaccgcctcattggggttttgtgtgacatacgtattctttattacttcactcatttatccagccatttgcacgaatatagagtctctcaataaaggatcagggtccctgtggactacgaagttcttcattcctctcaccacattcctcctgtataatttcgccgatctctgcgggagacagttgactgcttggattcaggtgcccgggccaaatagtaaggccctgccgggcttcgtcctcttgcgcacctgtctcataccgctgtttgtgctttgtaactatcagcctcgcgttcacttgaagaccgtcgtcttccaaagcgacgtgtatcctgccctgctctcaagtcttctggggctcagcaacgggtacctctctactctggcactcctgtatggccccaaaatagtccctagggaactggccgaagccacgggagtcgtgatgtccttttacgtgtgcctcggtctaactctggggtcagcctgttctaccctgctggtgcatttgatctag

SEQ ID NO: 206001 - DNA, 1590 bp, synthetic construct
  misc_feature 1..1590: note = Description of Artificial Sequence: Synthetic coding sequence
  source 1..1590: mol_type = other DNA
atgagccaggacaccgaggtggacatgaaggaggtggagctgaacgagttggaacctgaaaagcagccaatgaacgccgcttctggtgctgccatgtctttggctggggctgagaagaatggactggtgaaaattaaggtggctgaggacgaggccgaggccgcggccgctgcaaaatttacaggattgtccaaggaagagctgctgaaagtggcagggagccccgggtgggtacgcacccgctgggcattactcctgctgttctggcttggttggctgggtatgttggcaggtgccgtggttattatcgttagggccccgcggtgcagagaactccctgcgcagaagtggtggcacactggcgcactctatcgtatcggagacttacaggcatttcagggtcatggagccggaaatctggccggccttaagggccggctggactatttgtcgtcgctgaaggtcaaagggttagttctcggccccatacataaaaaccaaaaggatgacgttgcacagaccgatctactgcaaatcgaccctaactttgggagtaaagaggacttcgactccttgcttcagtcggccaagaagaagagtattcgggtgattcttgacctgacacctaattatagaggtgaaaatagctggttctcaacccaggtggataccgtagcaaccaaggtcaaggacgcactggagttctggctacaagcaggggtcgacggcttccaagtacgcgacattgaaaacttaaaggacgcctcaagcttcctggccgagtggcagaatattaccaaaggattctcagaggacagactgctgatagcagggacgaattcaagcgatctgcagcagattctgagcctactggaatcaaacaaagatctgctgctgaccagcagctaccttagcgattctggctccacgggagagcacaccaagtccctcgtgacacaatacttaaatgcaaccggcaaccgctggtgttcctggtccctttctcaagcccggttgctgacaagctttctccccgcacagctgcttagattgtatcaattgatgttattcactcttcccgggacacccgtgttcagttacggcgacgaaatcggtctggacgcggccgctttgcccggtcagcctatggaggcccccgtgatgctctgggatgagagcagctttccagatattcccggagcggtgtcagcaaatatgacagtgaaaggtcagtccgaggaccctggctctctcctcagtctttttcgacggctctccgatcagcgatcgaaggagcgcagcctgttgcatggcgacttccacgccttcagcgctggccctggtttattcagttacatccggcactgggaccagaatgaacgatttctggtggttctcaatttcggggacgtgggcttatccgcgggacttcaggccagtgacctgcccgcatcggcctccctacctgccaaagcagacctgctgctgtcaacgcagccgggacgtgaagaaggctcccccttagaactcgagcggcttaagctggagcctcacgaaggactgctgctgcgcttcccttacgcagcctag

SEQ ID NO: 206002 - DNA, 1707 bp, synthetic construct
  misc_feature 1..1707: note = Description of Artificial Sequence: Synthetic coding sequence
  source 1..1707: mol_type = other DNA
atggagctgcagccccccgaggccagcatcgccgtggtgagcatcccccgccagctgccaggatcccactcagaggcaggagtgcaaggactgagcgccggcgatgactctgggacaatgagccaggatacggaagtcgacatgaaggaagtcgagctgaacgagctggaacccgagaaacagccaatgaatgctgcaagcggtgcagccatgtcactggcaggtgcagagaagaatggattggtcaagattaaggtcgctgaagacgaggctgaagctgcggcagccgctaagtttaccggtctgtccaaggaggagctgttgaaagtcgccggctcccccggctgggtacggacacgctgggcattacttctgctgttctggcttgggtggctaggaatgctggcaggcgctgtggtgataattgtccgcgcacctaggtgcagagaactgcctgcccagaagtggtggcacacaggcgccttataccgcattggagatcttcaggctttccagggccacggcgccgggaacctggctggtttgaaaggacggttagattacttgagctctctaaaggtgaaagggctggtgctaggtccgattcacaagaaccagaaggacgatgtcgcgcagacagatctgctccagatcgaccccaactttggctctaaagaagatttcgacagtctgcttcagagcgccaagaagaagtcaatcagggtgatacttgacctaactcccaattaccggggtgaaaattcctggttctcgactcaagttgacactgtcgcgactaaggttaaggatgcccttgagttttggctacaagcaggtgtcgacggtttccaagtgcgagacattgagaatctaaaagacgctagtagtttcttggccgagtggcagaatattaccaaagggttctccgaagaccggctgctcatagccggtaccaactcatccgacctgcaacaaatactcagtctcttagaatcgaacaaagatttgctattgacctcaagttatctttcggactcaggatcaaccggggaacatacaaaaagcttggtgacacagtacttgaacgctactgggaaccggtggtgctcctggtccctgagccaagcgcgattgttaaccagcttcctcccagctcagctgttgagactgtaccaattaatgctcttcacgctgcctgggacgcctgtgttcagctacggtgatgagatagggctagatgccgcagcgttaccgggacagcccatggaagcccctgtaatgttgtgggacgagtcttctttcccagacatcccaggcgccgtatccgcaaacatgacagtaaaaggccagtcagaggatcccgggtcgcttctttctctcttccgtcggctttctgatcagcgcagcaaggaaaggagcttgttgcacggcgacttccacgctttcagtgccggtcctggcctgttctcctacattcgccactgggatcagaacgaaaggtttcttgtggtgctgaacttcggcgacgtagggctgtccgctggcctgcaagcatctgacctcccagcgtctgcatctctgcccgcgaaggctgacctgcttctgtcaacccagcctggccgcgaggagggaagcccgttggaactggagcgcctgaaactggagccacacgaagggctccttctgcggttcccctatgctgcttag

SEQ ID NO: 206003 - DNA, 1893 bp, synthetic construct
  misc_feature 1..1893: note = Description of Artificial Sequence: Synthetic coding sequence
  source 1..1893: mol_type = other DNA
atggagctgcagccccccgaggccagcatcgccgtggtgagcatcccccgacagctcccggggtcacactccgaagctggcgtgcagggcctcagcgctggagatgatagtgaacttggcagccactgtgtcgcacagacagggctggaactgcttgcaagcggtgacccgctaccatccgcgtcccagaatgctgaaatgattgagacaggttcagattgtgtcacccaggctggtctgcagctactggcctcctctgatccacctgcactcgccagtaaaaatgccgaggtgaccggcactatgtcacaggatacggaagtcgacatgaaagaagttgaactgaacgagttagagcctgagaaacaaccaatgaatgcagcatctggagccgcaatgagtctggctggagccgagaagaatggacttgtgaaaatcaaggtcgcagaagacgaggctgaggccgcagctgccgcaaagtttaccgggttgagtaaagaggagctgctgaaagtggcgggcagccccggctgggtccggaccaggtgggcccttctcctcctcttttggctgggatggctcggcatgctggccggggctgtggtgatcatcgtcagggctcctcggtgccgagaactgcctgctcagaagtggtggcacaccggggcactgtacagaattggcgatctccaggcctttcagggtcacggagccggaaatctcgctggcttgaagggccgattggattacttgtcaagtctgaaggtgaaagggcttgttctgggtcctatacacaagaatcaaaaggatgatgtcgcccagacagacctactgcagatcgatcccaacttcggaagcaaagaggactttgacagcctgctgcaatctgctaagaaaaagtctatacgagtcattctggacttaactcccaactaccgaggcgagaattcatggttttccacacaggtggacactgtcgccacgaaggtgaaagacgcgctcgaattctggctgcaggcaggcgtggacggatttcaggtgcgtgacatcgagaatctgaaggatgcttcaagcttcctggcagagtggcaaaacattactaaggggttctccgaggacaggctccttatcgctggcacgaacagctcagacttgcagcagatactgtcactcctagaatcaaataaggacctccttctcacctctagttatttgtccgacagcggatcaaccggggagcacacaaaatcgctggtgacgcagtacttgaacgccacggggaacaggtggtgtagctggtcactgtcacaggctcggttactgaccagcttcctgccagcccagctgctgcgcttataccaactcatgctgttcacgctgccaggcactcccgtatttagctatggagatgaaattggcctggatgctgctgctttaccaggccagccgatggaggcacccgtcatgctatgggacgagagctcctttccggatatcccgggcgcagtaagtgctaacatgaccgtgaagggacagagcgaggatccagggagcctgttaagcctgtttagacggctgagcgaccaacgatctaaggagcgtagcctgcttcacggggattttcacgccttttcagccgggcccggcctgttcagctacattaggcactgggaccaaaatgaaagattcttggtcgtgctgaatttcggtgacgttgggttgtcggctggactccaggcatccgatctacctgccagtgcctccctgcctgctaaggccgatctactgctctcaactcagcccggccgggaggagggaagtccgcttgaattggagaggttaaagttggagccccatgaggggctgcttctgcgctttccatatgcagcatag

SEQ ID NO: 206004 - DNA, 1896 bp, synthetic construct
  misc_feature 1..1896: note = Description of Artificial Sequence: Synthetic coding sequence
  source 1..1896: mol_type = other DNA
atggagctgcagccccccgaggccagcatcgccgtggtgagcatcccacgtcagctgcccggaagtcactctgaggccggagtgcaggggctctcggccggcgatgactctgagacaggaagcgactgcgtaacacaagccgggctgcagctgctcgccagttccgacccccctgctttagcttccaaaaacgctgaggtgaccgtggaaacgggctttcatcacgtcagccaagctgacatagaattcctcaccagcattgatcctaccgcctctgcttccggttcagccggcatcaccggaacaatgtctcaagacaccgaggtggatatgaaagaggtggaactgaatgagttagaacccgaaaagcagccgatgaacgcagcaagcggtgctgctatgagcctggccggcgcagaaaaaaacggcttggtgaagattaaggtcgccgaggatgaggctgaggccgctgccgcggcaaaatttactgggctaagcaaggaggagttgctgaaggtagccgggagcccaggatgggtccggacaagatgggccctcctgctcctattttggttgggatggctgggcatgctggcaggtgcagttgtcattattgtaagagctcctagatgccgggaattacccgctcagaagtggtggcacactggggcactctaccgaattggcgatttgcaggcatttcaggggcatggggccggtaacctcgctggcctcaagggacgcttggattatctctcatcgttgaaggtgaaaggactggtgctcggccccatccataaaaatcagaaggacgatgtggcacagacggatcttctgcagatagacccaaatttcggatcaaaggaagatttcgatagcctcctgcagtccgcaaagaagaagagcattcgggtcatcctggacttgactccaaattatcgcggcgagaactcgtggttttctacccaagttgatacagttgccacaaaagtgaaggacgctctcgagttctggctgcaggccggggtggacggttttcaggtccgtgatatcgaaaacctaaaggatgcctcttcgttcctggcagaatggcaaaacataacaaaaggattcagcgaggacaggctgctaatcgccgggactaatagtagcgatctgcagcagattttgtcgcttctcgagagcaacaaggacctccttcttacctcttcctacctgtccgattccggcagtacaggtgagcacacaaaaagtctggtcactcagtacttgaatgccaccggaaatagatggtgcagttggagtctgagtcaggccaggctactaacgtctttcttgccagcacagctgctgaggctgtaccagcttatgctgttcaccttgccaggcaccccagttttctcctatggggatgaaatcgggctggatgcagccgccctacccggacagccgatggaagccccggttatgctctgggatgagagttcctttccagacatcccaggagcggtgagcgctaatatgacagtgaaaggccagtccgaagaccccggcagcctactatcactatttcggcgattgagcgaccagagaagcaaagagagaagtttgttgcacggagacttccacgcatttagtgcaggtcctgggctattctcttacatccgacactgggaccagaacgaaaggttcttggtggtgctgaacttcggcgacgttgggctgagtgctgggctccaggcatccgatctccctgcctctgcctctttgcctgcgaaagctgacctgctcctctcaacacagcctggccgagaggaagggtctccgttagagctggagcgtctgaaactcgagccgcacgagggcctcttgctgcgatttccgtacgccgcatag

SEQ ID NO: 206005 - DNA, 1986 bp, synthetic construct
  misc_feature 1..1986: note = Description of Artificial Sequence: Synthetic coding sequence
  source 1..1986: mol_type = other DNA
atggagctgcagccccccgaggccagcatcgccgtggtgagcatcccacggcagctccctggttcccactccgaggcaggagtacagggcctaagcgccggagatgatagcgaactgggctctcattgtgtcgcccaaacaggcttagaactgctcgcttctggagacccgctcccgagtgcttcgcaaaatgccgagatgattgagaccggctccgactgcgtcacgcaagccggtctgcaactgttggcttcctctgatccccctgcgctggcctccaagaatgcagaagtgacagagaccggtttccaccatgtctctcaggcagacatcgagtttctgaccagtatagatcccactgcgagcgcatccggcagcgctgggatcaccggcaccatgtctcaggatacggaggttgacatgaaagaagttgaactgaatgaacttgagccggagaaacaaccaatgaacgcagcctcaggggctgccatgtctctagctggtgctgagaaaaatggcttggtgaagatcaaggtggccgaggatgaggcagaggcagccgcagctgccaagttcactgggctatccaaggaagagctgctgaaagtagcggggagtccaggctgggtgcgcactagatgggcactcctgttactattttggcttgggtggctcgggatgctggctggcgcagtggtgattatcgttagagctccaagatgcagagaacttcccgctcagaagtggtggcacacaggagccctgtatcgcatcggcgatctgcaggcttttcaagggcacggagccgggaatcttgctggactgaagggcagactggactatctgtcctccctcaaggtgaagggtctagtgctggggcccatacataaaaatcagaaagacgacgtggcccagaccgaccttctgcagattgatccgaacttcggaagcaaggaggatttcgactcgctgttgcagtcagccaaaaaaaaaagcattcgcgttatcctggacctcaccccgaactaccggggagaaaactcatggttcagcactcaggtcgatacagtggctactaaagtaaaagatgctctcgagttctggctacaggctggcgtggacggattccaggtgagagacattgagaacctgaaggacgcctctagcttcctggccgagtggcagaatatcactaaaggtttcagtgaggatagacttctgatagcaggaacaaactcttctgatctacagcagatcctgagcctgctggagtctaacaaagacctgcttttaaccagttcgtatctgtctgacagtggcagcacgggcgagcacacaaagagtctggtaacccagtacctcaatgccacgggtaataggtggtgttcctggtctttatcccaagctcgactcctcactagttttctccccgcccagctgttgcgtttatatcagctgatgctgttcacgcttcccggtactcccgtgttttcctacggagatgaaatcggcctggatgctgccgcactgcccggacagccaatggaggcccccgtaatgttgtgggacgaatcctccttccccgatatcccaggagccgtgagcgctaatatgactgtgaaggggcagtcagaggatccaggctccttgcttagcctttttagaaggctgtctgatcaacggtcgaaagaaaggtcactgctgcatggtgatttccatgctttcagcgcaggccctgggttgttctcctacatacgccattgggatcaaaacgagcgatttctggtggtgcttaacttcggagacgtgggattgtcagcagggcttcaggcttcagacctgccagccagtgccagcctgccagccaaagctgacctcctattgtcaactcagcccggcagagaagagggttctccactggaacttgagagacttaaactggagccccatgagggattactgctgaggttcccttacgccgcctag

SEQ ID NO: 206006 - DNA, 1536 bp, synthetic construct
  misc_feature 1..1536: note = Description of Artificial Sequence: Synthetic coding sequence
  source 1..1536: mol_type = other DNA
atgagccaggacaccgaggtggacatgaaggaggtggagctgaacgaactggaacctgaaaaacagcccatgaatgcggcctccggcgccgctatgagcttggcgggggctgaaaagaacggactggttaaaattaaagtagctgaggacgaggccgaggcagccgccgccgctaagttcaccggtctatccaaagaggagctccttttttggttagggtggctgggtatgctggcaggagcagtggtcatcatagttcgagccccacggtgccgtgagttgcctgctcagaaatggtggcatacgggcgccttatacaggatcggtgatctgcaggcgttccaggggcacggtgccggcaatctggcgggcctgaaaggccgactagactatctaagctctctaaaagtgaagggtcttgtgttgggtcccatacacaaaaaccaaaaggatgacgtggctcagacagatttgttacaaatagacccgaacttcggtagtaaagaagacttcgactcactgctacagtctgccaagaagaagagtatcagggtgattttggatcttactcctaattacaggggcgagaacagctggttcagcactcaggtggacacagttgcaactaaggtgaaagacgcattggagttctggctgcaggccggcgttgatggttttcaagttagagatatcgagaatttgaaggatgcatctagttttctggccgaatggcaaaacattacaaaaggattcagcgaggaccgactactgatagccggaactaattcaagcgacctccaacaaatactgagcctactggagagcaacaaggacctcctgcttacaagcagttatctgtctgattccgggagtactggagaacacactaagtctctggtgacccagtacctgaacgccaccggcaatcgctggtgctcctggagcctatcccaggcccggttgctgactagtttcctacctgcacaacttctacgactgtatcaactcatgctgttcacattacctggaacacccgtctttagctatggggatgagatcggactggatgctgcagcactgcctgggcagcctatggaggcccccgtcatgctctgggacgaatcctccttccccgatattcctggagctgtctccgcgaatatgacagtgaaaggccaaagtgaagatccgggaagcttgctcagcctcttcagacgcctgagcgatcagaggagcaaagaacgcagtttgctccacggagacttccatgctttctcagctggtccaggcctcttcagttacatccgccattgggaccagaatgagcgattcttagttgtgctgaactttggcgatgtgggcctcagcgcaggtttacaggccagtgatttgcccgcttccgcgtcattgccggctaaggccgatctactgctaagtacacagccaggaagggaagaaggttcccctctagaactcgaaagactgaaactggagcctcacgagggtctgctcctccggtttccctacgcagcctag

SEQ ID NO: 206007 - DNA, 408 bp, synthetic construct
  misc_feature 1..408: note = Description of Artificial Sequence: Synthetic coding sequence
  source 1..408: mol_type = other DNA
atgagccaggacaccgaggtggacatgaaggaggtggagctgaacgagctcgagcccgagaaacagcctatgaatgctgcatctggtgccgccatgagcctggccggcgccgagaagaacggtctagtgaagatcaaagtggccgaagatgaagcagaggccgccgctgccgccaaatttacgggcctgagtaaagaagagttgctgaaggtggcaggatcacctggctgggtgcgcactaggtgggctctattattattgttttggttgggatggcttggcatgctcgctggggcagtggtaatcatcgtgagagccccccgatgccgcgaactcccggcccaaaaatggtggcacacaggcgcattataccgcatcggagatctacaggccttccaggggcattag

SEQ ID NO: 206008 - DNA, 2058 bp, synthetic construct
  misc_feature 1..2058: note = Description of Artificial Sequence: Synthetic coding sequence
  source 1..2058: mol_type = other DNA
atggccgaggacaagagcaagcgggacagcatcgagatgagcatgaaggggtgccagacgaacaacggattcgtgcacaatgaagatatcttagaacagacccccgacccaggaagcagcacagataatctgaaacattcaactcgcggcatcctggggtcacaggagccggattttaagggtgtgcagccatatgcaggaatgcctaaggaggttttgtttcaattctctggtcaggcaagataccgcatcccgcgggaaatcctattttggcttaccgtcgcaagcgtcctcgtactgatcgcagccaccatcgcgattatcgcccttagtcctaagtgcctggattggtggcaggagggacctatgtaccaaatctatccccggagctttaaggattccaacaaagacggcaatggtgacctcaaaggaattcaggacaagctcgactacataaccgctctgaacataaagactgtttggatcacaagcttctacaagagctcactgaaggacttcaggtacggcgtggaagatttccgcgaagtagatccaatctttggcacaatggaggattttgaaaatctggtcgccgctatccatgacaagggactgaaactgatcatcgattttatccccaaccacaccagcgacaagcacatatggtttcagctgtctcggacacgaactgggaaatacacagactactacatatggcacgactgtacgcacgagaacgggaaaactattccgcccaacaattggttatcagtttacggaaattccagttggcacttcgacgaagtcagaaatcaatgctactttcaccagtttatgaaagagcagccagatctgaacttcaggaatccagatgtacaggaggagatcaaagaaattctgcgtttctggctcaccaagggcgtggatggcttctccttagatgccgtcaagtttttgttggaagcgaaacacctgcgggacgagattcaggtgaataaaacacagattccggatacagtgactcagtattccgaactgtatcacgactttacaacaacgcaggttggtatgcacgatattgtcaggtcttttagacagaccatggatcagtacagcactgaaccgggccggtaccggtttatggggaccgaggcctacgcagaatccattgatcgcacagtcatgtattacggactgcctttcattcaggaagctgattttccctttaataattatctgagcatgctcgatacagttagtggcaattcggtgtacgaagtcattaccagctggatggagaatatgccggagggcaagtggccaaactggatgatcggaggccccgacagcagcaggcttacaagccgcctgggaaatcagtatgtgaacgtgatgaatatgctgctctttacattaccaggaacccccattacatattacggagaggaaattgggatgggcaatatagtggctgctaatttaaacgagtcatatgacattaacacgctgagatccaagtctcctatgcagtgggacaacagcagcaatgccggtttcagcgaggccagtaacacctggttgccaaccaattccgactaccatacagtgaacgtggatgtacagaaaacccagccaaggtcggctctgaaactgtaccaggacctgtcgttactgcatgctaatgaacttctgctgaatagaggatggttctgccatcttaggaatgactcccattacgtcgtttatacccgcgagttggacggcatcgatagaatttttatagtcgtgctgaattttggcgagtctaccttgttaaatctgcataatatgatttccgggctcccggcaaagatgagaatcaggctctcaactaactccgcagacaaaggcagtaaagtcgatacctcaggaattttcctcgacaagggcgaaggactcatctttgagcacaatacaaaaaacttattacataggcagacagctttccgggacagatgctttgtttccaatcgtgcttgctacagctccgtgcttaacatactctatacgtcatgttag

SEQ ID NO: 206009 - DNA, 1866 bp, synthetic construct
  misc_feature 1..1866: note = Description of Artificial Sequence: Synthetic coding sequence
  source 1..1866: mol_type = other DNA
atgaagaccttctggagccggccccggatccagttcagcggccaggcgcggtaccggatccctagggagatacttttttggctgaccgtggcgtctgtccttgtcttgattgctgcgaccattgctatcatagccttgtctccgaaatgcctcgactggtggcaggaaggtccaatgtatcagatttacccacgtagctttaaggactccaataaggacggcaatggggacctcaaggggattcaagataagctggattatatcactgcccttaacattaaaaccgtgtggatcacatctttttataaatctagccttaaggacttccgctacggcgtggaggattttcgcgaggtggacccaatcttcggaactatggaagactttgagaatctggtcgccgcaatccatgacaaggggctcaagctgattattgattttatccccaaccacaccagcgacaaacatatatggttccagctctctcgcaccagaacaggcaagtatactgactactatatttggcacgattgcacccacgaaaatgggaagactatcccgccaaataattggctatccgtctacgggaatagtagctggcacttcgatgaagtgcggaatcagtgttattttcatcagtttatgaaagaacaacccgacctgaatttccgcaatccagacgtgcaggaagaaatcaaagagatcctccggttctggctgacaaaaggagtcgacggtttttctttagacgccgtgaagtttctgttggaagcaaagcacctccgtgatgaaatccaagtcaataagactcagatccccgataccgtcacccagtactcagagttgtaccacgattttaccactacacaagtggggatgcacgacatcgtgcgcagttttcggcagactatggaccagtactccaccgagcctggcagataccgctttatgggcactgaggcgtatgcagagtctatcgatcgaacagtaatgtattacggtctccctttcatccaggaggcagatttccccttcaacaattacctcagtatgctcgacacagtttcgggcaacagcgtgtacgaggtgattacatcctggatggaaaacatgcctgagggcaagtggcccaactggatgatcggcggtcccgatagcagcagactgacctcgaggctgggcaaccagtatgtgaacgttatgaacatgctcctcttcactctgcccgggactccaatcacctactatggagaagaaatcggaatggggaacatcgttgctgctaatctgaatgaatcttatgatatcaataccctgcgctctaaatcccccatgcagtgggacaacagctccaacgcagggttttcagaagcctcaaatacatggcttccgacaaactctgactaccacaccgtcaacgtagacgtgcaaaaaacgcagccacgtagcgctctgaaactgtaccaggacctgagtctgctgcacgcgaatgaactcctgctgaatcgaggctggttctgtcatcttaggaacgattcccactacgtggtttacaccagagagctggatgggattgaccggatatttatagtcgtgctgaatttcggggagtccacactgttgaatctacacaacatgatttccgggctccctgccaagatgaggatacgcttgagcaccaattcagcagacaaagggagtaaggtagacacctcaggaatattcctggataagggcgaaggtctaattttcgagcataatactaaaaatctgctccaccgacagaccgcatttcgcgacagatgcttcgtgtccaacagagcatgctacagctccgtcctaaatatcttgtacacaagctgttag

SEQ ID NO: 206010 - DNA, 1656 bp, synthetic construct
  misc_feature 1..1656: note = Description of Artificial Sequence: Synthetic coding sequence
  source 1..1656: mol_type = other DNA
atggccgaggacaagagcaagcgggacagcatcgagatgagcatgaagggatgccagaccaataatggatttgtgcacaacgaggacattctggaacaaacaccagaccccggttccagcacggataacctgaagcactctactcgggggatccttggatcccaggagccggattttaaaggtgtccagccatatgcaggcatgcctaaagaagtgctctttcagttcagcggccaagcgagatacagaatacctcgcgagatcctgttctggctgacagtcgcgagcgtgctcgtgctgatcgccgcgactatcgccatcattgccctaagtcctaagtgcttagactggtggcaggaaggccctatgtatcagatatatccacgatcatttaaggactccaacaaagatggcaacggggacctgaaggggattcaggacaagctggactatatcactgcactcaacatcaaaacagtgtggataacaagcttttacaagtcgtccttaaaggacttccggtacggcgtcgaggatttcagagaggtagatcctatatttgggactatggaggatttcgagaacctggtggctgccatccacgataagggtctcaaacttatcatcgatttcattcccaatcatacaagtgataaacacatctggtttcaactctcccgcactcgcacagggaaatacacagattattacatttggcatgactgtacccatgagaacgggaaaacgatccccccaaataattggctcagcgtgtacgggaactcctcctggcattttgacgaggtgagaaatcaatgttacttccatcaattcatgaaggagcaaccagacctgaactttagaaaccccgacgtccaggaagagataaaggagatcttgaggttttggctgactaagggagtggacgggttcagtctggatgccgtgaaatttctgttagaggcgaagcacttaagagacgagatccaggtcaacaaaacacaaataccagatacagtcacccagtacagcgagttgtaccacgatttcactaccacacaggtcggaatgcatgatatagtgcggtcctttcggcaaaccatggaccagtattctacagagcctgggcggtatcgtttcatgggaactgaagcctacgccgaatcaatcgaccggactgtgatgtattacggcctgcccttcatccaggaggccgactttccctttaacaattacctgtctatgctggatacagtgtcaggcaactctgtttacgaggtgatcacctcatggatggaaaacatgcccgaggggaaatggcccaactggatgatcgggggaccagattcttcacggctcacctctagattgggcaatcagtatgtgaacgtgatgaacatgctattgttcaccctcccaggcacaccgattacttactatggtgaagaaatcgggatgggaaacatcgttgccgcgaatctcaacgagtcgtacgatataaacactcttaggagcaagtcccccatgcagtgggacaatagctccaatgccggcttcagcgaagctagcaatacctggctgcctaccaacagcgattaccatacagtcaacgtggacgtgctgctcagacacccgtgctccagcgccgtagcctag

SEQ ID NO: 206011 - DNA, 1524 bp, synthetic construct
  misc_feature 1..1524: note = Description of Artificial Sequence: Synthetic coding sequence
  source 1..1524: mol_type = other DNA
atgggctgctggggccggaaccggggccggctgctgtgcatgctggccctgacctttatgttcatggtgttggaagtcgtcgtgtctcgggtaactagcagtctagctatgttgtctgactccttccatatgctttctgacgtccttgctctggttgtagcactggtggctgagaggttcgcaagacgcacacatgccacacaaaagaacacatttgggtggatacgggccgaagtaatgggtgcgctcgtgaatgctatctttttgacaggcctgtgcttcgcaattttactggaagcaatcgaaaggtttatcgagccacacgaaatgcagcaacctctggttgtccttggggtgggcgtcgcggggctgttagtgaacgtgttgggattatgtctttttcaccaccattccggcttcagccaggacagtgggcacggtcatagccatggcggccatgggcatggacacggtctgcctaaggggccccgtgtgaaatcgacgcggccgggctcctcggatattaatgtggctcccggtgagcaaggcccggatcaagaagaaacaaacactctggttgctaatacatcaaatagcaatggactgaaattagacccggcggaccctgaaaaccctcgttctggagacacggtggaagtgcaagtaaacggcaacttggtgagagaacctgaccacatggaactggaagaggatcgcgctgggcagctgaacatgagaggagttttcctccacgtgctcggggacgccctcggcagcgttatcgtggtggttaatgctctggtgttttactttagctggaaaggctgctctgaaggggacttttgcgtgaacccttgctttcccgacccctgcaaagcattcgttgaaatcatcaacagcacacatgcaagcgtgtacgaggcaggcccatgctgggtcctctacctcgaccctaccttatgcgttgtgatggtgtgcattttgttgtatacaacctacccactattgaaagagagtgccttgatcttgttgcaaacagtgcccaagcagatcgacataaggaacttaattaaggaacttcggaacgttgaaggagtagaagaagttcatgaactgcacgtgtggcagcttgcgggtagcaggatcatcgccacagctcatataaagtgcgaagatccaacaagttatatggaggtcgctaagaccatcaaagatgtttttcacaaccatgggattcacgctacaaccattcagccagagttcgcctcagttggctcaaaaagctccgtggtcccgtgcgaacttgcctgtcgaacccaatgtgccctgaagcagtgctgcggcacactgccgcaggcgccaagcggcaaggacgcagaaaaaacgccggcagtgtccatcagctgccttgagctgtctaacaacctggaaaaaaaacccaggcggactaaggccgaaaacattcctgccgttgttatcgaaattaaaaatatgcctaataagcaacctgagtcctctctctag

SEQ ID NO: 206012 - DNA, 1119 bp, synthetic construct
  misc_feature 1..1119: note = Description of Artificial Sequence: Synthetic coding sequence
  source 1..1119: mol_type = other DNA
atggaggccaaggagaagcagcacctgctggacgcccggcccgccattaggtcatacaccgggtctctgtggcaggagggggctgggtggatccccttgccgcgaccaggactggacctgcaggctatagaactcgccgcgcaatcaaatcatcattgtcatgcccagaagggccctgactctcattgtgatcccaagaaaggcaaggctcaaaggcagctgtacgttgcttcagcaatttgcctccttttcatgataggcgaggttgtcggcggctaccttgcacactctcttgccgtcatgactgatgcagcccacctacttacagatttcgcgtcaatgctgattagtctgtttagcctgtggatgtcttccagaccggctacgaagaccatgaacttcggatggcagagagctgagattctgggagcattagtcagcgtgctaagcatttgggttgtgacaggtgttctggtctatttagctgtcgaacgcttgatctccggagactatgaaatcgatggtggtactatgcttattacgtcaggttgtgccgtggccgtgaacatcataatggggctcacgttgcatcaatcaggccatggacattcccatggcactacaaatcagcaggaagaaaacccatcagttagagctgcctttatccacgtaatcggggacttcatgcagtctatgggggtactggtggccgcctacatactatatttcaagcctgagtataaatacgtggatcccatctgcactttcgtgttcagtatccttgtactggggaccactttgaccatcctaagggatgtgattttggttttgatggaaggcacccccaagggggtggacttcaccgctgtccgtgaccttttgctttctgtcgagggcgtcgaggctctgcactccttgcacatatgggcgctgaccgttgcccaacccgtactgtctgttcatatcgccattgcccaaaataccgacgctcaagccgtgttgaaaaccgcgagttcacgcttgcagggaaaatttcactttcatacagttactattcagatcgaggactacagcgaggacatgaaagactgccaggcatgccaggggcccagtgactag

SEQ ID NO: 206013 - DNA, 972 bp, synthetic construct
  misc_feature 1..972: note = Description of Artificial Sequence: Synthetic coding sequence
  source 1..972: mol_type = other DNA
atggaggccaaggagaagcagcacctgctggacgcccggcccgccatacgctcatacaccggcagtctttggcaggagggcgctggatggatcccactacccaggcctggtcttgacctgcaggctattgaattggccgctcagagcaatcatcactgtcacgcccagaaggggcctgactctcattgcgatcctaaaaagggaaaggcccagagacaattatatgtggccagcgcaatttgtctgctgtttatgataggcgaggttgtggaaattttaggggcccttgtctctgtcctgagcatctgggttgtcaccggagtgctggtgtatttagccgtggagaggctgattagcggcgactatgagatcgacggcggcactatgcttattacaagcgggtgcgctgtggccgtgaatatcattatgggtctgaccctccaccagtcaggtcatggtcattcacacggaactactaaccaacaggaggaaaatccatctgttcgagcggcatttatccatgtaattggagacttcatgcaaagcatgggggtgttggtcgccgcttatatcctatacttcaaacctgaatacaaatatgtggatccgatctgtacatttgtgttcagcatcctggtgctcggaaccacactaacaatccttcgggatgtcatcctcgtgctgatggaaggtacccccaagggagtcgactttaccgcagtgagggatctgctgctctcggtagaaggtgtggaagcactgcatagtctgcatatctgggccctcacagttgcacaacccgttctgtccgtgcacatagcaatcgctcaaaatactgatgcacaggccgtcttaaagacagccagttccaggctgcaggggaaattccacttccatactgtaaccattcagattgaagattacagcgaagacatgaaggattgccaggcttgtcagggtccatccgactag

SEQ ID NO: 206014 - DNA, 345 bp, synthetic construct
  misc_feature 1..345: note = Description of Artificial Sequence: Synthetic coding sequence
  source 1..345: mol_type = other DNA
atgggcccccggcggcggagccggaagcccgaggccccccggcggagaagcccaagtcccaccccaacacctggtccgtccaggcgtggtccctccctcggagctagttcccatcagcattcaagacgcaggcagggctggctgaaggagatcaggaagctacaaaagtccacccacctcctgataagaaagctccccttttctcgcctggccgcggaggcctttcttgtgcacttgttcgaagacgcctacctcctgaccctgcacgcagggcgcgtgactctttttcctaaggatgtgcagctggcgcggcggatcagaggtttagaagaaggtctcggctag

SEQ ID NO: 206015 - DNA, 300 bp, synthetic construct
  misc_feature 1..300: note = Description of Artificial Sequence: Synthetic coding sequence
  source 1..300: mol_type = other DNA
atgcccttccaccactgccaccgggaccccctgcccccccccggcttgacccccgagcggctacatgctagaagacagctgtatgcggcctgtgccgtatgtttcgtgtttatggccggagaggtcgtgggagggtatttggcccactctctggcgatcatgactgacgcagcacacttgctcgccgacgtggggagcatgatgggatccctattctctctttggctctctacacgtcccgctactagaaccatgacttttggctggcacagatccgagacactcggggctctagcgtag

SEQ ID NO: 206016 - DNA, 723 bp, synthetic construct
  misc_feature 1..723: note = Description of Artificial Sequence: Synthetic coding sequence
  source 1..723: mol_type = other DNA
atgcccttccaccactgccaccgggaccccctgcccccccccggcctaacaccggagcgactccacgccagaagacagctgtatgccgcatgtgccgtgtgctttgtattcatggcaggcgaggtggtcggtgggtacctcgctcacagcctagcaattatgactgatgcagcacacctcttggcagacgtaggtagcatgatgggatctctgtttagtctgtggctgtctacacgcccagccacacggacaatgacgttcggttggcacaggagtgaaaccttgggagcgctggccagcgtcgttagcctttggatggtcaccggcattctcttgtacctggcctttgtgagactgctgcacagcgactaccacattgagggaggggcaatgctgctcaccgcctcgatcgccgtgtgtgctaatctgctcatggcattcgtgctgcatcaagcaggaccgccgcattcccacgggagtaggggggccgagtatgccccccttgaggagggacccgaagagccattgcctctgggtaacacgagcgtgagggccgcttttgtacacgtgttgggcgacctcctgcagtctttcggggtactcgccgccagtattctcatttatttcaagccccagtacaaggctgcggacccaatcagcaccttccttttttcgatttgcgccctgggctcgacggcgcccacacttagagacgtactctag

SEQ ID NO: 206017 - DNA, 1152 bp, synthetic construct
  misc_feature 1..1152: note = Description of Artificial Sequence: Synthetic coding sequence
  source 1..1152: mol_type = other DNA
atgcgggtggccgccggcgcccggggcgagaacatcgagcacctgaaactgcgcctggaagcacgtccaccgaccttgctgctattcactgaaccaagcgagcccctccccgaggaatccaagcccgtcgagatgccattccaccactgccaccgagatcccctgcctccacctgggctgactccagagaggcttcacgctcggcggcagctgtatgccgcttgcgctgtctgttttgtgttcatggctggggaggtagttggcgggtacttagctcactctctggccataatgactgatgccgcacatctacttgccgacgtgggcagtatgatgggctctctgttctccctgtggctgagcacccgcccagcaacccggactatgacctttggctggcatcgctccgagactttaggcgcactggccagcgtagtgtctctgtggatggtcacagggatcctgctgtacctagccttcgtgcgcctgctgcacagtgactaccatatagaagggggcgccatgctgttgaccgcgagcattgcagtttgcgctaatctgctcatggcctttgtgctgcaccaagctggacctccacactcacatggcagccgaggggccgaatacgcccccctggaggagggacccgaggaacccctgccactggggaacacatctgtaagggcagcgtttgtgcatgttctgggcgatttacttcaatcattcggagtgctcgcggcatccatcctgatctactttaagccacagtataaagctgctgatccaatatctaccttcctgttttccatctgcgccctcggctcgacggcccccacactgcgcgacgtattgaggatcctaatggagggcacaccccggaatgttgggtttgaaccggtccgggatacccttttatccgtgcctggagtgagagcaacacatgaactgcatctatgggccttgacccttacctaccacgtggctagtgcgcatcttgccatcgactccactgcagaccccgaagccgtgttggccgaggcttcttctcggctgtacagccgttttggcttcagctcttgcacactccaggtggagcagtaccaacctgagatggcccagtgtctcagatgtcaggaacccccacaggcgtag

SEQ ID NO: 206018 - DNA, 336 bp, synthetic construct
  misc_feature 1..336: note = Description of Artificial Sequence: Synthetic coding sequence
  source 1..336: mol_type = other DNA
atgcccttccaccactgccaccgggaccccctgcccccccccggcctgacaccagagcgtttgcacgctaggagacaattgtacgccgcctgtgcagtttgttttgtttttatggctggtgaggtggtaggcggttatctcgcacattctctcgccatcatgaccgatgccgcccacttgttggcagacgtgggtagcatgatgggctctttgttttctctgtggctgtccactcgcccagctacgcggaccatgacttttggatggcaccggagtgaaacactcggagccctggcctctgtggtgagtctgtggatggtcactggcatcctgtag

SEQ ID NO: 206019 - DNA, 1290 bp, synthetic construct
  misc_feature 1..1290: note = Description of Artificial Sequence: Synthetic coding sequence
  source 1..1290: mol_type = other DNA
atggccggcagcggcgcctggaagcggctgaagagcatgctgcggaaagacgacgctccattgttcctcaacgatactagcgccttcgactttagcgacgaagcaggggacgaggggctcagtcgtttcaataaattaagagtggtggtcgctgatgatggttcagaggctccagagcgccccgtcaatggtgcacatcctactctgcaagccgatgacgattcgctgctggatcaggacctccctttgacaaacagccagctaagcctgaaggtggattcatgcgacaattgtagtaagcagcgagagatcttgaagcagaggaaagtaaaagcgcgcctaaccatcgctgctgttctgtacctgctgtttatgataggcgagttggtgggagggtatattgcaaactctcttgcgatcatgaccgatgcactccacatgctgacagatctctccgcaataatattgactctgctggcactttggctgtcatctaagtctccaacaaagaggtttacgtttggcttccaccgcctggaggtgctcagcgcgatgatttcagtcctactcgtttatattttaatgggcttcttattatatgaggctgttcaacggacaatccacatgaactacgagattaacggtgacatcatgctcatcacagcggccgtaggcgttgcagtcaacgtgatcatggggttcctcctgaatcagagcggccataggcacagccattctcatagcctcccttccaatagtcccactaggggctctggctgcgaaagaaaccatgggcaggatagcttggctgtcagggccgcctttgttcatgcccttggcgacctcgtgcaatcagtcggagtcctaatcgcggcctatatcatcaggttcaagcctgagtacaaaattgcagaccctatctgcacatacgttttcagtcttctagtcgcatttacaacattccggattatttgggacaccgtggttatcatcctggagggcgttcctagtcatctgaatgttgactatatcaaggaagcattgatgaagatcgaggacgtgtattctgtcgaagatcttaatatctggagtctcacttccggcaaatccacagccatagtccacattcaactgataccaggtagctcttcaaaatgggaagaagtacagtcaaaggctaaccacctgctgcttaatactttcggaatgtatcggtgcacaatccagctgcagagctaccgtcaagaggtagacagaacctgtgctaactgtcagtcctcaagtccctag

SEQ ID NO: 206020 - DNA, 357 bp, synthetic construct
  misc_feature 1..357: note = Description of Artificial Sequence: Synthetic coding sequence
  source 1..357: mol_type = other DNA
atggaggagaagtacggcggcgacgtgctggccggccccggcggcggcgggggcctgggccccgtcgacgtgccatctgcccggctgactaaatatatcgttttgttgtgttttacaaaatttctcaaggcggttggcctctttgaatcttacgacctgctgaaagccgtgcatatcgtgcagttcatttttattctgaagcttggaaccgcattctttatggtacttttccagaagccatttagtagtggaaaaactattacgaagcaccagataattggaagtctgaagatccctggcagaaaggaattcaaggataaaaagctgaatgacccacgcaagttagtggggaactag

SEQ ID NO: 206021 - DNA, 2298 bp, synthetic construct
  misc_feature 1..2298: note = Description of Artificial Sequence: Synthetic coding sequence
  source 1..2298: mol_type = other DNA
atggaggagaagtacggcggcgacgtgctggccggccccggcggcggagggggtctgggccccgtggacgtgccttctgcgcgcctgaccaagtacatcgtgttactgtgttttaccaagtttctgaaagcagtcggcttgttcgagtcctacgatctgctcaaagctgtgcacatcgtacagtttatattcatcctaaagctgggcaccgcatttttcatggttctgttccagaaacctttctcctccggcaagactataactaaacaccagtggattaaaatctttaagcacgctgtggcgggttgtataatctcacttctctggtttttcgggctcaccttgtgtggccctctgaggaccttgctgttattcgagcatagcgacatcgtggtgatcagcctgctgtcagtgctgttcaccagttccgggggcggacctgccaaaacccggggggccgctttcttcatcattgccgtgatttgtttgctcctgttcgataacgacgatctcatggccaagatggccgaacatcccgaaggacaccacgactctgccttgacccatatgctgtatactgccatagcttttcttggggtcgcagatcataaaggtggggtgctgctcttagtgctagccctgtgctgtaaagtaggcttccatacggcatcccgcaagcttagcgtagacgtcggcggggccaagaggctccaggccttgtctcacttggtaagcgttttgcttctgtgtccatgggtcattgtcctcagcgttacaacggagtctaaagtggaaagttggtttagcctaatcatgccctttgccacagtgatattctttgtgatgattctcgatttttacgttgattccatctgcagcgttaagatggaggtgtcgaaatgtgcacgatacggtagtttccctatttttatctccgctctgcttttcggcaacttttggactcatccaataactgaccagctgcgggcgatgaacaaagctgcacaccaggagtctactgagcacgtcctcagcggaggggtggtagtgtcggctatcttcttcattctgtcagccaacattctctctagtcccagcaaaagaggccagaagggtaccttgattggctactcgccagaaggcactcctttgtacaactttatgggcgatgccttccagcattcgagccagtccatacccaggttcatcaaggagtctcttaaacagatattagaggaatcagactctcggcagattttctatttcctgtgtctaaacctcctttttactttcgtagagctgttctatggcgtgctcaccaatagcctgggactgatcagtgatgggttccatatgctctttgattgctccgcgttggtgatgggactttttgcagccctcatgagccggtggaaggccactagaattttctcttatgggtacggcagaattgagattcttagcgggtttatcaacggactgtttctgatagtcattgccttcttcgtctttatggagtctgttgcgagactgattgaccctccagagttggacacccacatgctgacccccgtgtcagtcggcggtctaatcgtcaatctcatcggcatatgtgcattctcccatgcacactcccatgcccatggcgcctcacagggttcatgtcattctagcgaccatagccactcccatcacatgcacggccatagtgaccacggacacgggcattctcacgggtccgccggaggtggcatgaacgctaacatgaggggcgtgttcctgcatgtgctggccgacactctcgggagcatcggggtcattgtgagtactgtgttgatcgagcaatttgggtggttcatcgctgatccactatgcagcctgttcatagccatcctgatctttctgtctgtagtgccactgatcaaggacgcctgccaggttttgttgctgcgtctgccccccgaatacgaaaaagagctgcatattgctttagaaaagatccagaagatcgaaggattaatttcatacagggatccacatttttggagacactctgcctcaatagtggccggcaccatacacatccaagtgactagcgatgtactagagcagagaattgtgcagcaggtcacaggaatccttaaagatgccggggtgaacaatctcaccatccaagtggagaaagaagcctactttcagcacatgagtggactgtccaccgggtttcacgatgtcctggccatgaccaaacagatggaaagcatgaagtattgcaaagacggcacttacattatgtag

SEQ ID NO: 206022 - DNA, 1083 bp, synthetic construct
  misc_feature 1..1083: note = Description of Artificial Sequence: Synthetic coding sequence
  source 1..1083: mol_type = other DNA
atgggcgacgccttccagcacagcagccagagcatcccccggttcattaaggagagcctaaaacagatcctcgaggaatccgattctagacagattttttattttctgtgcttaaatctgctgtttacattcgttgagctgttctatggcgtgctgaccaactctctggggctgattagtgatggctttcatatgttattcgattgcagcgctctcgtcatgggcctcttcgctgctctaatgagtagatggaaggccacgcgaattttttcttacggttacggccggatagagattttgtccggtttcattaacggtttgtttctgatcgtcattgcctttttcgtgttcatggagagcgtcgcaaggctgattgacccacctgagctggatacacacatgctcaccccttgtcattcgcatgcccacggagcatctcagggaagctgccactcgtctgatcatagccactcacaccatatgcacggtcatagcgatcacggacacggtcacagccatggttctgccggaggggggatgaatgccaatatgcgaggcgtgttccttcacgtgctcgccgatactttgggatcaatcggggtcattgtgtctactgtgctgatcgaacagtttggctggttcattgccgaccccctgtgctctctctttattgccattctcatatttctgagcgttgttccactgattaaagatgcctgtcaggtgctactgttacgtctcccccccgagtatgagaaagagctgcacatcgccctggagaagatccagaaaattgaagggcttatttcgtaccgagatccccatttctggcggcacagcgcctctatcgtcgcaggcacaattcatatccaagtgacgtccgatgtcctagaacagcgcatagtccagcaagtgaccggcatcctcaaagacgcgggcgtgaataacctaaccattcaggtagaaaaagaggcctattttcaacacatgagtggtctttctacgggatttcacgatgtgctcgctatgaccaagcagatggaaagtatgaagtattgcaaggatgggacatacataatgtag

SEQ ID NO: 206023 - DNA, 1386 bp, synthetic construct
  misc_feature 1..1386: note = Description of Artificial Sequence: Synthetic coding sequence
  source 1..1386: mol_type = other DNA
atgggcaccatccacctgttccggaagccccagcggagcttcttcggaaaattgctgcgggagttccgcctggtggctgccgacagacgctcttggaagattctgctgtttggggtaattaaccttatttgcacgggttttttgttgatgtggtgctcctctacgaatagcatcgctctgactgcgtatacctacctgaccattttcgacctcttttctctgatgacttgcttgatctcatactgggtgactcttcgaaagcccagccccgtgtattcctttgggtttgagaggctcgaggtcctcgcagtattcgcctccactgttttagcacagctcggggccctgtttattctgaaggagtctgccgagcggtttttggagcagcccgagatccacacaggacgcctgttagtcgggacgtttgtcgcactgtgcttcaacctcttcaccatgctaagcataagaaacaaaccatttgcctacgtgtctgaagccgcgtcaactagctggctccaggagcacgtggcagatctgtcccgatccctctgcggaattatccctggattatcttccatttttctcccccgaatgaatcccttcgtgcttatcgatctggccggtgcattcgctctctgcatcacctacatgcttatcgagataaacaattacttcgcggtggatacagcaagcgccattgctatcgccctgatgacatttgggaccatgtatcccatgagtgtatatagtggcaaagtgctgttacagaccacaccccctcatgttatcggccagctggacaaactgatacgtgaggtcagcaccctcgacggagttctcgaggtaagaaatgaacacttttggactttgggattcgggagcttagcgggctcggtgcacgtccgcatcagaagagacgctaatgagcaaatggttcttgcacacgtgacaaaccgcctttacaccttagtgtcaacactcactgtccaaattttcaaagatgactggatccgccctgccctgttaagcgggccagtggctgctaatgtgcttaacttcagtgaccatcacgtgattccgatgcctctgctcaaaggcacagacgacttgaaccccgttacttctacgcctgcaaaaccgtccagtcctccaccagagttctcctttaatacgccaggcaaaaacgtaaatcccgttatcttgttgaatactcagacacgcccctacggattcgggctgaatcatgggcacaccccttattccagcatgcttaaccaggggctgggggtgcccggtattggagccacgcagggactcagaactggcttcactaatattccttctcgctatggaacaaataatcggattggacagcctagaccctag

SEQ ID NO: 206024 - DNA, 795 bp, synthetic construct
  misc_feature 1..795: note = Description of Artificial Sequence: Synthetic coding sequence
  source 1..795: mol_type = other DNA
atgaaccccttcgtgctgatcgacctggccggcgccttcgccctgtgcatcacatacatgcttatagagatcaataactatttcgccgtcgacacagctagcgctatagccatcgctctaatgacatttgggactatgtatcctatgtcagtgtactctgggaaggttcttcttcagaccactcccccccatgtgatcggacagttggacaagctaattcgcgaggtgagtaccctggacggggtcctggaagtgcgaaacgaacacttctggaccctgggattcggcagtcttgccggaagcgtgcatgtcaggatacgccgagatgccaacgaacagatggtgctggcgcatgtgaccaataggctttacaccctcgtttcgacactaacagttcagatctttaaggacgactggatacggcctgctctgctctccgggcctgtcgcggcaaatgtgctaaatttttcagaccatcatgttattccgatgcccttactgaaaggaactgacgacctcaaccctgtcacctctacacccgccaaaccatcaagcccgcctccagagttctcgttcaacacccccgggaagaacgttaatcctgttatcttgctgaatacccaaaccagaccttatggctttggcctcaaccatgggcacaccccttactccagcatgcttaaccagggcctgggcgtgcccggcatcggtgctactcagggacttcggactggattcacgaatattccttccaggtacggtactaataacagaatcggccagccccgaccttag

SEQ ID NO: 206025 - DNA, 1506 bp, synthetic construct
  misc_feature 1..1506: note = Description of Artificial Sequence: Synthetic coding sequence
  source 1..1506: mol_type = other DNA
atgggcaccatccacctgttccggaagccccagcggagcttcttcggcaaactgctgcgtgagttcaggctcgtggcggccgatcggcgcagctggaagatcctgctgttcggagtgattaatctaatttgcaccggctttctgctaatgtggtgcagctctaccaattccattgctctgactgcatacacctacctcactatattcgacctgttccgcgacggcgtgtccccattctggctgggatggagtcagactccagacttaaagtggagcacccacctgggactgcccaagtgctgggacaataggcgggaactcccctgtctgagcaactccttgatgacctgcttgatctcctactgggtgaccttaaggaaaccatctcctgtttactcatttggatttgagcggctcgaggtgctagctgtgtttgctagcacagtgctggcccagctgggggctctgtttatattaaaggagagcgcggaacggttcctggagcagcctgaaattcataccgggcggttactggtgggtacttttgtcgccctctgcttcaacctgtttacaatgctgtctatcaggaacaaaccatttgcgtatgtgagcgaagccgcaagtacgtcttggcttcaggaacacgtcgcagacctttctagaagcctgtgtggtatcatccctgggctgtcatcgatatttctgccgagaatgaacccatttgtgctgatcgaccttgccggagcctttgccttatgtataacatacatgctgatagagattaataactacttcgccgttgacactgccagcgccatagccatcgctctgatgacctttggcactatgtaccccatgtcagtgtattctgggaaggttctcttgcaaacaacccctccacatgtcattggccagctggacaaattaatccgagaggtgtccacattggacggcgtactggaggtcagaaatgaacacttctggactctggggttcggctccctcgctgggtctgtgcatgtgcgaatccgacgcgacgctaacgagcagatggtcctggcccacgttacgaaccgcctgtatacactcgttagcaccctgactgtccagatctttaaagacgactggatccgccctgctttgctgagcggcccagtggccgccaatgttttgaacttctccgaccatcacgtaatcccaatgcctttattaaagggcaccgacgatctgaatcccgtgaccagcacccctgcaaaaccatcctcccctcctcctgaattcagtttcaacacccctggcaagaacgtgaatcctgtcatacttctgaacactcagacgaggccttacgggttcgggctcaatcacggccacacaccgtacagtagcatgctcaaccaagggttgggcgtgcccggcatcggggcgacacagggcttgagaacggggtttactaacatcccgagccgatatggaactaacaaccgaataggacagccgcggccctag

SEQ ID NO: 206026 - DNA, 1164 bp, synthetic construct
  misc_feature 1..1164: note = Description of Artificial Sequence: Synthetic coding sequence
  source 1..1164: mol_type = other DNA
atgacctgcctgatcagctactgggtgaccctgcggaagcccagccccgtgtactcattcggattcgagaggctggaagttctggctgtgtttgcaagcactgtgctcgcccagctgggcgcactgttcatcctgaaggagtctgcggaacgcttcttagagcaaccagaaatccataccggacgcctactggtgggtactttcgtggctttatgcttcaacctgtttacaatgctttccattcgcaataagccgtttgcatacgtcagtgaggctgcttctacgagttggctgcaggagcatgtcgctgatctgagtcgcagtctgtgtgggattatacctggactttctagcattttcctgccccgtatgaatcctttcgtactgatcgacctggcaggtgcattcgccctatgcatcacctacatgttgattgagatcaacaactactttgcagttgacaccgctagcgccatcgccattgccctcatgacattcgggactatgtacccaatgtcggtttacagcgggaaagtcttgctgcagacgacaccaccccacgtgattggccagttggacaagcttatccgggaggttagcacactggacggcgttctcgaagttcgaaatgaacacttttggacactgggctttgggtcgctggcaggctcagtacacgttaggattcgccgcgacgccaacgaacagatggtactggctcacgtgacgaatcgcctgtacacactggtcagtaccttgacagtacagatattcaaggacgactggattagacctgccttgctcagtggacctgtggcagccaacgtgttgaatttcagcgaccaccatgtgatccccatgcctctgctgaagggcacagatgatctgaatcccgtaaccagcaccccagcgaaaccatcatctcccccccctgaattttcattcaatacccccgggaagaatgtgaatccagtgattttgctcaacacgcagacacgaccgtacggcttcggactaaaccacggccatactccatacagttctatgctcaatcagggtcttggagtgcccggcatcggcgctacgcagggtctgaggacgggttttaccaatatcccaagtaggtatggcaccaacaacagaatcggtcagccaaggccctag

SEQ ID NO: 206027 - DNA, 1317 bp, synthetic construct
  misc_feature 1..1317: note = Description of Artificial Sequence: Synthetic coding sequence
  source 1..1317: mol_type = other DNA
atgggcaccatccacctgttccggaagccccagcggagcttcttcggtaaattactccgagaattcaggctagttgctgccgacaggagatcttggaaaatcttgttgtttggcgtcattaacctgatttgtaccgggttcctgctgatgtggtgctctagcaccaattcaatcgccttgaccgcctacacctacctgacgatcttcgatctgttctctctgatgacatgtctcatctcctactgggtgactctccgcaaaccttctccggtgtatagttttggcttcgagaggttggaagtcctggctgtgtttgctagtactgtgcttgcccagctgggtgcccttttcatcctaaaagagtcagcagagcgtttcctcgagcagcctgagatccacacaggaagactcctagtaggaacttttgtggctttgtgtttcaacctgttcacaatgctgtcaatccgaaacaaacccttcgcctatgtatccgaggctgctagcacaagctggttacaggagcacgtcgcggacttgtccagaagtctttgtgggatcatcccagggctgtctagcatttttctccctaggatgaatcctttcgtcttgattgacttggctggggcattcgcactatgcattacttacatgctgatagagatcaacaattattttgccgtggatacggccagcgcaatcgcgatcgctcttatgacatttggaactatgtaccccatgtctgtgtattccggaaaagttcttcttcaaaccacccccccccacgtgattgggcagttggacaagctcatcagagaggcggggtcagtgcatgtgaggattcgcagagacgctaatgagcaaatggtcctggcccacgtcacaaaccggctgtacacactggtcagtaccctaaccgttcagattttcaaggacgactggatcaggcccgcactgttgtctgggcctgtggctgctaatgtgttaaatttctccgaccaccatgtgattccgatgccactactgaagggcaccgatgatcttaaccccgtgactagcacacctgctaagcctagctccccacctcccgagttttccttcaacacaccgggcaaaaacgtgaacccggtgatcctgctgaatacccagacccggccttatggctttggcttaaaccatggacatactccttattcatccatgctgaaccagggactcggcgttccaggtattggggccacccagggactgcgcacaggctttacaaatataccgagccggtatggcaccaacaaccggattggtcagcctaggccctag

SEQ ID NO: 206028 - DNA, 1299 bp, synthetic construct
  misc_feature 1..1299: note = Description of Artificial Sequence: Synthetic coding sequence
  source 1..1299: mol_type = other DNA
atgagctggaagatcctgctgttcggcgtgatcaacctgatctgcacaggattcctccttatgtggtgctcttccaccaattcaatcgcccttaccgcctacacctacctcactatctttgacctgttcagccttatgacgtgcctgataagctactgggtgactctcaggaaaccaagcccagtatattctttcggttttgaaaggctcgaggtacttgcagtgtttgcaagtacagtgctggctcagctgggggctctgttcatattgaaagagagcgcagagagattcctggaacaaccagaaatccataccggacgtctcctggtcgggaccttcgtggctctctgttttaatctcttcacgatgctgtcaatccgcaataaaccctttgcctatgtgtccgaagctgccagcacctcctggcttcaggagcacgttgccgatctctccagatctctttgcggcatcatccctgggctatcctcgattttcttgccacggatgaatccattcgtgcttatagatttggccggcgccttcgccctttgtataacatatatgctgatcgaaataaataactatttcgccgttgacaccgcctctgcgatagctatcgccctgatgacattcggcactatgtatcctatgtcagtctattccggaaaagtcctcttgcaaaccaccccacctcacgttataggccagctagataaactcataagagaagtttctacacttgacggcgtgttggaagtcaggaacgaacacttttggacactggggtttggtagtctcgctggttctgtacacgttcggatcagacgtgacgcgaacgagcaaatggtgctagcacatgttacaaaccgtctgtacaccctggtctccacacttactgtacaaatctttaaggacgactggattagacctgccttgctatccggaccagtggccgccaacgtactgaacttttcagatcaccatgtgatccctatgccattactcaagggaaccgatgatcttaatccggtaacctccacccccgctaagccatcatcccctccccctgagttttctttcaacacgccaggcaagaacgtcaaccccgtgattctcttgaatacccaaacaagaccttacggctttggtctgaaccatggccacactccatactcctccatgctgaaccaggggctgggagtccctggaattggggctacccagggattgcgcactggcttcactaacatacctagccggtatggcaccaataacagaattggccaaccacggccttag

SEQ ID NO: 206029 - DNA, 1131 bp, synthetic construct
  misc_feature 1..1131: note = Description of Artificial Sequence: Synthetic coding sequence
  source 1..1131: mol_type = other DNA
atgctgcccctgagcatcaaggacgacgagtacaagccccccaagttcaatctcttcggaaaaatctcagggtggtttaggagcattttgtctgacaagacatctagaaatctgtttttctttctgtgcctcaacctctcctttgcatttgtagaactcctgtacggtatatggtctaactgtctcggactaatatccgatagtttccatatgtttttcgattccactgccattttggctggtcttgctgccagcgtgatctccaagtggagagataacgacgctttctcctacgggtacgtaagggcggaggtcctcgccggattcgtcaacgggctgttcctgatctttaccgcattcttcatcttctccgaaggtgttgaaagagctctggcaccacccgacgtgcatcacgaacgcctcctgctggttagtattctaggatttgtcgttaatcttatcgggatttttgtgttcaaacacggaggtcatggccactcccacggctccggacatggacattctcacagcctttttaatggcgctttggatcaggctcacgggcatgtggatcattgtcactcacacgaggtgaagcacggtgccgctcatagtcacgatcacgctcatggacatggccacttccacagccatgacggacccagcttgaaggagaccacgggcccttccagacaaattttgcaaggcgtttttttgcacattctggccgacaccttggggagcatcggagtgatcgcatcagctataatgatgcagaactttggactcatgatagctgaccccatttgctcaattcttatcgcgattcttattgtggtttccgttattcccttactgcgcgaatctgttggtatcctcatgcagaggactcctcctctgctcgagaattccctgccccaatgctatcagcgcgtgcagcagttgcagggagtgtatagcctccaagaacaacacttctggaccttgtgcagcgatgtatatgtgggcaccctgaagttaattgtcgcccccgatgcagacgcacgctggattctgagccagacccataatattttcacacaagccggcgtcagacaactgtacgtgcagatagatttcgccgcgatgtag

SEQ ID NO: 206030 - DNA, 273 bp, synthetic construct
  misc_feature 1..273: note = Description of Artificial Sequence: Synthetic coding sequence
  source 1..273: mol_type = other DNA
tgagtgatccccctgctgcgggagagcgtgggcatcctgatgcagagaacccctccactactggagaattcactgcctcagtgctaccaacgggttcagcaactccagggtgtgtatagcttgcaggagcagcacttctggaccttgtgctccgatgtgtacgttggtacactgaagcttatagtagccccagatgctgacgcccggtggattctgagccagactcataatattttcacccagaaattggaagaagagaacgagaatctgtag

SEQ ID NO: 206031 - DNA, 1131 bp, synthetic construct
  misc_feature 1..1131: note = Description of Artificial Sequence: Synthetic coding sequence
  source 1..1131: mol_type = other DNA
atgctgcccctgagcatcaaggacgacgagtacaagccccccaagttcaacctatttggcaaaatcagcgggtggttcagaagcattctgtccgataaaacatctagaaacctattcttttttttgtgcctcaacctctcttttgcttttgtggagcttctgtacggaatctggagcaactgtctggggctgatttccgattctttccacatgtttttcgactcaacagccattttggccggcctagccgcctcggtgatctccaaatggcgggacaacgacgctttttcctatggttatgtgcgggccgaggttcttgcagggtttgtcaacggcctgttcttgatttttaccgcgttttttatttttagcgagggcgttgagcgcgccctggcccccccagatgtgcaccacgagcgcctgttgctcgtcagtatcctcggattcgtggtgaatctcatcggaattttcgtcttcaagcatggcgggcatggacacagtcacggcagtgggcacggacattctcacagtctcttcaacggagccctagaccaggctcatggtcatgtcgatcattgccatagccacgaagtgaaacacggagccgcgcacagccatgatcatgcacatggacacggacattttcatagccacgacgggcccagccttaaggagaccaccgggccaagtaggcagatattacaaggagtgttcctacatatccttgccgataccctgggtagtatcggcgtgatcgcctcagctatcatgatgcagaactttggcctgatgattgccgatcccatctgttccattttaatcgccatactgatcgtcgtcagcgtgatcccattgctgcgagagtccgttgggatcctgatgcagagaacaccacctctgcttgagaacagtctgccacaatgctatcagcgagtccagcagttacagggggtgtacagcctgcaggagcaacacttttggactttgtgttcagatgtgtatgtgggcaccctcaaactcatcgtggctcccgatgctgacgctcgatggatcctctcccagacacacaatattttcacacaggccggggtcagacagttatacgtccagatagactttgcagccatgtag

SEQ ID NO: 206032 - DNA, 963 bp, synthetic construct
  misc_feature 1..963: note = Description of Artificial Sequence: Synthetic coding sequence
  source 1..963: mol_type = other DNA
atgtaccactgccacagcggcagcaagcccaccgagaagggcgccaatgaatatgcctacgcaaagtggaagctgtgcagcgctagtgccatctgtttcatctttatgatcgcagaagttgttgggggccacatagcaggcagcctagcagttgttacagacgccgctcaccttctgattgatcttacgagctttctcctatcattgttctcactctggttgagttctaagcctccttccaaaaggctcaccttcgggtggcacagagctgagatactgggagctctgctctcaatcctatgcatctgggtggtgacaggcgttttagtctaccttgcctgtgaacggctgctgtaccccgactaccagattcaggccacagttatgatcatcgtgtcctcgtgtgccgtggccgcaaacatagtcttaactgtggtgttgcaccagcggtgcctgggccataaccacaaagaggttcaggctaatgctagcgtcagggctgctttcgttcacgctctgggggacctctttcagagcatctccgtgttgattagtgcacttatcatatattttaaacccgaatataaaattgcggaccctatttgcacgttcatcttttctattctagttcttgcttccacaattactatcctgaaagactttagtatactgctcatggagggcgttcccaagagtttgaactactccggcgtgaaagaactgatcttagctgttgatggcgtcctgtccgtgcatagcctgcacatttggtcactaacaatgaatcaggtgattctgagtgcacacgtagctactgctgcatcaagggatagccaggttgtccggcgcgaaattgccaaagccctgtcgaaatcttttacaatgcattctctgaccatccagatggagtcccctgtagaccaggaccccgactgtctcttttgcgaagatccgtgcgattag

SEQ ID NO: 206033 - DNA, 1110 bp, synthetic construct
  misc_feature 1..1110: note = Description of Artificial Sequence: Synthetic coding sequence
  source 1..1110: mol_type = other DNA
atggagttcctggagcggacctacctggtgaacgacaaggccgccaaaatgtacgcatttacgctggaaagtgtggagctgcagcagaagcctgtcaataaagaccagtgcccccgagaacgacccgaggaactggagtccgggggtatgtaccattgtcacagtggctctaaacccactgagaaaggtgccaatgaatatgcgtatgctaagtggaaactctgttcagcatctgccatctgctttatcttcatgatagctgaggttgttggtggtcatattgcaggtagcctggccgtcgttacagacgctgcccatcttctgattgacctgacctctttcctgctgtctctgttctcgttgtggctctcatccaagcctccttcgaaacggctgacctttggttggcacagagccgaaatactcggcgctttgctctccatcctctgcatatgggtggtaaccggagtccttgtctacctggcctgcgagcgattactgtacccagactatcaaattcaggccaccgtcatgatcatcgtgagcagctgcgccgtggcagcaaatatcgtgcttactgttgttctacatcagcgctgtttaggacacaaccacaaggaggttcaagccaatgcctctgtgcgggctgcatttgtgcatgccctaggtgatctattccagagcatttccgtgctaatatcggcacttatcatttactttaagcctgaatacaagattgcggaccccatatgtacttttatcttctcgatccttgtgctcgctagcacaataacaatactgaaagatttttctatcctgctgatggagggggtgcctaaaagcttgaactattctggggttaaagaactgattttagccgtcgatggcgtgctgtcagtgcactccctgcatatctggtctctcaccatgaaccaggtgatactctcagcccacgtggccactgccgcgagtcgagactctcaggtcgtgagaagggagattgctaaggccctttcaaagtcctttacaatgcattcactaaccatacagatggagtctccagtcgatcaagaccccgattgtctgttttgcgaggacccatgtgattag

SEQ ID NO: 206034 - DNA, 1458 bp, synthetic construct
  misc_feature 1..1458: note = Description of Artificial Sequence: Synthetic coding sequence
  source 1..1458: mol_type = other DNA
atgggccggtacagcggcaagacctgccggctgctgttcatgctggttctaacggtggccttctttgtagccgagttggtgagtggatatcttgggaactccatcgcccttctgtccgactcttttaacatgctctccgacctgataagcctgtgcgttggactatctgctggatatatcgcgcggcggccaacacgcggcttctctgctacttacggttatgctcgagccgaggttgtgggcgcactctctaatgccgtgttccttaccgctctgtgttttaccatcttcgtggaggccgtgctccgcttagcacgcccagagcgtatcgacgatccggagctggtccttatagtgggcgtgcttggcctgctcgtgaacgtcgtgggactgctgattttccaggactgcgctgcctggtttgcttgttgcctgagaggaaggagccgccgcctgcagcaacggcagcagctcgccgaggggtgtgtccctggggcctttggaggccctcagggtgcagaagatccccggcgagcggctgatcccactgccccggggtctgacagcgctgtgactcttagggggacaagtgtggagcggaagcgggagaagggagctacagtcttcgctaacgttgccggggattctttcaatactcagaacgagccagaagacatgatgaagaaagaaaagaagtccgaggccctcaatatacgcggcgtgcttctgcacgtgatgggagacgctctgggctccgttgtggtagtaatcacggctattattttctacgttctgcctttaaagtcagaggacccatgtaactggcagtgttatatagatccctccctgactgtgctgatggttatcattatactcagctctgcctttcccttgatcaaggagaccgcagctattctactacagatggtgccaaaaggggttaatatggaagagctcatgagcaagctctccgcagtgccaggcatctcttcagtccatgaagttcacatctgggagttagttagcggcaaaatcatcgccaccctccacattaagtatcccaaggatcgagggtaccaagatgcttctacaaagatcagggagatcttccatcacgcgggcatacacaacgtcacaattcagtttgagaatgtcgacctgaaagagccactagagcaaaaggacctcctcctgttgtgcaattcaccctgtattagcaagggatgtgccaagcagttgtgctgtccaccaggggccttacccctcgctcatgtaaatgggtgcgcagaacacaatggtggaccctcgctggacacatacgggagcgacggtttaagccgccgggacgcacgcgaggtcgctatcgaggtttcacttgatagctgtctgagtgatcacggccagagcctcaataagacgcaggaagatcagtgttacgtgaacagaactcacttctag

SEQ ID NO: 206035 - DNA, 723 bp, synthetic construct
  misc_feature 1..723: note = Description of Artificial Sequence: Synthetic coding sequence
  source 1..723: mol_type = other DNA
atgggcgacgccctgggcagcgtggtggtggtgatcaccgccatcattttttacgtcctgccactgaaatccgaggacccctgcaactggcaatgctacattgatccgtctctcaccgttctgatggttatcatcatcttgtcctcagccttcccactgataaaagagacggcggccattctgctccaaatggtgcctaagggcgtaaacatggaagagctcatgtcaaaactcagtgcagtgcccggcatcagtagcgtccatgaggttcacatctgggagctggtgagcgggaagattatcgcaactttgcacataaaatatccgaaggatcgtggataccaagacgcgtcaacgaaaataagggaaatttttcatcatgctggaattcacaacgttacgatccagtttgagaacgtcgatcttaaggagccattggaacagaaagatctcctgctgctgtgcaattccccatgtatctctaagggctgcgcgaagcagctttgctgccctcccggtgcccttccactggcccatgtgaatggctgtgctgagcacaacggagggccttccctggatacatacggctccgatggcttgtctcggagagatgctagagaggtggctatcgaagtgtccctggactcgtgcctgtccgaccacgggcaatcactcaacaagacacaggaagatcagtgttacgtcaacagaacacatttttag

SEQ ID NO: 206036 - DNA, 672 bp, synthetic construct
  misc_feature 1..672: note = Description of Artificial Sequence: Synthetic coding sequence
  source 1..672: mol_type = other DNA
atgggccggtacagcggcaagacctgccggctgctgttcatgctggtgctgaccgtggcatttttcgtggccgagttggtgtctggctatctcggaaattcaatcgccttactgtcggattcctttaacatgctctcagacctcatatcactgtgtgttggcctgagcgccggctatatcgccaggagaccaactcgcggattctccgcgacatatggctatgctcgcgctgaggtcgtaggcgccctcagcaatgccgtgtttctgacagccctctgctttaccatattcgttgaggcagtactgcgccttgcccggcccgaaaggattgacgacccagaactcgtgctcatcgttggcgtcctcggcttgctcgttaatgtggttggattgctgattttccaggactgcgcagcatggtttgcatgttgtctccgcggccggagtaggagacttcagcaacggcaacaactagccgagggctgcgtgcccggtgctttcggtggcccacagggagcggaggacccaaggagggccgccgaccccacggcacccggatctgattcagcagtgacgctccgcggaacttccgtagaacgcaagagggagaagggcgccacagtttttgccaatgttgctgagctgatccacaacactagattccttctttag

SEQ ID NO: 206037 - DNA, 567 bp, synthetic construct
  misc_feature 1..567: note = Description of Artificial Sequence: Synthetic coding sequence
  source 1..567: mol_type = other DNA
atggaccacagccaccacatgggcatgagctacatggacagcaacagtacgatgcaaccatctcaccaccacccaaccacctctgcatcccattctcatggggggggagattcctctatgatgatgatgccaatgacattttactttgggttcaaaaacgtggagctgctattttctggattggtaattaatactgctggcgagatggccggcgctttcgtcgccgtattccttctcgctatgttttatgagggcttgaagatagcgagagagtctctgcttagaaaaagccaggtgagtattcgatataatagtatgcccgttcccggccccaacgggaccattctgatggagacacacaaaacggttgggcagcagatgctgtcattcccacatcttctccagacctgctgggactaccggcacgaaccgcctcatttatcgttgtcacctagttattactctgacttaaactaccctaagaaagcaaaggtcctcctgcgtgtatccgtcgagctgatgattcaggaggccctcatgatcactgccggagactcactttgttag

SEQ ID NO: 206038 - DNA, 573 bp, synthetic construct
  misc_feature 1..573: note = Description of Artificial Sequence: Synthetic coding sequence
  source 1..573: mol_type = other DNA
atggaccacagccaccacatgggcatgagctacatggacagcaactcaactatgcagccatcccaccatcaccccacaacatctgcatcccactcccatggaggaggtgattcttccatgatgatgatgcccatgactttttattttggatttaagaatgttgaactgctgttctcaggcctcgtcatcaatactgccggcgagatggctggggcgtttgtggccgtgttcctgctggcaatgttttacgagggattgaaaatcgcccgcgagtccttactccgtaagagccaagtaagtattaggtataattccatgcccgtaccagggcccaatggtaccatactcatggagactcataaaacagtaggacaacagatgctaagctttccccaccttcttcagaccgtgctccacataatccaggtggtcataagctactttctgatgctgatattcatgacctacaacggctacctctgcattgccgtcgcagctggagccggaactgggtactttctgttctcctggaaaaaggcggtcgtagttgacataacagaacattgccattag

SEQ ID NO: 206039 - DNA, 432 bp, synthetic construct
  misc_feature 1..432: note = Description of Artificial Sequence: Synthetic coding sequence
  source 1..432: mol_type = other DNA
atggccatgcacttcatcttcagcgacaccgccgtgctgctgttcgatttctggtccgttcacagccccgcaggcatggcactcagcgtactggttctcctgttgctagcagtactgtatgagggcataaaggtgggtaaggctaagctgttaaatcaggtactggtcaacctccccactagcatctcccagcagacgatcgccgagactgatggcgacagtgcaggtagcgactctttccctgtcggacgaacacaccacaggtggtatctttgtcatttcgggcagagcctgattcatgtgatacaggtcgtcattggatattttattatgttagccgtcatgtcctacaacacatggatctttttaggtgtggtgcttggaagcgcagttggctactaccttgcgtaccctctcctgtccaccgcttag

SEQ ID NO: 206040 - DNA, 1650 bp, synthetic construct
  misc_feature 1..1650: note = Description of Artificial Sequence: Synthetic coding sequence
  source 1..1650: mol_type = other DNA
atgagccccaccatcagccacaaggacagcagccggcagcggcggcctggaaacttctcccattcactggacatgaagagtggccccctgccacccggaggctgggatgactcccatctggactcggcaggtcgtgagggagatcgggaggctcttcttggcgatacaggtactggcgacttcctgaaggccccgcagtccttccgggctgagctgtcttcaatcctcctattactgttcctttacgtccttcagggaatccctctagggctggccggtagcatccctctgattcttcagagtaaaaacgtgagctataccgatcaggccttcttcagctttgtgttctggccatttagcctcaagctgctgtgggcacctctggtcgatgccgtttacgtgaaaaactttggccgtaggaagagttggctggtccctacacagtacatcttaggcctctttatgatttatctctctactcaagttgatcggctgttgggcaacacagatgatcgaaccccggatgtgatcgccttaaccgtcgctttttttttattcgagtttttggcagccacccaagacattgccgttgacggttgggcactcaccatgctgtcgcgcgaaaatgtggggtatgcttccacttgcaactcagtggggcaaactgccgggtatttcctgggaaacgtcctctttctggccctggaatctgcagatttttgcaacaaatacctgcggttccagccacaacctagggggatcgttactctgagcgatttcctcttcttttggggtaccgtgtttctgattaccacaacgctggtcgctttactaaagaaggaaaacgaggtgagtgtggtaaaagaggagactcagggcataaccgatacttacaagctgctgttcgccataattaaaatgccggcagtgctcaccttctgcttgctcatcctcaccgcaaaaattggcttcagcgccgcagatgcggttaccgggctaaagttggtggaagagggggtccctaaagagcatttggcgctccttgccgtgccaatggttccactgcagatcatactgcctctcattatcagcaagtatacagctgggcctcagccacttaatactttttacaaagccatgccttatagattgctgctggggctcgaatatgctctgctcgtttggtggactccaaaggtggaacatcaaggcggatttccgatttattactacatcgtggtcctgctcagttatgcactgcatcaggtcactgtatatagtatgtatgtctccataatggcattcaacgccaaagtcagcgacccattgatcgggggaacatatatgacactgctgaacaccgtgtctaacctcggcggcaactggccctctaccgttgctttgtggctggttgatccgctgacggtgaaggaatgcgtgggggcctcaaatcagaactgtaggaccccagacgctgtggaactttgcaaaaaattaggcggttcctgcgtcacagctttggacgggtactacgtggaatctataatctgtgtcttcatcggcttcgggtggtggttttttctaggcccaaaattcaagaaactccaggacgagggcagctctagttggaagtgtaaaaggaacaattag

SEQ ID NO: 206041 - DNA, 1650 bp, synthetic construct
  misc_feature 1..1650: note = Description of Artificial Sequence: Synthetic coding sequence
  source 1..1650: mol_type = other DNA
atgagccccaccatcagccacaaggacagcagccggcagcggcggcctggaaattttagccattccctggacatgaagtccggtcccttaccacctgggggctgggacgactcacatctggacagtgctggtagggaaggagacagggaggcactgctgggcgacaccggtacaggcgactttctgaaggcgccccagtcattcagagctgaattgtcctctatcctactgctgctctttctgtacgtgctgcagggcatcccactaggactggctggctccattcccctgatcctgcagagtaagaatgtatcttacactgatcaggcgttttttagttttgtgttttggcctttcagcttgaaactactctgggctccgctagttgacgccgtgtacgttaagaacttcggccgcaggaaatcatggctggtgcctacacagtacatcctgggtttgtttatgatttacttgagtactcaagtcgaccggcttctgggcaatacagacgatagaacaccggacgttattgccctgaccgtggcctttttcctgtttgagttcctggcagccacccaggacatcgccgtcgatggctgggcactgacaatgctctccagggagaacgtagggtatgcaagcacatgtaatagtgtagggcagaccgctggctacttcctgggcaatgttctgtttctggcacttgagagtgccgatttctgcaacaagtacttgaggtttcagcctcaacccagggggatcgttaccctctcggacttcttgtttttttggggcactgtctttctcatcaccacaaccctggttgccctgcttaaaaaggagaacgaggtctctgttgttaaggaagagacacagggcatcactgatacatacaagctgctcttcgccattataaagatgcctgccgttcttacattctgtctgctgatcctgactgctaaaatcggcttcagtgccgctgacgccgtcacgggcctgaagctcgtggaagaaggagtgccaaaggagcaccttgccctgttggctgttcccatggtgccactccaaattatcctgccactgatcatttctaaatataccgccggtcctcagccgctgaatactttttacaaggcaatgccctacagactgcttctcggcctagaatacgccctgctcgtatggtggacccccaaagttgagcaccaaggcggatttcccatatattattacatcgttgtgctgctcagctatgcacttcaccaggtgacggtgtattctatgtacgtgtcaatcatggccttcaatgccaaagtgagcgatcctttaattggcggtacctatatgacgttactgaatacagtgtcaaatctggggggaaactggccaagcacagtggccttgtggctagtagaccccctgacggtgaaggaatgtgtgggtgcgagcaatcagaactgccgcacgccggatgccgtcgaactttgtaaaaaactcggaggctcttgcgttacagcactggacggttactatgtggagagcatcatctgtgtgtttatcggttttggttggtggttctttctgggcccaaagttcaaaaagttgcaggatgagggtagctcttcttggaagtgtaaaagaaacaattag

SEQ ID NO: 206042 - DNA, 1920 bp, synthetic construct
  misc_feature 1..1920: note = Description of Artificial Sequence: Synthetic coding sequence
  source 1..1920: mol_type = other DNA
atgctgagctacggcgagcggctgggcagccccgccgtgagccccctgcctgttagaggggggcacgtcatgaggggtactgcttttgcctacgtaccgtcaccacaggtgctccaccggatcccagggacaagtgcctatgcatttcccagtttggggccagtggccttggcagaacacacttgcccatgcggagaagtgctggagcgtcacgaaccgctgcctgccaaactggcgcttgaagaggagcagaaacctgaatctcgtttggttcccaaactcaggcaagctggggccatgctgcttaaggtgccgttaatgttaaccttcctgtacttgttcgtgtgtagcctagatatgttgagtagcgccttccagttggctggagggaaagttgcaggggacatattcaaagataacgctatactgtctaatcccgtggccggcctggttgtcgggatacttgtcactgtgcttgtgcaaagtagttcaacaagcacaagcattatagttagtatggtcagcagtggcttgcttgaagtctcgtcggccattcctattatcatgggatcaaatattggaactagtgtcaccaataccatcgtggcccttatgcaggcaggcgacaggaccgactttaggcgagcgttcgctggagcaactgtccacgattgctttaactggctctctgtgctggtcctgctgcccttggaggctgcaacgggctatctgcatcacataaccaggctggttgtggcgagctttaacatacatgggggccgcgatgctcctgacctgctcaaaataataaccgagcccttcaccaagctgattatacagctggatgaatctgtcatcacatccattgcgactggggacgaatccttgcggaatcattccctgatccagatttggtgccaccccgacagcctgcaagcacctacttcgatgtcaagggccgaggccaattcctctcaaacactcgggaacgccactatggagaagtgcaaccacattttcgtagatactggactgcctgatcttgctgtgggcctcattctcttagctggtagcctcgtcctattatgtacttgcctcatactgttagtgaaaatgctcaactccctgctgaagggacaggtggccaaagtaatccagaaggttattaacactgattttccagcccctttcacgtgggtaaccggttacttcgcaatggtggttggtgcaagtatgacgtttgtcgtccagtcatcatctgtgttcaccagcgcaatcacaccgctcatcgggttgggagtaattagcatagaaagagcatacccacttaccctcggctccaacattggaactacaacaacagcaatcctggcagccttggccagcccccgcgaaaaactgtccagtgccttccagatagccctgtgccatttcttcttcaatattagtgggatcctactctggtaccctgtgccttgtactaggttaccaatccgcatggcgaaggcactcggcaaaagaaccgcgaaatacagatggtttgctgtcttgtacctgctcgtctgtttcctgctgttacccagcctagtctttggcattagcatggccggctggcaggtcatggttggtgtcggcactccctttggggccctccttgccttcgtcgtcctcatcaacgtcctccaaagtcggtcccctggtcacctccccaagtggctgcaaacctgggattttctcccaaggtggatgcattccctgaagcccttggaccacctgattactcgggccaccctctgctgcgcccgcccggagccacgctcaccacctttgcccccacgggtgttcctagaagagctgccacctgcgactccttccccaaggctggcactgcctgcccatcacaatgcaacccggttatag

SEQ ID NO: 206043 - DNA, 330 bp, synthetic construct
  misc_feature 1..330: note = Description of Artificial Sequence: Synthetic coding sequence
  source 1..330: mol_type = other DNA
atgctgagctacggcgagcggctgggcagccccgccgtgagccccctgccagtgagagggggacatgtcatgcgcggtacggcatttgcgtacgtaccctccccccaggtgttgcaccggattccagggacaagcgcatacgcattccccagcctgggaccggtggccctggccgagcacacatgcccgtgcggggaggtccttgagcgccacgagcccctcccggcaaagctggctttggaagaagagcaaaagcctgagtcgagactagtgcccaagctgcgacaagccggcgccatgctgctcaaagtgccactgatgttgacatag

SEQ ID NO: 206044 - DNA, 1023 bp, synthetic construct
  misc_feature 1..1023: note = Description of Artificial Sequence: Synthetic coding sequence
  source 1..1023: mol_type = other DNA
atgctgagctacggcgagcggctgggcagccccgccgtgagccccctgcccgttcgcggcggtcacgtaatgcggggcactgccttcgcttatgttccttcccctcaagtgctgcacagaattcccggaacctcggcgtatgctttcccatcactgggccctgtggccctcgccgagcatacgtgcccttgcggagaagttctggagagacatgaacccctgcccgctaagcttgccttggaagaggagcagaaaccggagtcacgcttggtccctaaattgaggcaggccggagcaatgttgttgaaagtcccgttgatgctgacctttctgtatctgtttgtttgtagtttggacatgctctcttccgcctttcagctggcgggagggaaggttgcaggcgacatttttaaggacaatgccattttgtccaaccctgttgcaggtctggtggtgggtattctggtaactgttctcgtacagtcctctagcaccagtaccagcatcatcgtcagcatggtgagttctggcctactcgaggtgtcatccgccatacccatcatcatgggctccaatatcgggacaagtgttacaaacactattgtagctctgatgcaggccggcgatcgcacagatttccgtagagctttcgcaggcgcaactgtgcatgattgctttaactggctttcagtcctggtgcttctgcccctggaagctgcgactggttatctgcaccacattacccgacttgtcgtggcaagttttaacattcacgggggacgggacgctcctgacctgcttaagatcattactgagccatttacgaagctcataatccagctagacgaatcagttattaccagcatcgcgacaggggatgagtctctgcgtaaccatagcctgattcaaatttggtgccatcccgacagcttgcagcagaaccttgaagggcgcgagattactcatttcgatctccgcaaaaaacaggcaatggaagattccagtgtgcctcattgcccttag

SEQ ID NO: 206045 - DNA, 2073 bp, synthetic construct
  misc_feature 1..2073: note = Description of Artificial Sequence: Synthetic coding sequence
  source 1..2073: mol_type = other DNA
atggccccctggcccgagctgggcgacgcccagcccaaccccgacaagtaccttgagggcgccgccggtcagcaaccgacagccccagataagtccaaagagaccaataagactgataataccgaagctcccgtgacaaaaatcgaactcctgcccagctacagcaccgccactctgattgatgaaccgaccgaggtcgatgatccttggaacctccccactctgcaggattctggcataaagtggtccgagcgagacacaaaaggaaaaatactgtgctttttccaaggcataggcagattgatactgttgctgggttttctttatttcttcgtatgctcactcgatatactgagcagtgcgttccagctggtgggtggcaaaatggctggccagttcttctctaattcaagcatcatgagcaatccacttctgggccttgtaatcggcgtcctggtaaccgttctagtgcaatccagttctacctctacctccattgtggtttctatggtaagttcttccctactgacagtccgggccgcaattcctattatcatgggcgccaatattgggactagcatcactaacaccatagtggccctgatgcaggtcggtgacagatccgagtttcggcgcgcctttgcaggagccacagtacatgattttttcaattggttgtcggtgctggtcctgctgccagttgaggtggctacccactatctggagatcatcactcagctgattgtcgaatctttccatttcaagaacggtgaggacgcgccagacctgctcaaggttataactaaacctttcactaagctgatcgtccaactggataaaaaggtcatttctcagatcgcaatgaacgacgaaaaggcaaagaataagagtcttgtaaaaatttggtgtaagacctttacaaataagacacagatcaatgtcactgtgccgtcaacagccaactgtacatcaccgagtctgtgctggacagatggcattcagaattggacaatgaagaatgtgacctataaagaaaatatagccaagtgtcagcatattttcgtgaactttcacctccccgacctggcggtggggacaatcctattgatcctgagcctactggtgctttgtggatgcttaatcatgatcgttaagatcctcggttcggtgctgaaaggtcaggtggccactgtcattaagaaaaccataaacactgatttcccttttcccttcgcctggcttaccggctacttggcaattctcgtgggagccggaatgactttcattgtccagagcagcagtgtgttcacctctgccctgactcctctgatcggcattggagtgattaccattgaaagggcatacccactgaccctgggcagcaacatcggcacaaccactaccgccattcttgctgccctggctagtcctggtaatgcacttcgttcttctctgcagatcgccctttgccattttttcttcaacattagcggcatactgctgtggtacccaatcccgttcactcgcctgcctattcggatggcaaaaggactgggaaacatttcagcaaagtatagatggtttgccgtcttctatctgattatattcttttttttgattccactgacagtattcggcctttctctggccgggtggcgggttctggtaggagtgggagtccccgttgttttcattatcattctcgtgttatgcttaagattactgcagtcacgctgtccgcgcgtgctgcccaagaaactccagaattggaatttcctccctctctggatgagaagtctgaagccttgggatgcagtcgtttctaagttcaccgggtgtttccagatgcgatgctgctgctgctgtcgggtgtgttgcagggcttgttgcctgctgtgcgactgccccaagtgctgccggtgtagtaagtgttgcgaagatctggaggaggcacaggaaggtcaggatgtccctgtgaaagctcccgagacctttgataacattaccattagtagggaggcgcaaggagaggttcccgctagtgattcaaagactgagtgtacagcactctag

SEQ ID NO: 206046 - DNA, 2070 bp, synthetic construct
  misc_feature 1..2070: note = Description of Artificial Sequence: Synthetic coding sequence
  source 1..2070: mol_type = other DNA
atggccccctggcccgagctgggcgacgcccagcccaaccccgacaaatatttagagggcgcagctgggcagcagcctactgccccagacaagagcaaggaaacaaataagaacaatactgaggcacctgtaacgaagatcgaacttctcccatcctactctaccgctactcttatcgatgaacctaccgaggtggacgacccatggaacttaccaacactgcaggactcaggtatcaaatggagtgagagggacacaaaaggaaaaatactttgtttcttccaaggcattggacgacttatcctgctattagggtttctctacttcttcgtgtgctctctggacattttgtcaagcgctttccaactggtgggcggtaagatggctggccagttcttttcaaatagctccattatgtccaatcccctcctcgggctggtaattggcgtgctcgtgactgtcctggtccaaagcagttctacctccaccagcattgtggtgtcaatggtgagttcatcactgctgacagttcgagccgcaatcccaattatcatgggggcaaacattggaaccagcatcactaataccattgtggccctgatgcaggtgggagacagaagcgagttccgcagggccttcgctggtgcgactgtgcacgacttttttaattggttatctgtgctggtcctgcttcccgttgaagtagccacccactacctcgagatcattactcaactgatcgtggaatcatttcactttaaaaatggggaggacgctccggacttgctgaaggtgatcactaagccattcaccaagctgatcgtccaattggacaaaaaggtcataagtcagatcgccatgaacgacgaaaaggccaaaaataagtctctagttaaaatctggtgcaagacctttactaataaaacccagatcaatgtgacggtgccaagcaccgcaaactgtacatcaccctccctgtgctggaccgatggtattcagaattggaccatgaagaacgtcacttataaggagaatatcgccaagtgtcagcatatcttcgtgaactttcacttgccggatctggctgtgggcaccattctactgatcctgtcgttattggttctctgcggatgcttgattatgatcgttaagattctcggtagcgtgcttaagggccaggtcgcaacagtgattaagaagactattaacacagacttcccctttccttttgcatggttaaccgggtacttggccatcctggttggggctgggatgacattcatcgtccagtctagcagcgtgttcacttcagccctgacgcctttgatcggaatcggggtcattactatcgagagggcctacccactcaccctaggcagtaacatcgggactacaacaaccgccatcttagccgctctggcgtcaccagggaacgccctccgaagtagcctgcagatcgctctgtgtcacttcttttttaatataagtggaatccttctctggtaccccatcccatttactaggctccccattaggatggctaagggcttgggtaacatctccgcaaaatacagatggtttgctgtgttttatctgataattttcttcttcctgatccctctgacggtattcggactgtctttggcaggctggagagtgctggttggcgtcggcgtgcccgttgtgtttattatcattctggtgctctgcctcagactgctacagagtagatgccctagggttctaccaaaaaagctgcagaactggaacttcttgccactctggatgcggagtctcaaaccttgggacgcagtggtttccaagtttaccgggtgttttcagatgcggtgctgctgctgttgcagagtgtgttgccgcgcctgctgtcttttgtgcgattgcccaaagtgctgtcgttgctcaaagtgctgtgaggatctcgaggaagcccaggagggacaggatgtgcctgtgaaagctcccgaaactttcgacaatatcactatctctagggaggcccagggggaagtaccagcctctgacagcaaaaccgagtgcacagccttgtag

SEQ ID NO: 206047 - DNA, 2070 bp, synthetic construct
  misc_feature 1..2070: note = Description of Artificial Sequence: Synthetic coding sequence
  source 1..2070: mol_type = other DNA
atggccccctggcccgagctgggcgacgcccagcccaaccccgacaaatacctggaaggggctgccggtcaacaaccgaccgcgcccgacaagtctaaggaaacaaataagaacaatacggaggcacctgtcactaaaattgagttgctaccttcctattctactgccacgcttatcgacgagccaacagaagtcgatgatccctggaatcttcccacgcttcaagactcgggtatcaagtggagcgagcgcgacacaaagggtaaaatcctctgttttttccagggcatcgggaggctgatactgcttcttggatttttgtatttctttgtgtgctcactcgatattctgtcctcagccttccaactggtgggaggtaaaatggctggtcaattctttagtaattctagcatcatgtctaaccctcttctgggcttggtaatcggagtgttggtgactgtgctcgttcaatctagtagtacttcaacatcaatcgtcgtgtcaatggtgtcctcttcgctgctgaccgtgcgcgctgcaatcccaatcattatgggcgccaacatcggcacatcaatcacaaacacgatcgtcgcactgatgcaggtgggtgataggagcgagtttcggcgcgcttttgccggagccaccgtgcatgatttcttcaactggcttagtgtactcgtgctgttgccagtggaggtggcgactcactatttggagatcatcactcagctgatcgtagagagttttcatttcaagaatggagaggatgccccggacctgctcaaagttatcactaagccattcacaaagttgatcgtgcagctggacaagaaggtgatctcacagattgccatgaacgacgagaaagccaaaaacaagtccttagtgaaaatttggtgtaaaactttcaccaacaagacacagatcaatgtgaccgtccccagcacggccaattgtacttccccgagcctctgttggactgacggcatccagaattggacaatgaagaatgtgacctacaaggaaaacatcgccaagtgtcagcacatttttgtaaacttccacctgccggacctggccgtcggaaccatacttttgatactgtcccttctggtcctgtgcggctgtctgatcatgatcgttaagattctcggctcagtgctcaaggggcaggtcgcgactgtcatcaaaaagacaattaacactgatttccctttccccttcgcatggcttactggctacctagctatcctggtcggggcaggcatgactttcatcgtccagtcaagcagcgtgttcacttcagctctgacacccctgattgggattggcgtgattaccatcgaacgggcctatccactcacgttgggctccaatataggcacgaccacaaccgctatcctggccgctctggcctctccgggaaacgcacttcggagctccctccagatcgcactctgtcactttttcttcaatatctctggcatcttgctgtggtatcctatcccattcacccgtttgcccattcgcatggcgaaggggcttgggaacatcagtgccaaataccgctggtttgccgtgttctacttgatcatcttcttctttctaatcccattgaccgtgttcggcctgtcattggcagggtggagagtgcttgtgggggtgggggtaccagtagtgttcatcatcatcctggtgctctgtctgagactcctccaatcccgctgtcccagggtgctgcctaagaaacttcagaactggaacttcctgcctctgtggatgaggtccttaaaaccttgggatgctgtagtgtcaaaattcaccggctgtttccagatgaggtgttgttgctgctgcagagtgtgttgtcgagcctgttgcctcctctgcgactgccctaagtgctgtcgctgcagtaaatgctgcgaggacttagaggaagcgcaggagggacaggacgtccctgtcaaggccccggagacattcgacaacataacaattagtcgcgaagcacaaggcgaggtccctgcaagtgatagcaagaccgaatgcactgcgctgtag

SEQ ID NO: 206048 - DNA, 486 bp, synthetic construct
  misc_feature 1..486: note = Description of Artificial Sequence: Synthetic coding sequence
  source 1..486: mol_type = other DNA
atggccccctggcccgagctgggcgacgcccagcccaaccccgacaagtacttggaaggtgcagccggccagcaacccactgcccccgacaaaagtaaagaaactaacaagaccgataataccgaggcccctgtgaccaagatcgaactgcttccatcttattccaccgcaacgctcatcgatgagcctacagaggttgatgacccttggaatctgcccaccctgcaggatagcgggattaaatggtccgagagagacacaaaagggaaaattctctgtttcttccaaggcatcgggcgactgattctgttgctgggctttttgtacttcttcgtgtgttcacttgatatcctatcttctgcctttcagctagtgggcggaaagatggccggccagttcttttctaactcttcaattatgtcaaaccccctgctggggctggtgatcggggtcctggttactgtactggtacagtcgagttcctag

SEQ ID NO: 206049 - DNA, 492 bp, synthetic construct
  misc_feature 1..492: note = Description of Artificial Sequence: Synthetic coding sequence
  source 1..492: mol_type = other DNA
atggccccctggcccgagctgggcgacgcccagcccaaccccgacaagtacctggaaggggccgcgggacagcaaccgacagcgccggacaagtcgaaggaaacaaataaaaacaataccgaggctccagtcaccaaaattgagctgcttccatcctatagcacagcaacattgatcgatgaacctaccgaagtggacgacccatggaatctcccaactctgcaggactccgggattaagtggagcgaacgagacactaaggggaagatactctgcttcttccaggggatcgggcgcctgatcctgctactcggcttcctttattttttcgtctgttcactagacatcctctcttcggcttttcaactggtagggggaaaaatggcagggcagttttttagtaattccagcataatgtcaaaccctttgcttggcctggtcataggagtcctggttactgttctcgtacaatcctcatcaactagcacttag

SEQ ID NO: 206050 - DNA, 1800 bp, synthetic construct
  misc_feature 1..1800: note = Description of Artificial Sequence: Synthetic coding sequence
  source 1..1800: mol_type = other DNA
atgcccagcagcctgcccggcagccaggtgccccaccccaccctggatgctgtcgacctggttgaaaaaacgctacgcaatgaggggacatcttcgtctgcccctgtgctcgaagaaggtgataccgatccatggaccttgccacaactgaaggacacttctcagccttggaaagagctccgggtagctgggcggctgagaagagtggcggggtctgtgctaaaagcgtgtgggctgctggggtctctgtactttttcatttgttctctggatgtcttgagcagcgcctttcagctcctgggcagtaaggtagctggggacatttttaaagacaatgtggtactcagcaaccccgtggccggattggtgatcggagttctggtgactgctctggtgcagtcttcatcaactagcagcagcatcgtggttagcatggtggcggccaagttacttactgtgcgcgtctccgtgcctattatcatgggtgtcaatgtcggcacaagcatcactagtacgttagtgagcatggctcaatcgggcgaccgtgacgagttccagcgagctttttcagggtcagcagtgcatggaatctttaattggttgacagtactggtcttgctgccccttgagagcgctaccgctttgcttgaaaggttatcagagctggctctcggtgccgcaagtttaactccaagagcccaggctccagatatcttaaaggtgctgaccaaacccctgacccatctcatagtacagttggacagtgatatgatcatgtcttcagcaacgggaaatgccacaaacagctctctgatcaagcattggtgtggcaccacaggacaacctactcaggagaattcatcatgcggcgccttcggtccctgtaccgagaagaattctaccgcccctgctgatcgcctcccctgccgtcatctgtttgccggcaccgaattaacagatctggccgttggctgcatcttgttggcaggctctctgctcgtcttgtgtggttgtctggtgctgattgtcaagctgttaaactctgtcctgcggggacgtgtggcacaagttgtgcggacagtaataaatgccgatttcccatttcccctgggctggttgggggggtatctggcagtgttggctggtgctggactgacattcgctttacagagctcctccgtattcacagctgccgtggtgcctctgatgggcgtcggtgtcatttccttagaccgcgcttaccccttactattagggtccaatatcggcactacaacaacagcactgcttgccgcactggcctccccagctgaccggatgctaagtgcactccaggtcgctctgatccatttttttttcaacctggctggaatcctgctctggtatcttgtgcctgccttgcggctgcccattcccctagcgcggcattttggggtagttactgccagatataggtgggtggctggagtttatcttctcttgggctttcttctgctgcctctagccgccttcggcctgtccctggccgggggcatggagctcgctgccgtaggcggcccactggtcggactagtcctgctcgtcatactggtcactgtgctccaaaggaggcggcctgcctggctgccagttcggctgaggtcctgggcctggctgccggtgtggctacactccctagaaccttgggacagacttgtgacaagatgttgcccgtgtaatgtttgtagcccccccaaggctacaacaaaggaagcctattgctacgaaaacccagagatcctcgctagccagcagctttag

SEQ ID NO: 206051 - DNA, 1800 bp, synthetic construct
  misc_feature 1..1800: note = Description of Artificial Sequence: Synthetic coding sequence
  source 1..1800: mol_type = other DNA
atgcccagcagcctgcccggcagccaggtgccccaccccaccctggatgccgtcgacctcgtggagaagactctgaggaatgaagggaccagcagtagtgccccagtgttggaagagggagatacggatccttggacactgccccagctgaaagacacgtcgcaaccctggaaggagttgcgcgtagccggcagactacgcagagtggctggctcagttctaaaagcatgtggattattgggcagcttgtacttcttcatctgctccttggacgtgctgagttctgctttccagctactaggaagcaaagtggccggagatatctttaaagataacgttgtgctctcgaaccccgtcgcaggcctggtgataggcgtcttggttacagcgctggtgcagagttcttcaacaagttcgagcatcgtggtctcaatggttgcggcaaaattgctaaccgtgcgggtttcggttcctatcataatgggggtaaacgtcggcacaagcataaccagcacgctcgtctcaatggcacaaagtggagaccgggacgaatttcagagggctttctcggggtccgcagtgcacggcatttttaactggcttacagtattagtgctgctccctcttgagagtgcaaccgctctgttggaacggctgagcgagcttgctctgggagcagcttcactgactccccgagcccaagctccagatattctcaaggtcctgaccaaacccctcacccaccttatcgtgcagcttgatagcgacatgattatgtccagtgctactggcaatgcgacaaattcatcccttattaaacattggtgtggaactacaggtcagccaacccaggagaactccagttgcggggcctttgggccctgcactgagaaaaattccactgcacccgccgaccgcctcccatgccgtcacctgttcgcaggcactgagcttaccgatctggctgtgggatgtatcctgctggcggggagtctgcttgttctgtgcggatgtttagtgctgatagtcaagttgctgaacagcgtgttgaggggacgggtggctcaggtggttaggaccgttattaacgctgacttccccttcccgctcgggtggctgggaggctacctcgctgtccttgcaggcgccggcctgactttcgctctgcagtcctcatcggtttttacggctgctgtcgtccccctaatgggagtcggggttatctccctggaccgggcataccctttgctgttaggatcaaacattggtacaactacaacagcacttcttgcggccctagcgtcccctgccgaccggatgttgtccgccctccaggtggcgctaattcactttttttttaatctggctggcattctgctctggtacctggtccccgctctgcggctgcccatcccccttgcacgccattttggagtggtcactgccagatatcggtgggttgctggggtctatctgttactcggttttctgctgctccccttagctgctttcgggctctcgctggctggcggaatggaactggcagccgtggggggtccactggtcggcctggtgctgttggttatccttgttaccgtgctccaacgcagaaggccagcttggctccctgttcgccttcgtagttgggcctggcttccagtatggctgcactccctggaaccctgggacaggttagtcacccggtgttgcccctgtaacgtatgcagcccacccaaggcaacgactaaggaagcctactgttatgagaacccggaaattttggctagccagcagctgtag

SEQ ID NO: 206052 - DNA, 570 bp, synthetic construct
  misc_feature 1..570: note = Description of Artificial Sequence: Synthetic coding sequence
  source 1..570: mol_type = other DNA
atgaccctgatggccgccgtgtacaccatcgccctgcggtacacccgaactagcgacaaagaactgtacttcagcaccaccgctgtttgcatcaccgaggtaattaagttgctattgagtgtgggcatcctcgctaaggaaacaggcagtctcggtcgcttcaaggctagtctgcgagagaatgtgctggggtcgcccaaggagcttttgaaactctctgtgcctagtctcgtttatgccgtgcagaataatatggcatttcttgctttgagcaacttggacgccgcggtctatcaagtaacctatcagctgaagatcccctgtactgctctttgcaccgtgctgatgctgaataggacgctctctaaattgcagtgggtgtccgtgtttatgttgtgcgctggcgttactctggtacagtggaagcccgctcaggctacaaaagttgttgaatacatactgaaaaagttcaaggaatttcgctatttttccctgggagaaaagcatagcaatgtctcaataagagattattgcgatatatcatggcggcttctggtcagatggagttag

SEQ ID NO: 206053 - DNA, 1014 bp, synthetic construct
  misc_feature 1..1014: note = Description of Artificial Sequence: Synthetic coding sequence
  source 1..1014: mol_type = other DNA
atggccgccccccgggacaacgtgaccctgctgttcaagctgtactgtttggccgtgatgaccctgatggctgcagtttatacaatcgctttgcgctatacgcggacctcagataaggagttatatttcagtacaaccgctgtttgtattacagaagtcatcaagcttctcctctccgttgggattctcgctaaggagaccggctcattaggcagattcaaggcaagtctgcgtgagaatgtgctcggaagtcctaaggaactgcttaaattaagcgtacccagcttggtgtacgctgtccagaataacatggcttttctcgcgttgagtaatctagatgcagccgtataccaagtgacttaccagcttaagatcccctgtacagccttgtgcactgtcctcatgcttaatagaacactgagtaaattacaatgggtctcggtatttatgctttgtgcaggagtgaccctagtgcagtggaaaccagcccaggcgacaaaagtcgttgtggaacaaaaccccctgctgggatttggcgccatcgcaatcgcagtgctgtgctccggtttcgccggcgtctatttcgagaaggtgctcaagtccagcgatacctccctgtgggttcggaatattcaaatgtacttgtccggaatcatcgtgaccttagcaggtgtgtacttaagcgatggtgcagaaatcaaggagaagggctttttttatggttacacatactacgtctggttcgtgatttttctcgcgtccgtcggtggactgtacaccagtgtggtcgttaagtacacggacaacattatgaaaggctttagcgcagcagccgccatcgtgctctcgaccatagccagcgtgatgcttttcggcctgcaaatcactctcacctttgcactgggaactttgctggtgtgtgtttccatctacctttacgggctccctcgacaagacaccacttcgatccagcaaggggagacggcaagcaaagaacgcgtaattggagtttag

SEQ ID NO: 206054 - DNA, 837 bp, synthetic construct
  misc_feature 1..837: note = Description of Artificial Sequence: Synthetic coding sequence
  source 1..837: mol_type = other DNA
atggccgccccccgggacaacgtgaccctgctgttcaagctgtactgcctggctgtgatgaccttaatggccgctgtgtatacaattgcccttcgttatacccgcaccagcgacaaggagctctatttctccacaacagcagtgtgcataaccgaagttatcaagctcctgttgtccgtcgggatattggccaaggagaccggcagtctcggaagattcaaagcttctctccgagaaaacgtgctcgggtcacctaaggagcttctcaaactaagcgtgccctccttagtttatgccgtgcagaacaatatggcgttcctggctctaagtaatctggatgccgctgtataccaggttacctatcagctgaaaatcccttgcacagccttatgtacagtgctcatgctcaatcggacattgagcaagctgcaatgggtcagtgtcttcatgctgtgcgccggggtcaccctcgttcagtggaaaccagcccaggcgactaaagtagtggtggagcagaatcccctactgggcttcggggccattgccatcgccgtactgtgttctggctttgccgtactcgcctcagtcggggggctgtatacatccgtcgttgttaaatacaccgataacattatgaagggtttcagcgcagcagccgccattgtcctttccactatcgcttcagtcatgttattcggattgcagatcaccttaacatttgctctaggaacgctcctggtgtgcgtgtctatttacctgtatggcttgcctaggcaggacaccacctcaatacagcaaggtgagacggcttccaaggaacgagtcataggggtttag

SEQ ID NO: 206055 - DNA, 570 bp, synthetic construct
  misc_feature 1..570: note = Description of Artificial Sequence: Synthetic coding sequence
  source 1..570: mol_type = other DNA
atggccgccccccgggacaacgtgaccctgctgttcaagctgtactgcttagctgttatgactctgatggctgcggtgtacacgatcgcactccgctacacaagaaccagcgataaggagttatactttagtaccaccgcggtgtgcataacggaggtgattaaattgctcttaagcgtagggatactagcgaaggagacggggtctcttggaaggttcaaggcttccctgcgcgagaatgtgctgggtagtccaaaggagctcctgaaactcagcgtgccctctctggtctatgccgtccagaacaacatggcttttctggccctgagcaatctagatgcagccgtctatcaggtcacatatcaacttaaaattccatgcacagcactttgtacagtactgatgctgaatagaactctctccaagcttcagtgggtttctgtgtttatgctgtgcgctggcgtgacgttagtgcagtggaaacctgcacaagcgactaaagtggtgtttttgcaagtattggtggcgtcgacccttctcctgtggctgagtacgcagaccacctcttag

SEQ ID NO: 206056 - DNA, 537 bp, synthetic construct
  misc_feature 1..537: note = Description of Artificial Sequence: Synthetic coding sequence
  source 1..537: mol_type = other DNA
atggccgccccccgggacaacgtgaccctgctgttcaagctgtactgcctggccgtaatgacactcatggctgctgtttatactattgcactgaggtacacacggacatcagataaagagctatacttctccacaacagccgtgtgcatcacggaagttatcaagctgctcttgagcgtcggcatattagctaaagaaacagggtctctggggcggttcaaagcatcccttcgagagaatgtcttaggatcccccaaggaactgctgaaactgagtgtccccagcttggtatacgccgtgcagaacaacatggcttttctggcgcttagcaatctcgatgccgcagtctaccaggtgacctaccagctcaagatcccatgtacagctttgtgtacagtcttaatgttaaacaggaccctgtcaaagctccagaagaaggattttagcatggtaacacatattatgagcggcctgagttccgtgtcgatccaggaactgaaggtgctgtcccgttcattcatcttttttctgtcttag

SEQ ID NO: 206057 - DNA, 612 bp, synthetic construct
  misc_feature 1..612: note = Description of Artificial Sequence: Synthetic coding sequence
  source 1..612: mol_type = other DNA
atgctgaaccggaccctgagcaagctgcagtgggtgagcgtgttcatgctgtgcgctggtgtcactcttgttcagtggaagccagcccaagcgacaaaagttgtggtggaacaaaatcccctactcggtttcggcgctattgccattgcagtcttgtgttctggctttgctggcgtgtatttcgagaaggtactgaagagcagtgacaccagtctgtgggtgcgtaatatccaaatgtacttgtctggcatcattgtcactcttgccggagtgtatctgtccgacggcgccgaaatcaaggagaaggggttcttttacggatacacatactatgtgtggttcgtcattttccttgctagtgtgggcggactatacacgagcgttgtggtcaaatacaccgacaatattatgaaaggattcagtgctgcagctgctatcgtgctgtcaaccatcgctagcgttatgctgttcgggctgcagatcaccctgactttcgcccttggtactcttctagtgtgcgtttcgatctacctgtatggactcccgaggcaggataccacatctatccagcaaggagagactgcctctaaagagagagtaatcggggtctag

SEQ ID NO: 206058 - DNA, 1191 bp, synthetic construct
  misc_feature 1..1191: note = Description of Artificial Sequence: Synthetic coding sequence
  source 1..1191: mol_type = other DNA
atggccgccgtgggcgccggcggcagcaccgccgcccccggccccggagccgtctctgccggtgcgttggagcccggcactgcttcagcagctcataggagacttaagtacatctcgctagcggtgttggtcgtgcagaacgcctctctgattctgagcatccgatacgcgcgcaccctccctggcgaccgcttctttgctactacggcagtggtaatggcagaagtcctgaagggcctgacttgcctgctcctactattcgcccaaaaacgaggcaatgtgaagcatttggtgctgtttctgcacgaagcagttctcgtccagtatgtggacaccctcaagctggcagtgccgagcttgatttacacacttcaaaataacctgcagtacgtcgcaatctctaacctgcccgcagcaacttttcaagtgacctatcagctcaaaatccttacgactgcattgttctctgtgctgatgttaaatagatccctgtctcgactgcagtgggcttccctcctgctgctgtttactggggtggccattgtgcaggcccagcaggctggcgggggggggccgaggccattagaccagaatcctggcgccggacttgctgctgtagtggcctcatgtctgtcaagcggctttgctggggtgtatttcgagaagattctgaagggatcatccggatcagtctggctgaggaatctccaactggggcttttcggcaccgccctcggacttgtggggctgtggtgggccgaggggaccgccgtggccacaagaggtttctttttcggctatacgccggcggtctggggagttgttctaaatcaggcttttggtgggctgttggtcgcggtggtggtcaagtacgccgacaatatcctcaaaggctttgccacctcactctcaatcgtgctcagtacagtagctagtattagactcttcggatttcatgtggatcctctgttcgccctgggggcaggcctcgtgatcggcgctgtctatctctactcccttccacgaggtgccgccaaggccatcgcctctgcgtcagcttccgctagcggcccttgtgtgcaccagcagcctcccggacagcccccacctccacagctgagctctcatcggggagacttaataacggaacctttccttccaaagttgctgacaaaggtgaagggctcttag

SEQ ID NO: 206059 - DNA, 492 bp, synthetic construct
  misc_feature 1..492: note = Description of Artificial Sequence: Synthetic coding sequence
  source 1..492: mol_type = other DNA
atggccgccgtgggcgccggcggcagcaccgccgcccccggccccggtgccgtgagcgccggcgcgctcgagcctggaactgcctcagcagcccatagaaggcttaaatacatctctttagcggttttggtggtgcagaacgcgagcctgatactttccatccggtatgctcgcacacttccaggagaccgcttctttgccacaaccgctgtggttatggccgaggtgcttaaaggcctcacctgtcttctgctgctgttcgcccagaagcgcggcaacgtgaaacacctggtactctttctccacgaggccgtgcttgtccaatatgtcgacactttgaaactggcggtgcctagcctgatctatactctgcagaacaatctgcagtatgtggccatttctaatcttccagccgcaactttccaggtgagtcccaagccttctatggccccagaagagctcaccggcttgggaacaggtgtctgggagtag

SEQ ID NO: 206060 - DNA, 657 bp, synthetic construct
  misc_feature 1..657: note = Description of Artificial Sequence: Synthetic coding sequence
  source 1..657: mol_type = other DNA
atgaagctgtgccgggacgcccaccggcggctgaagtacatcagcttggcagtactggtggttcagaacgccagcttaatcctctctatccgatacgctagaaccctacccggagaccgttttttcgccaccactgccgtcgtcatggccgaggtgcttaaggggcttacatgcctgttactgttgttcgcccaaaagcgaggtaacgttaagcaccttgtgttatttcttcatgaagccgtgttggtgcagtacgtcgacactctgaagttagcagtccccagcctcatatacactctccagaacaacttgcagtacgtcgctatatctaacctgccagccgcaaccttccagcctagtccacgctgctctcagtcacattcattgtgcctttgtcttcgcctgcgtgctctgaggtctcccgccgcatctagagctgcaacaactactgctgccgtgtttcctccctggaggccccatcatggggcgctgagtgccaaggtctccgcaggcgaggtccgcgcgggaagcaacggtgggacccagggtcgaggtacaggcgtggagggggtgggacacctacaggacccctcccgtcatccacccggacccggcagctcaggtttcggtaggtggtccttcctccctgggcattag

SEQ ID NO: 206061 - DNA, 1182 bp, synthetic construct
  misc_feature 1..1182: note = Description of Artificial Sequence: Synthetic coding sequence
  source 1..1182: mol_type = other DNA
atggccgccgtgggcgccggcggcagcaccgccgcccccggccccggggccgtgagcgcaggggcacttgagcccggcacagcatccgccgctcatagacgactgaagtacatctcactggccgttctggtggttcagaacgcctctctcatactatccattcgctatgctaggacgctgcccggagatcggttctttgccacaaccgctgttgttatggcagaagtccttaagggccttacgtgtctgctactgctattcgcccagaaaaggggcaacgtcaagcacctggtgctctttctgcatgaggccgttttggttcaatacgtggacacgctaaagctggctgtgccctctctaatttacactctccagaacaacctgcagtatgtcgcgatctccaatctccctgcagccaccttccaggtgacataccagctaaagatactgactacagcactattcagcgtactcatgttgaatcggtctctctctcgactgcaatgggcttcactgctgctcctgtttacgggcgtcgcaatagtccaggcacaacaggctggaggggggggtcctaggcctctagaccagaatcctggggctggcctcgccgcagtggtggcctcttgcctgtccagtggcttcgccggagtctactttgaaaagattttgaagggaagctccggaagcgtctggctgcggaatctgcagctcggattattcgggactgcccttggtctggtgggcttgtggtgggctgaaggaaccgctgtggcaacgaggggtttcttcttcggatacaccccggctgtttggggtgtagtgcttaatcaggcttttggcggcttgctggttgcagtagtggttaaatatgcagacaacattctgaagggcttcgcaacatccttgtccatagtgttatccactgtcgcctccatccgcctctttggattccacgtcgaccccttgtttgcactcggtgctggcctggttatcggagctgtctacctttatagtctaccgcggggggctgcaaaagctatcgccagcgcaagcgcaagtgctagtggaccttgcgtgcaccagcagccacccggtcagcctccaccaccgcagctaagtagccacagaggggacctgataactgaaccatttttgccaaaatcggtactggtgaagtag

SEQ ID NO: 206062 - DNA, 675 bp, synthetic construct
  misc_feature 1..675: note = Description of Artificial Sequence: Synthetic coding sequence
  source 1..675: mol_type = other DNA
atggccgccgtgggcgccggcggcagcaccgccgcccccggccccggggccgtctccgccggcgcattggaacccgggactgccagcgccgcacatcgccgcctgaagtatatatctctcgccgtgctcgttgtgcagaatgcctccctcattttgtccatccgttatgctagaaccctgcccggggatagatttttcgctactacagccgtcgtcatggcagaggtgctgaagggactgacatgcctgttacttctgtttgcccagaagagaggcaatgtgaaacacctcgtcctgtttcttcacgaggccgtcctcgtgcaatacgtagacacgctcaaattagcggtccctagtttgatatatacgctccagaataaccttcagtatgtcgctatttcgaacttgcccgccgcaactttccaaccctctccacggtgtagccagtcccattccttgtgcctgtgcttgagactgcgtgcgctgcggtcgccagccgcgagccgcgcagccaccactactgccgcggtgtttccaccatggcgtcctcatcacggggccctctctgccaaagtagctcatcagggagaagggtttctggccgctggaatcgaggacataggattagcgtcctttagcctactcgcgctcggaccagcggggactaagctgtag

SEQ ID NO: 206063 - DNA, 999 bp, synthetic construct
  misc_feature 1..999: note = Description of Artificial Sequence: Synthetic coding sequence
  source 1..999: mol_type = other DNA
atggccgccgtgggcgccggcggcagcaccgccgcccccggccccggggccgtttcagccggggccttggaacctggcacagcaagcgccggtaacgtgaaacatctcgtgctatttcttcatgaagcagttcttgttcaatacgttgacaccctgaagctggccgtgccttcccttatctacaccttgcagaacaatctccagtatgtcgccataagtaatctgccagctgcaacattccaggtcacatatcaactgaagatcttgacaaccgctctgtttagtgtactgatgcttaatcgatccttgtcccgactacagtgggcttcactgctgctgttgttcactggcgtggccatagtacaggcccagcaagctggtggtggcgggcccagacccctggaccagaatcccggcgccggactggctgcagtagtggcctcctgcctgagctcgggcttcgccggcgtctattttgagaaaatactgaaaggctcttccggatcggtctggctgaggaacctgcagttggggcttttcgggaccgcactggggctagttgggttgtggtgggccgagggtacagctgtggcgacacgcggcttctttttcggatatactcccgccgtgtggggtgtggtgctgaatcaagccttcggcgggctcttggttgctgttgtggtaaagtatgcggataatattctcaaaggatttgcgacctctttgtcaattgtgctctctaccgtggcctccatcagactgttcgggtttcacgtagaccccctgttcgccctcggcgcgggacttgtaataggtgcagtgtacctgtacagcttaccccgcggggccgcaaaagcgatagccagcgctagtgcctcagcatctggaccttgtgttcatcagcagcctcctggccaaccacccccacctcagctgagctctcacagaggcgacttaattaccgaaccttttcttcctaagtcagtgctggtgaaatag

SEQ ID NO: 206064 - DNA, 729 bp, synthetic construct
  misc_feature 1..729: note = Description of Artificial Sequence: Synthetic coding sequence
  source 1..729: mol_type = other DNA
atggccgccgtgggcgccggcggcagcaccgccgcccccggccccggggctgtgtcagccggcgctttagagcccggaacggctagcgcagcgcatagacggctgaagtatatcagcctagccgtgctcgttgtccagaacgcatccctcattctgagcatccgctacgccaggaccctccctggagatcgattttttgcgactaccgccgtggtgatggcagaggttttaaaggggctgacttgcctactcttactattcgcccaaaaaagggggaatgtgaaacacctcgtgctgttccttcacgaggccgttctcgtccagtatgtggatacactaaagctggccgtgccatctctgatttacacgctccagaacaaccttcagtatgttgcaatctccaacctccccgccgctacctttcaacctagcccccgatgctcacaaagtcactcactgtgcctctgccttcgactcagagcactccgctcccccgccgcgtcccgagcagccacaacgaccgcggccgtatttcccccttggaggccacatcatggggctctgtctgctaaggtgtctgcaggagaagtacgggcagggtccaatggcgggacacagggtagaggcactggagtcgagggggtaggtcatctgcaggatccaagccgtcatccaccgggtcctgggtctagcggctttggaaggtggagctttcttccgggccactag

SEQ ID NO: 206065 - DNA, 531 bp, synthetic construct
  misc_feature 1..531: note = Description of Artificial Sequence: Synthetic coding sequence
  source 1..531: mol_type = other DNA
atggccgaggtgctgaagggcctgacctgcctgctgctgctgttcgctcagaagcggggaaatgtgaagcacctcgtcctctttctgcatgaggcagtcctagtacagtacgtggacacgttgaagctggccgtgccatcgttgatctatacattgcagaacaacttgcagtatgtggctatttcaaatctgccagcagccacgtttcaggttacatatcagctcaaaatcttgacaactgccttgttctccgtcctgatgctaaaccgctctctgtctagactgcagtgggccagcctattactccttttcacaggagtggccattgtacaagcccagcaggccgggggcggcggtcccagacccctagaccaaaatccaggcgcaggactggctgccgtcgttgcaagctgtctgtcaagcggcttcgccggcgtatactttgagaagatattgaagggctcctctggaagcgtgtggctccgcaacttgcagctcggtctttttggaactgccctaggtttagtctag

SEQ ID NO: 206066 - DNA, 1266 bp, synthetic construct
  misc_feature 1..1266: note = Description of Artificial Sequence: Synthetic coding sequence
  source 1..1266: mol_type = other DNA
atggccgccgtgggcgccggcggcagcaccgccgcccccggccccggcgccgtttcagctggggcgctagaacccggtaccgctagcgccgagttgctcctgacctgggaggaggccgaggcgcgagggcagggattgccgcagcctctgcctgacacttccgttagaatcccggcccacaggcggctgaaatacataagtctcgcggtgctcgtggtacaaaatgcctcactgattttgagcattcggtacgccagaaccctccccggcgatcgcttcttcgctacaactgccgtggtcatggccgaggtcctcaagggactgacttgcctgctactgctgttcgcccagaagcgcgggaatgtgaaacacctggtgctgttcttgcacgaggcagtactggtccagtatgtcgatacgcttaagctagcagtccccagtctgatttatacactccagaacaatctccagtatgtggctataagcaatttgcctgctgcaacctttcaggtgacctaccagctgaaaattctgaccactgcacttttttccgtgctcatgctgaatcgatccctcagccggttgcagtgggccagtctgctgttattatttacaggggttgctatcgtccaggcccagcaggccggtgggggtggaccccggcctctggatcagaaccccggggctgggctggcggcggttgttgcaagttgtcttagcagcggctttgccggggtgtatttcgagaagatcctcaagggatcttcaggcagtgtatggttgagaaacctgcaacttggacttttcggaaccgccttggggcttgtcggtctctggtgggccgagggcacagctgtggccacacgtgggtttttctttgggtatacccccgctgtttggggtgtggtcctgaaccaagcgttcgggggcctgctggtagctgtggtggtgaagtacgccgataacatattgaaagggtttgccacgagcctgagcatcgtgttgtctaccgttgcgagtataaggcttttcggctttcacgtcgacccgctgtttgccctaggcgccgggcttgtgatcggcgcggtctatttgtattccctgccacggggcgcagccaaagctatcgcttccgccagtgcctcagcatctgggccttgcgtgcaccagcagcctcccgggcagcccccccctcctcagctctctagccacaggggagacctgatcacagagcccttcctgcctaaatcggtgttagttaagtag

SEQ ID NO: 206067 - DNA, 1068 bp, synthetic construct
  misc_feature 1..1068: note = Description of Artificial Sequence: Synthetic coding sequence
  source 1..1068: mol_type = other DNA
atggccgaggtgcaccggcggcagcacgcccgggtgaagggcgaggcacctgccaagtctagcaccttgcgcgatgaagaagagctcggcatggcttcagcagaaaccctcacagtgttccttaagctgctcgcagccggtttttacggagtaagttctttcttgatagtagtggtgaacaaaagtgtgctcaccaactatcggttcccatcttccctatgcgttggcctcggtcaaatggtagctaccgtggccgtgctgtgggtcgggaaagcacttagagtagtgaaatttcccgatctcgaccggaacgtacctcggaaaacgtttccgctgcctttgctgtattttggcaaccaaatcacagggctgttcagcactaagaagctcaatctccccatgttcactgttcttcggaggttttctatcctgtttaccatgttcgctgagggtgtcctgcttaagaaaaccttttcctggggaattaagatgacggtgtttgcaatgatcattggcgccttcgttgcagcctcgtctgatctcgcattcgacctcgagggatatgctttcatcctgattaatgatgtgcttaccgcagcgaatggggcttacgtcaagcagaaattagattccaaggaactgggcaaatacggactcttgtactataatgccctgttcatgatcctgccaaccctagccatcgcttattttacaggcgatgctcagaaagccgtcgagtttgagggctgggccgatactctgttccttttgcagttcacactgagctgtgtgatgggattcatcctgatgtatgctactgtgctgtgtacccaatataactccgcgttgacgaccactattgttggctgcattaagaacatactcattacctacatcgggatggtgttcggaggagactatattttcacctggaccaacttcatcggactgaacatatcaatcgccggctctctggtctactcttacatcactttcacggaagaacagctttccaagcaaagtgaggccaacaacaaattggacatcaaaggcaagggagctgtctag

SEQ ID NO: 206068 - DNA, 783 bp, synthetic construct
  misc_feature 1..783: note = Description of Artificial Sequence: Synthetic coding sequence
  source 1..783: mol_type = other DNA
atggtggccaccgtggccgtgctgtgggtgggcaaggccctgcgggtagttaagtttcccgatctcgataggaacgtcccgcgcaaaacattcccgctgcctctgttgtatttcgggaaccagatcactgggcttttctcaacaaagaagctgaatctgcctatgtttaccgtgctccggaggttcagtatcttattcaccatgtttgccgaaggagtcctgcttaagaaaacattttcctggggcatcaagatgacagttttcgcgatgatcatcggcgctttcgtggccgccagctccgacctggcctttgacttggagggatacgcttttatcctaattaacgatgtcctcactgcggcgaacggtgcttatgtaaagcagaagctggacagtaaggagttaggaaaatacggactgctatactacaatgctctattcatgattctgcctactctggcaattgcgtattttactggggacgcacaaaaagcggtggagttcgagggatgggctgatactctgtttctcctgcagttcaccttgtcgtgtgtaatggggtttattctgatgtatgccacagttctctgtacccaatacaactcagctcttacaacgactatcgtcgggtgtataaagaatattctgatcacatacatcgggatggtgtttggcggcgactacattttcacatggactaacttcatcggcctcaatatttcatgcatctgccaccgcgggctgtgtgagctgagagtcgggagtgcaaccctgggaggatag

SEQ ID NO: 206069 - DNA, 1104 bp, synthetic construct
  misc_feature 1..1104: note = Description of Artificial Sequence: Synthetic coding sequence
  source 1..1104: mol_type = other DNA
atgagcagccggagcgtgctgagccccgtggtgggcaccgacgcccccgaccagcacctcgagctcaaaaaaccccaggaattgaaggaaatggaacggctgcctcttgcaaacgaagacaaaacaatgttcgccaacctcaagtacgtgtcgctgggcatcctcgttttccagaccacgtctttagtccttactatgcgttactctagaacactgaaagaagagggacctcgatacttatctagtacagccgtggtggtggccgagctgctgaagatcatggcctgtatcctgttagtgtataaggactcaaaatgttctctgagggccttgaaccgagtgctacacgacgagatcttaaataaaccgatggaaactctgaagcttgccattcccagtggaatttacacgctgcaaaataatctgctgtacgtggctttgagtaaccttgacgcagccacataccaggtaacctaccaactcaagatacttactaccgctcttttttcagtgagtatgctgagcaaaaagctgggtgtttatcagtggctgtctctggttattctcatgacgggtgtggccttcgtacagtggcccagcgattcgcagctggattctaaagaactatccgccggcagccaattcgtcggtttgatggcagtcctgacagcatgcttcagcagtggctttgcaggggtgtatttcgagaaaatcctgaaggagactaagcagagcgtttggattcgaaacatccagctaggttttttcggatcaattttcggacttatgggcgtctatatctacgacggtgaacttgtgtccaaaaatggtttcttccagggatacaataggttgacatggatagttgtggtgttgcaggcgttgggtggactggtgattgctgcagtcatcaaatatgcagataatatcctgaaaggatttgcaacgtcgctgtctatcattctgtccaccctgatttcctatttttggcttcaggactttgtgcctacaagcgtattctttctcggagctattttggtaatcactgcgacgtttctgtatggatacgatcccaagcccgctgggaatcctacaaaagcatag

SEQ ID NO: 206070 - DNA, 978 bp, synthetic construct
  misc_feature 1..978: note = Description of Artificial Sequence: Synthetic coding sequence
  source 1..978: mol_type = other DNA
atgttcgccaacctgaagtacgtgagcctgggcatcctggtgttccagacgaccagtctcgtgcttaccatgagatactccaggactctgaaagaagaggggccccgctacctgtccagcaccgccgtcgtggtcgccgagctgcttaagattatggcttgtatccttttggtctataaggattctaagtgttccctccgggcattaaaccgggttctacatgacgagattctgaacaagccaatggaaacacttaagctcgcgatcccgtcaggaatttacactttacagaataatctcttgtacgtggccctgagcaatctcgacgcagcgacgtatcaggttacataccagctaaaaattctcaccaccgcgctcttctctgtgtcgatgctgtctaagaaactgggagtgtaccagtggctctccctcgtaattctcatgactggtgtggctttcgttcaatggccttcagactcgcaattggattccaaagagctgagcgcagggagtcaatttgtggggctgatggctgtcttgaccgcctgtttcagcagtgggttcgcgggggtatactttgaaaaaatcctcaaagagaccaagcaatccgtgtggatcagaaacattcagttgggctttttcggaagcatcttcggcctcatgggagtctatatttacgacggcgagcttgtttccaaaaacggttttttccagggttacaatcgcttgacctggattgtggtggtgcttcaggctctggggggactggtaatcgcagcggtgatcaagtatgccgacaacattctcaaggggttcgcgacttcacttagtatcattttgagcacattaatcagttatttttggctccaggactttgtgccgacttcagtattttttcttggcgcgattctcgtaataacggccacattcttgtacggctatgacccaaagcccgcagggaacccaaccaaggcttag

SEQ ID NO: 206071 - DNA, 675 bp, synthetic construct
  misc_feature 1..675: note = Description of Artificial Sequence: Synthetic coding sequence
  source 1..675: mol_type = other DNA
atgttcgccaacctgaagtacgtgagcctgggcatcctggtgttccagacgaccagcctggttcttacaatgcgatactcccgcaccctcaaggaagagggccctaggtatctatccagcaccgctgttgtcgtggccgaactccttaaaatcatggcttgtatcctgctggtctacaaagactcaaagtgcagcttgcgcgcccttaaccgtgtgctgcacgatgagattctaaacaagccaatggagacgctcaagctagctatcccgagtgggatctacaccctacaaaacaaccttctttacgtggcactgagcaatttagacgccgctacttaccaggtcacatatcagttgaagatcctaaccactgccttattcagcgtaagcatgctgagcaagaaactgggcgtctatcagtggctaagtttggtcattctgatgacaggtgttgctttcgtgcagtggccttccgattcccagttggacagcaaagaactttcggccggcagccaatttgttggcctgatggcagtcctgacagcttgcttctctagtggtttcgcaggagtctactttgagaaaattctgaaggaaactaagcagagtgtgtggattcggaatattcaactcggattcttcggttccatcttcggtctgatgggggtctattag

SEQ ID NO: 206072 - DNA, 978 bp, synthetic construct
  misc_feature 1..978: note = Description of Artificial Sequence: Synthetic coding sequence
  source 1..978: mol_type = other DNA
atgttcgccaacctgaagtacgtgagcctgggcatcctggtgttccagacgacatccttggtcttaactatgagatactccaggaccctgaaggaagagggtcctcgctatttgtcatcaactgcagtggtggtggcagagcttctaaaaatcatggcttgcattctgctggtctacaaggactctaaatgttcgctgagggcattaaaccgcgttcttcacgacgagatcctcaacaagcccatggaaaccctgaaactcgcaattccctctggtatctacactctccagaacaatctgctctacgttgccctctcaaatttggacgccgctacttaccaggttacttaccaacttaaaatcctcacaaccgccctcttctcagtgagcatgctgagtaaaaagttgggagtctaccagtggctgagcctcgttatcttgatgaccggcgttgcttttgtgcaatggcccagcgactctcaattagactcgaaggaactgtcagctggcagtcagtttgtggggctgatggccgtgcttactgcctgcttttcttcaggttttgcgggcgtttatttcgagaaaattcttaaagagacaaaacaatccgtatggatcaggaacattcaattgggtttctttgggtctattttcggcctgatgggagtttacatttacgacggcgagctcgtgagcaagaacggattctttcaggggtataatcgcctcacctggatcgtcgttgtattacaggctctgggtggacttgtgatagctgcagtaatcaagtatgctgacaatattctcaagggatttgccacatctctctctattatcctgagcaccctcatctcatatttctggctgcaagattttgtgccaacgagcgtatttttcctgggcgctatcctagttatcaccgcaacttttctgtacggatacgatccaaagcctgctggaaatccaaccaaggcatag

SEQ ID NO: 206073 - DNA, 663 bp, synthetic construct
  misc_feature 1..663: note = Description of Artificial Sequence: Synthetic coding sequence
  source 1..663: mol_type = other DNA
atgttcgccaacctgaagtacgtgagcctgggcatcctggtgttccagaccacatctttggtgctgactatgaggtattccagaactctgaaggaggagggaccccggtatttgagcagtaccgccgtagtggttgccgagttacttaaaataatggcatgcattctgctcgtgtataaggattccaagtgtagcctgcgggctttaaacagggtgctgcatgatgagatcctcaataaacctatggaaactttgaaattggccattccaagcggaatatacacactgcaaaataatctgctgtatgtcgccctgtccaatctggatgcagcaacttaccaagtgacgtatcagttaaaaatcctgaccaccgcactgtttagcgtatccatgctctcaaaaaagctgggggtctatcagtggctttctctagttatattgatgacgggcgtggccttcgtgcaatggccctcagattcccagctggactctaaggaactttctgccgggagccaattcgtggggctcatggcagtattgaccgcctgtttcagctcaggcttcgctggagtatacttcgagaaaattctcaaggagacaaaacagtcagtttggattcggaacatccagctggtgagcttttctctggaaccctccctgtag

SEQ ID NO: 206074 - DNA, 258 bp, synthetic construct
  misc_feature 1..258: note = Description of Artificial Sequence: Synthetic coding sequence
  source 1..258: mol_type = other DNA
atgttcgccaacctgaagtacgtgagcctgggcatcctggtgttccaaacaacgtctctggtgttgaccatgagatatagtagaacactgaaagaggaaggccctaggtacctatctagcaccgctgtcgtggtggccgaactgctgaagattatggcctgcatcttgctggtctacaaagattcaaagtgctcactgcgtgctctgaatcgtgtgctccacgacgagatcctgaataaacccatggagaccctatag

SEQ ID NO: 206075 - DNA, 1104 bp, synthetic construct
  misc_feature 1..1104: note = Description of Artificial Sequence: Synthetic coding sequence
  source 1..1104: mol_type = other DNA
atgagcagccggagcgtgctgagccccgtggtgggcaccgacgcccccgaccagcatctggaactgaaaaaaccacaggagctaaaggagatggagcgactccccctggcgaatgaggacaagacaatgtttgccaatctgaaatacgtgagccttgggattcttgtctttcagacaaccagtctcgttctgactatgcggtattcccgcactctgaaggaggaaggtccacggtatctttcatccactgcagtcgtcgtagcagaactgctcaagataatggcgtgtatcctgttggtgtataaggactcaaaatgcagcctgcgagccctcaatcgcgtgctgcacgatgagatcctaaataaacctatggagacactgaaactcgccatcccatctgggatttataccctccagaacaaccttctttatgtcgccctgtccaaccttgatgctgctacctatcaggtgacctatcagctcaagatcctgactaccgcactgttctccgtgtcgatgctttctaagaagctgggagtctaccaatggcttagtttggtcatcctgatgactggagttgctttcgtgcaatggccaagtgacagtcagctggactccaaggaactgtcagccggctcccaattcgtaggattaatggccgttctgacagcctgcttctcctctggcttcgctggtgtttatttcgaaaagattctgaaagagaccaagcaatccgtatggattaggaacatccaattaggattttttggaagcattttcggactgatgggagtgtatatatacgatggggaattagtttctaagaacggcttctttcagggctataacagactgacctggatcgtggtggtgctgcaggccctaggcgggttggtcatcgcagccgtcattaaatatgccgacaacatcctgaaaggcttcgccacttccttgagcatcatcctgtcgactctgatatcatacttttggttacaggattttgtccccacttctgtattttttctcggcgcaatactggtgatcacagccacatttctctacggctacgatcccaaaccagctgggaaccccacgaaggcatag

SEQ ID NO: 206076 - DNA, 969 bp, synthetic construct
  misc_feature 1..969: note = Description of Artificial Sequence: Synthetic coding sequence
  source 1..969: mol_type = other DNA
atggccagcagcagcagcctggtgcccgaccggctgcggctgcccctgtgtttcctgggggtgtttgtatgttatttctactacgggatactgcaggagaaaatcactaggggaaagtatggtgaaggggcaaagcaggaaaccttcacgttcgccctcaccctagtgttcatccagtgtgttattaatgcagtcttcgccaaaatcttgatccaattcttcgacacggcccgtgttgacaggacacggagctggctgtatgcggcctgctctatatcatatctgggcgcaatggtgagcagcaacagcgctctccaattcgtcaactatccaacccaggtgctcgggaaatcatgcaagcctatcccagtcatgctactaggagtgactttgctgaagaagaaatatccattggcaaaatatttgtgtgtgctgcttatagtggccggtgttgccctctttatgtacaagcccaagaaggttgtaggcattgaggaacatactgtaggctacggagaattgctcctgctactgagtttaaccctggatggcctgaccggagtgagtcaggaccacatgagagcgcattatcagaccggaagtaatcatatgatgctgaacataaatctttggtcgacactgttactggggatgggaatcctgttcaccggcgaactgtgggaatttcttagttttgccgagaggtatccagccattatctataatatactgctgtttgggcttacctccgcgctgggacaaagctttatcttcatgactgtggtttattttggccctctgacctgttcaataatcacaacaacccgtaagttctttaccatcctggctagtgtgatcctgttcgccaaccctatctctcccatgcagtgggtggggaccgtcctggtatttctgggactggggttggatgccaagttcggaaaaggcgctaaaaagacaagtcattag

SEQ ID NO: 206077 - DNA, 450 bp, synthetic construct
  misc_feature 1..450: note = Description of Artificial Sequence: Synthetic coding sequence
  source 1..450: mol_type = other DNA
ccccagagctgcctgatcggcaagatcagccgggcccgggaccagtctcgtgggtgcaggtttccatggcctagcggcatggagcccaggaccagggtgggccctctcctcgtcctgccggacgcttgtaagcaacctatcagacctagaccttggtgccatagtagaaacaccgtgtcttcctgtctaggaaccagaggcaagtacggggaaggggcgaagcaagagacctttacattcgctctgactttggtgtttatccagtgtgtgatcaacgccgttttcgcaaaaatctggtggatcgtgcccggggcaggaagcatgctccccgttcttagccccatctgggtcccttggtccccagccatccaacattacagtctgagcactacccagcttaggagtttggtgaatcccgcttcacaaagtcaaagctgcagcttaggctag

SEQ ID NO: 206078 - DNA, 1080 bp, synthetic construct
  misc_feature 1..1080: note = Description of Artificial Sequence: Synthetic coding sequence
  source 1..1080: mol_type = other DNA
atgcggcccctgccccccgtgggcgacgtgcggctggagctgagcccgcccccacctctgctgccagtgccagttgttagcggcagccccgtaggcagctctggaagactgatggcctctagctcatcactggtaccagatagactgcgccttcctctttgtttcctgggggtgtttgtatgctacttttattacggtattctccaggaaaagatcactcggggcaaatacggcgagggtgcgaagcaggagacctttaccttcgctctgactctggtctttatccaatgtgtgatcaacgcagtctttgccaaaattctcattcaattttttgacacggcccgcgtggatcgcacccggtcgtggctttacgctgcgtgctccatctcttacttaggcgccatggtcagctcgaactcagctctgcagtttgtcaactatccgactcaggtccttggcaaatcatgtaagcccattcctgttatgttgctcggcgttacactccttaagaagaaataccccctcgccaaatacctctgtgtactgctgatagtagccggagtggcacttttcatgtataagccaaagaaggtggtgggcatcgaggagcatactgtcggctatggcgaactcctgctcctgctaagcctcacactagacggtttaacgggtgtgtcacaagaccacatgagggcccactatcagactggatccaatcacatgatgcttaatatcaatctgtggtccacccttctcctcggcatgggcattcttttcactggggagttgtgggaattcttgtcattcgcggaaagatatcccgctatcatttacaatattctcctgtttggtctcacttctgcactcgggcagagtttcatctttatgacagtcgtctatttcggccccctcacctgctctatcattactacaacaagaaaattttttacgatcctggcaagtgtgattctctttgcaaatcccatttccccaatgcagtgggttgggactgtgctggtgttcttagggctcggactggacgcaaagtttggtaagggagcgaagaagaccagtcactag

SEQ ID NO: 206079 - DNA, 720 bp, synthetic construct
  misc_feature 1..720: note = Description of Artificial Sequence: Synthetic coding sequence
  source 1..720: mol_type = other DNA
atggccagcagcagcagcctggtgcccgaccggctgcggctgcccttgtgttttctgggggtctttgtctgctacttctattacggcattctccaggaaaaaattacacggggaaagtatggagaaggcgctaaacaggagacttttacctttgccctgactctggtgttcatccagtgtgtcatcaatgccgtctttgctaagatactgatccagttttttgatactgcccgggtggaccgcacgcgatcatggctgtacgctgcctgttccatctcttacttaggcgcaatggtcagctctaatagcgccctccagtttgtcaactaccctacacaggttctgggcaagtcctgcaagcctatccccgtgatgctcctgggcgtgactttgctaaaaaagaaataccctctagctaagtatttatgcgttctactgatcgtcgccggtgtggccctgtttatgtacaaaccaaagaaagtggtgggtatcgaagaacataccgtagggtatggcgagttattactgctcctcagccttacactggatggcctaactggtgtctctcaggatcacatgcgagcccactatcagacggggtccaatcacatgatgctcaatataaacctttggtcaaccttgctactcggaatgggtgaatcacagttttgttgcagcagccatgtgtcaccagagggaagattacccagcagcttctag

SEQ ID NO: 206080 - DNA, 597 bp, synthetic construct
  misc_feature 1..597: note = Description of Artificial Sequence: Synthetic coding sequence
  source 1..597: mol_type = other DNA
atgctgctgggcgtgaccctgctgaagaagaagtaccccctggccaagtatctctgtgttctattaatagtggcgggcgttgccctcttcatgtataagcctaaaaaggtggtcggaatcgaagagcacacagtcggctatggagagctgctcttgcttctgtctctgaccctcgatggcctcacaggcgtcagccaggatcatatgagggcccattaccagactggctctaatcatatgatgctgaatatcaacctctggtccaccctcctcctaggcatggggatactctttacaggggaactctgggaattcctgagcttcgcagaacgttatcctgctataatctacaacattctgttgttcggattgaccagtgccctgggtcagagcttcatctttatgacagtggtatattttggaccacttacatgctctataataaccactacgagaaagttcttcacaattctggcctcagtaattctgttcgctaacccgatctcccctatgcagtgggtagggaccgtgctggtatttttaggactgggactggacgccaagtttggcaagggtgccaagaagacctctcattag

SEQ ID NO: 206081 - DNA, 570 bp, synthetic construct
  misc_feature 1..570: note = Description of Artificial Sequence: Synthetic coding sequence
  source 1..570: mol_type = other DNA
atgctgctgggcgtgaccctgctgaagaagaagtaccccctggccaagtatctctgtgtgcttctgatcgtagcaggcgtcgccttattcatgtacaagcctaagaaggtcgtcgggatcgaggagcacaccgttggctacggcgagctgctactgttgctctcactgactctagatggcctgactggggtatcgcaggatcacatgagggctcactatcaaactggcagtaatcatatgatgcttaatattaacctatggtcgactttgctgctcggcatgggaatactatttacaggcgagctgtgggagtttctgtcattcgcagagcgctaccctgccatcatttataacatcctcctgttcggactgacatctgcacttggccagagttttatattcatgactgtggtttactttggcccgttgacttgttcgataattacaaccacgcgaaagttctttacgattctagcctccgtgatactgtttgccaaccctatctcacctatgcagtgggttggcaccgttctggtgttcctcgctatgggaagctgttgcgtggcctag

SEQ ID NO: 206082 - DNA, 1179 bp, synthetic construct
  misc_feature 1..1179: note = Description of Artificial Sequence: Synthetic coding sequence
  source 1..1179: mol_type = other DNA
atggacgcccggtggtgggccgtggtggtgctggccgccttcccctctctgggagcgggaggcgagaccccagaggcaccacccgagtcctggacacagttatggttcttcaggtttgttgtgaacgctgccggctatgcctcatttatggtgccaggctaccttctcgtacagtacttcaggagaaagaactacttagagaccgggcggggcctgtgctttccactggtcaaggcatgtgtgttcggaaatgagcccaaggcgtctgacgaggttccgctcgctccacggacagaggcagcagagaccacgccgatgtggcaggcgctcaaactgttgttctgcgcaaccggcctgcaggtgagctatcttacgtggggcgtccttcaggaacgtgtgatgaccagaagctacggtgctaccgcaacctctccgggcgagcggttcacagacagccagttccttgtgctgatgaaccgggtcctagccctgatcgtggcaggcttgagttgtgtgctttgcaagcagcccagacatggggctccaatgtaccgatacagcttcgcatccctgagtaatgtcctgtcttcgtggtgccagtacgaagccctcaagttcgttagttttcctacgcaggtgctggcgaaagcgtccaaggtcattcctgtcatgctgatggggaagttagtctcacggaggagctacgagcattgggaatacctcaccgctacccttatctccataggggtatctatgtttttgttgagctccgggcctgagccccggagctcacccgccaccacacttagtggcctgtttacagttggttcactcctcgagcagggcgctcttcttgagggcactaggttcatggggcggcactcagagttcgctgcccacgcacttctgctctctatttgttctgcctgcggccaactattcatcttctatactattggccaatttggagctgccgtatttaccatcatcatgaccctccgccaggccttcgcaatcctcctgtcatgtcttctatatggtcataccgtgaccgtcgtgggcgggttgggcgtcgcggtagtgttcgctgctttgctgctgcgggtgtacgctcgggggaggttaaagcagcggggcaagaaagcagttccagtagagtccccagtgcaaaaagtgtag

SEQ ID NO: 206083 - DNA, 1299 bp, synthetic construct
  misc_feature 1..1299: note = Description of Artificial Sequence: Synthetic coding sequence
  source 1..1299: mol_type = other DNA
atggacgcccggtggtgggccgtggtggtgctggccgccttcccctccttaggagctggcggcgagacccctgaggcaccaccggagtcttggacccagctgtggttcttccgctttgtggtcaatgcggccggctatgcaagctttatggtgcccggatacctactggtccaatattttcggcgcaagaattacctcgagacagggagggggctatgcttcccactggtgaaggcctgtgtattcggtaacgaaccgaaggcatcggatgaggtaccccttgcaccgagaacagaggccgctgaaacgacaccaatgtggcaggccttaaagctcctgttttgcgcgacaggcctgcaggtcagttacctgacctggggagtgctgcaagaacgggtgatgacccggagctacggcgccacagctacaagccctggtgagcgatttactgactctcagttcttggtcttgatgaaccgagttttggcccttatcgtcgctggactttcctgcgttttgtgcaagcagccccgtcatggggcacccatgtaccgctacagcttcgcatctttgagtaatgtgctatcatcctggtgccagtacgaggcactcaaatttgtaagtttcccgacccaggtgctggccaaggcgtcaaaggtcattccggtaatgctgatgggtaagcttgtgagcagacgatcctatgagcactgggagtatctgacagccacactcatttccataggagtgtccatgtttctgctgagcagcggccctgagcccagaagctcacctgccacaacattgagcggactaattctcctggctggttacatcgccttcgacagctttacctccaattggcaggacgcactgttcgcgtacaagatgtcctctgtccagatgatgtttggcgtgaatttcttttcgtgcttgttcaccgtggggtcgctcctagagcaaggcgcactactcgagggcactcgtttcatgggccggcatagcgagttcgcagctcacgcgctcctgctaagcatatgttccgcgtgtggacaattatttatcttttatactattggacagtttggcgcggctgtattcacgataatcatgaccctgcgccaggcctttgccatactcttatcttgtctgctttatggacatacagttacagtcgtgggtggcttgggcgtggcagttgtgtttgcggccttgctgctacgagtgtacgccagaggccggctgaaacagaggggcaaaaaggctgtgcctgtggagtctccagtccagaaggtgtag

SEQ ID NO: 206084 - DNA, 900 bp, synthetic construct
  misc_feature 1..900: note = Description of Artificial Sequence: Synthetic coding sequence
  source 1..900: mol_type = other DNA
atgacccggagctacggcgccaccgccaccagccccggcgagcggttcaccgactcccaatttctggtcctaatgaatcgggtcctggccttgatagttgcaggactctcctgtgtgctatgtaagcaaccacgccacggcgccccgatgtaccggtattcattcgctagcttatccaacgtgctttcttcctggtgtcaatacgaagccctgaagttcgtgtctttcccaacacaagttctggcgaaagccagcaaggtgattcctgttatgctcatggggaagctggtatcacggcggtcctacgagcactgggagtacttgacagctacactgatttctatcggagtgagcatgtttctgctgtcctctggacctgagccccgatcaagccctgctactacactctcaggtttaattttgctggccggttacattgcctttgatagttttacatctaactggcaggatgcattgtttgcatacaaaatgtcctcagttcagatgatgtttggcgtgaacttcttcagctgtctcttcactgtggggtcactcctggaacagggagctttgctcgaaggcactagatttatgggaaggcacagtgagttcgctgcccacgcccttctcctgagcatctgttccgcctgcggtcagctgtttatcttctatactataggccaatttggcgccgctgtgttcaccattataatgacactgcggcaggccttcgccattcttctcagctgcttattgtacgggcacaccgtcacagttgtggggggactcggcgtggctgttgtatttgccgccctactactgcgggtgtacgccagaggaaggttgaaacagagggggaagaaggctgtaccggttgagtcccccgtgcagaaagtatag

SEQ ID NO: 206085 - DNA, 1020 bp, synthetic construct
  misc_feature 1..1020: note = Description of Artificial Sequence: Synthetic coding sequence
  source 1..1020: mol_type = other DNA
atgctgctggccatgcccgccctgtggtacctggccaccagctggtgcagcaccagcggcggacgcactacctggcggccagtctcctacctcacctggggagtactacaggaacgggtgatgaccaggtcctatggagctacagctacaagcccgggagagagattcacagactcccagttcctcgtcctgatgaatagagtgcttgcattgatcgtcgccggcctgagttgtgtcctgtgcaaacagccaagacatggcgcacctatgtaccgatactccttcgcttctctgtctaacgttctttccagctggtgtcagtatgaagcactgaaatttgtgtcttttcccacacaggtgctggctaaagcttctaaggtcatccctgtgatgctgatgggaaagctggtatcccggaggtcatatgaacactgggaatacctcactgctaccttgatctcaataggtgtcagtatgtttctcctctctagcggccccgaaccacgcagctcccctgccacaaccctgtccggactgattctcctggccggatacattgcatttgatagttttacctcaaactggcaagatgctctgtttgcatacaaaatgtccagcgtccagatgatgttcggagtgaacttcttcagctgtctgtttacagtggggtcccttctggaacagggggccttgctggagggaactcgctttatgggtagacacagcgagttcgcggcccacgcattattgctttctatttgcagcgcctgtggccagctttttattttctatacaataggccaatttggggctgcggtttttactatcatcatgaccctgcgccaggcatttgctattctgttatcttgcctgctttacgggcacactgtcaccgtcgtcgggggccttggggtagccgtggtgttcgcggctttgctcttacgagtctacgcccgcggacggctgaagcagcggggcaaaaaagccgtccccgttgaatctccagtgcagaaagtgtag

SEQ ID NO: 206086 - DNA, 852 bp, synthetic construct
  misc_feature 1..852: note = Description of Artificial Sequence: Synthetic coding sequence
  source 1..852: mol_type = other DNA
atggacctgacccagcaggccaaggacatccagaacatcaccgtgcaggagacaaacaagaataactcagaaagcatagaatgttctaaaattacgatggacctcaagtttaacaattcccgcaagtatatttccatcactgtgcccagcaagacccagaccatgtcgccccatattaaatcggtggatgacgtggtagtcttagggatgaatctgagtaagttcaacaagctgactcagttcttcatctgcgtggcgggagtgttcgtattttacctgatctacggttaccttcaggagcttatcttcagcgttgaaggcttcaagagctgtggatggtacctgacgctggtgcagttcgccttctactccatctttgggctcatcgaactgcagctgatccaggacaagagaagaaggattccaggaaagacatatatgatcattgccttcctcacagtcgggaccatgggtcttagcaatacatctttgggctacttgaattacccaactcaagtgatattcaaatgttgtaagctcattcctgtgatgctaggcggagtgttcatccagggcaaacgatataatgtggccgacgtctctgccgcaatctgcatgtctttagggttgatctggttcacactcgctgactcaacaactgcaccaaacttcaatcttactggtgtggtgctgatatccctggccctctgcgcagatgcagtaattggcaatgttcaggagaaggctatgaagttgcacaatgcgtcgaacagtgagatgaatattactacatcttcctatagcggcgtctttatcttccctaacaagctaaaaatcccactggtactgtag

SEQ ID NO: 206087 - DNA, 1206 bp, synthetic construct
  misc_feature 1..1206: note = Description of Artificial Sequence: Synthetic coding sequence
  source 1..1206: mol_type = other DNA
atggacctgacccagcaggccaaggacatccagaacatcaccgtgcaggaaaccaacaagaataactcagaaagcatcgagtgctcgaagattaccatggatctgaagttcaataattcacgaaagtacatatccattacagtaccatccaaaacacagaccatgagcccgcacataaaaagcgtggacgacgtggtggttctcgggatgaacctctccaaatttaacaagttgacacagttcttcatttgcgtggccggagtcttcgtcttctatctgatttacggctatcttcaggagctgatattctccgtggagggttttaagtcgtgtggctggtacctcactcttgtgcagttcgcattttattccattttcgggctcattgaactccagctgatccaagacaaacggcggcgcatcccaggaaagacttatatgatcattgccttcctgactgtggggactatggggcttagcaatactagtctgggctaccttaactatcccacccaggttatcttcaagtgctgtaagctcattccagtgatgctaggaggagtgtttattcagggtaaaaggtataatgtggctgacgtctctgccgctatctgcatgagtctgggcctgatttggttcactctggccgattcaacgactgcgccgaatttcaacctcacaggtgtggttctgatttctcttgccctgtgcgccgacgcagttattgggaacgtgcaggagaaggccatgaagctccacaacgcgtcaaactccgaaatggttttgtacagctatagcattggattcgtctacatattgcttggattaacttgcacatctggcctcggtcccgccgtgacgttctgcgctaaaaaccctgtgcggacctatggctacgcttttttgttcagccttaccggatacttcgggatctcttttgtacttgccctgatcaagatattcggggctctgatcgccgtgacagtcaccacaggccgtaaagccatgaccattgtcttatcgtttatcttctttgccaagcctttcacatttcagtatgtgtggtctggcctgttggtcgttctgggaatcttcttgaatgtctactcgaagaacatggataagattcgcctaccttccctatatgaccttatcaacaagagcgtggaagcccgtaaatcacgaacactcgcgcaaactgtttag

SEQ ID NO: 206088 - DNA, 657 bp, synthetic construct
  misc_feature 1..657: note = Description of Artificial Sequence: Synthetic coding sequence
  source 1..657: mol_type = other DNA
atgctgcggctggcccagaccccccggcggctgcccagccccttcagagtcacatatcgcccttgggggaccagggcctttggggcgttcccagtgttcggtacccaaatctctagcccccccgaaaatctggacacggcccacctcccccaccctgagggcgcatttgaggagtggatgagaagcggctggaagaagagagaccttacacagcaagctaaagacatccagaacatcactgttcaggagaccaacaagaataactcagaaagcattgagtgctcgaaaataactatggacttaaagtttaacaactcccgtaagtacatctccattacagtgccctcaaaaacccagacgatgagtcctcatattaagagcgtagatgatgtagtggtgctgggaatgaatctgtcaaaattcaataaacttacacagttctttatttgcgtcgctggggtgttcgtgttttatcttatctacggatacttgcaagaactcatcttctctgtcgagggcttcaaaagttgcgggtggtatctcacattagttcagtttgctttttactctatctttggccttatcgaactgcagttgatccaggacaagcgccgacgatatgtcgtatgtttctactttctcatttttttatattag

SEQ ID NO: 206089 - DNA, 996 bp, synthetic construct
  misc_feature 1..996: note = Description of Artificial Sequence: Synthetic coding sequence
  source 1..996: mol_type = other DNA
atgcggcccgccctggccgtgggcctggtgttcgccggctgctgctccaatgtgatcttcctggagctcctggcaagaaaacaccccgggtgtggaaatattgttacctttgcccagttcctctttatcgctgttgagggattcctgttcgaagctgacctgggtagaaaaccaccagccatccccattcggtactacgcgattatggtgacaatgttttttaccgtgtctgtcgtgaataattatgcacttaaccttaatattgcgatgcccttgcacatgatctttaggagtgggtcccttatcgctaatatgatattgggaatcatcattctcaaaaagcggtactctatcttcaagtacacttcaattgctttggtgtccgtagggatattcatatgcactttcatgagcgcgaagcaggttacatctcagagctccctgagcgaaaacgacgggtttcaggcattcgtgtggtggttgttaggcatcggtgccctcacttttgccctgctgatgagcgctcgcatgggtatttttcaggagacgctgtataaaagattcggcaaacactctaaagaagcccttttctataatcatgcgttgcctttgccagggtttgtgttcttagcttccgatatttacgaccatgctgtgttgttcaacaaaagcgagttgtacgagatccccgtgattggtgtgaccctgcctatcatgtggttctatctgctcatgaatattattactcaatacgtgtgtattcggggtgtgttcatcctgacaaccgagtgcgccagtcttaccgttactcttgtagtaaccctgagaaaatttgtgagcttgatttttagcatattatacttccagaatccctttaccctgtggcactggctgggtacactgtttgtgtttattgggacgctgatgtacacagaagtatggaataatctggggaccacaaaatccgagccgcagaaggactctaagaaaaactag

SEQ ID NO: 206090 - DNA, 1095 bp, synthetic construct
  misc_feature 1..1095: note = Description of Artificial Sequence: Synthetic coding sequence
  source 1..1095: mol_type = other DNA
atgaaccgggcccccctgaagcggagccggatcctgcacatggccctgaccggagccagcgatccctcggccgaggccgaagccaatggagagaaaccctttctgcttcgcgcgctgcagatcgcactggtggtgtctctgtattgggtgacctctatatctatggtcttccttaacaagtacttgctcgacagtccttctctaaggctggatacgcccatctttgtcaccttttatcaatgcctcgtcacaaccctgttgtgcaagggcctgtccgctcttgccgcctgctgccccggagctgtggactttcctagtctccgtttagatctccgggttgctaggtccgtcctccccttgagcgttgttttcatcggaatgattacatttaacaatctgtgcttgaagtacgtgggggtggctttctataacgtgggccggtccttaacgacggtgtttaatgttcttctcagttatctcctgctgaagcagacaacatccttttacgctcttctgacttgtggaattattattgggggtttctggcttggggtcgaccaggaaggagcagagggcaccctgtcttggctgggcactgtcttcggcgtgttggcgtccctatgcgtgtccttaaacgccatatacaccacaaaagtgttgcccgctgtggacgggtccatctggcgactgactttctataataatgtgaatgcctgcatactttttttacccttactgcttctgctgggagagctgcaagcgttgcgagattttgctcaactggggtcagcacacttctgggggatgatgactctaggcggcctgtttggcttcgccatcggatatgtgactggactccagattaaatttactagtcccctcacacacaacgtctccggcactgcgaaggcatgtgctcagaccgtcctggctgtcttgtactacgaggaaacaaagtccttcttgtggtggactagtaacatgatggtgctgggtgggtccagcgcttatacctgggtgcgaggttgggagatgaaaaaaactcccgaggagccatccccaaaggattcagaaaaaagcgctatgggcgtgtag

SEQ ID NO: 206091 - DNA, 1056 bp, synthetic construct
  misc_feature 1..1056: note = Description of Artificial Sequence: Synthetic coding sequence
  source 1..1056: mol_type = other DNA
atggccctgaccggcgccagcgaccccagcgccgaggccgaggccaacggcgaaaagcctttcctgctaagggcactccagatcgcgctggttgtctcactctactgggtcacgagcatctcaatggtttttctgaacaaatacctgctggactccccatccctacgcctggacaccccaatattcgtgactttctaccagtgcttagtcacgacgctcttatgcaagggactgagtgctttggccgcctgttgccctggcgcggtggacttcccatctctcaggctagacttgagagtggctcggtcagtactccctctcagcgtggtgttcatcgggatgatcacgttcaataatctatgcttaaaatacgttggggtggcgttctacaacgtgggccgctccttgaccactgtatttaatgtgctgttatcttacctgttgcttaagcagacaacaagcttttacgccctgctaacatgcggcattatcatcggcggattttggttaggcgtggatcaggagggcgctgaagggaccctgtcatggctgggtacggtgtttggagttttggcatcattgtgcgttagtcttaacgcgatctacactactaaagtgctaccagccgtcgacggcagcatttggagactgacattctataacaacgtcaacgcatgcatactctttttgccactgcttctgctgctgggagagcttcaggcgctgagagatttcgcccagctcggctctgcccatttttgggggatgatgacactgggcgggctgttcgggttcgctatcgggtacgttaccggcctgcaaattaaattcaccagtccgctcactcataacgtcagcggcacggcaaaggcctgtgcccaaactgtgctagctgtgttgtattacgaggagacaaaaagctttctctggtggactagtaatatgatggtgctgggcggcagctctgcttacacctgggttcgcggatgggaaatgaagaaaacgccagaagaacccagccccaaagactctgaaaaaagcgcaatgggagtgtag

SEQ ID NO: 206092 - DNA, 1056 bp, synthetic construct
  misc_feature 1..1056: note = Description of Artificial Sequence: Synthetic coding sequence
  source 1..1056: mol_type = other DNA
atggccctgaccggcgccagcgaccccagcgccgaggccgaggccaatggcgaaaaaccgtttctgctccgcgccctgcaaatagctcttgtggtttcactctactgggtgacgtctatcagcatggtgttcttgaacaagtacctcctagacagcccatccttacggttagacacaccaatctttgtgaccttctaccaatgcctcgtgaccactctgctctgcaaaggcctcagtgctttggccgcttgttgccccggggccgtcgatttcccatcactgcgccttgacctaagagtcgcaaggtccgtcctgccactgtcagtggtgttcattggcatgattaccttcaataacctctgtttaaaatacgtgggggtcgcattctacaacgttggaagatctttgactaccgtatttaatgtgctactgagctacctgttgttgaagcagaccacctcgttttacgccttgctcacttgtggaatcattatcggaggcttttggctaggcgtggatcaggagggtgccgagggcacgctctcttggttgggcaccgtgttcggagtgctggcctcattgtgtgtcagcctgaacgccatctacacaaccaaggtcctcccagccgtggatgggtctatttggagactgacgttctacaataatgtcaatgcctgtatcctgtttctacccctgctgcttttattaggcgagctacaggctctgcgggactttgcacagctgggaagcgctcatttctggggcatgatgaccctggggggcctgtttggcttcgctataggctacgtcacaggacttcagattaaattcacatcccctctgactcacaatgtcagcggtaccgcaaaagcatgcgcccagaccgtgctcgccgtgctgtattacgaggagacaaaatctttcctgtggtggacgagcaatatgatggtgttagggggatcatccgcatacacttgggtgagaggctgggaaatgaagaagaccccagaagagccctctcccaaagacagcgagaaaagtgccatgggcgtgtag

SEQ ID NO: 206093 - DNA, 219 bp, synthetic construct
  misc_feature 1..219: note = Description of Artificial Sequence: Synthetic coding sequence
  source 1..219: mol_type = other DNA
atggccctgaccggcgccagcgaccccagcgccgaggccgaggccaatggcgaaaaaccctttctcctccgggccctgcagattgcgctggtggttagcctgtattgggttacctccatttctatggtcttcctcaacaagtacctgttggattctccttcacttcgcttagacacacccattttcgtgaccttttatcagtgtctcgtgacgacatag

SEQ ID NO: 206094 - DNA, 498 bp, synthetic construct
  misc_feature 1..498: note = Description of Artificial Sequence: Synthetic coding sequence
  source 1..498: mol_type = other DNA
atggccctgaccggcgccagcgaccccagcgccgaggccgaggccaatggagagaagcctttcttgctgcgagctctccaaatcgccctcgtcgtgtccctgtattgggtgacaagcatttcaatggtcttcctgaacaagtatctgttagactctccgtcattgaggttggatactcccatcttcgtcaccttctatcagtgcttggtcaccacactcttgtgtaaaggcctgagtgctctggccgcctgctgtcccggggcagttgattttcctagcctacgcctggacctccgtgtagctcgtagcgttctgcccctgagcgtggtattcataggcatgatcacatttaataatctgtgtctgaagtacgtcggtgtggccttctataatgttgggaggagtctgacaaccgtcttcaacgtgctactgtcataccttctgctgaaacaaaccacaagcttctacgccctcctgacatgtgggataatcatctag

SEQ ID NO: 206095 - DNA, 741 bp, synthetic construct
  misc_feature 1..741: note = Description of Artificial Sequence: Synthetic coding sequence
  source 1..741: mol_type = other DNA
atgaaccgggcccccctgaagcggagccggatcctgcacatggcccttacaggcgccagtgatccttccgccgaagccgaagcaaatggcgagaagccttttctcctaagggcgctacaaattgctcttgtcgtgagcctctattgggtcacttccatctcaatggtgttcttgaataaatatttactggatagcccatctcttcgcctggacacacctattttcgtaacattctaccagtgcctcgttaccacccttctttgcaagggactgtctgcactggcggcgtgttgtccgggcgccgtggatttccccagcctgcgtttggacctacgggttgcacgctcagtgctgccactctctgtggtatttatcgggatgattacgtttaataacctatgcctgaagtatgtcggagtggcattctacaacgtgggtcggagccttacaaccgtatttaacgtcctcctgagctacttacttcttaaacagactacaagtttctacgcgttactcacctgcggaattattatagggggcttttggctgggcgttgaccaggaaggcgcagaagggacactatcttggttgggaaccgtttttggagtgttggcttccctgtgtgtctccctcaatgcaatatatacgacaaaagttttgccggcggttgatggaagcatctggagattgaccttttacaacaacgtgaacgcctgcatcctgtttcttccactgttatag

SEQ ID NO: 206096 - DNA, 1014 bp, synthetic construct
  misc_feature 1..1014: note = Description of Artificial Sequence: Synthetic coding sequence
  source 1..1014: mol_type = other DNA
atgaccgccggcggccaggccgaggccgagggcgccggcggcgagccaggagctgctcgattgccatcaagagtggcacggttgcttagcgcattattctatggcacctgctccttccttattgtgctcgtgaacaaggcgttgctgacgacatacggctttccgtcccccattttccttggcatcggtcagatggctgccactattatgatcctctatgtgagcaaactcaacaagataatccacttcccagattttgacaagaagattcccgtgaagctgtttccacttcctttgttgtatgttggaaaccacataagtggtctgagcagtacttctaaactgtcgctgcctatgtttactgttctgcggaaattcactattccactcaccctcctactggagaccattattcttgggaagcagtattcccttaatatcattctcagcgtatttgccattatactgggagctttcatcgcggccggttctgacctggccttcaacctggaagggtatatcttcgtgttcctgaacgatatctttacagctgcaaacggagtctacactaaacagaagatggaccccaaggagttaggcaaatatggcgtacttttttacaacgcatgcttcatgattatcccaacacttataatttctgtgtctactggcgacctgcagcaggccacagagttcaatcagtggaaaaatgtagtattcattctccagttcctcctctcttgttttttaggctttttgttgatgtatagcacagtgctatgctcatattataattcggccttgaccacagccgtggtcggggccattaaaaacgtgtctgtcgcttatatcgggatcctgataggtggtgactatatcttcagtctactcaatttcgtgggcctgaacatctgcatggcgggaggcctgaggtatagcttcctgaccctctcctctcaacttaagccgaagcccgtcggtgaggagaatatctgtctggacttgaagagttag

SEQ ID NO: 206097 - DNA, 492 bp, synthetic construct
  misc_feature 1..492: note = Description of Artificial Sequence: Synthetic coding sequence
  source 1..492: mol_type = other DNA
atgaccgccggcggccaggccgaggccgagggcgccggcggcgagcctggagctgcccgattacctagcagagtcgctagactcctctctgcccttttctacggcacgtgttcattcctcatcgtgctggtcaataaagccctgctgaccacttacggctttccctcaccgattttcctcgggataggtcagatggctgccacaattatgatactctacgtgtccaagctcaataagatcatccatttcccagactttgacaaaaagattcctgtgaagctctttccactgcctctcttgtatgtgggaaatcacatctcaggcttgtcatcgacctctaagctctcactccccatgttcacagtgcttcgaaagtttacaattcctctaaccctgctgctggaaactatcatactgggtaagcagtattcgctaaacattatcttatctgtttttgctattatactgggtgcgtttatcgcagctggctag

SEQ ID NO: 206098 - DNA, 750 bp, synthetic construct
  misc_feature 1..750: note = Description of Artificial Sequence: Synthetic coding sequence
  source 1..750: mol_type = other DNA
atgaccgccggcggccaggccgaggccgagggcgccggcggcgagcccggggccgctcggctgcctagtcgggtggccaggttactcagcgccctcttttatgggacctgcagcttcctgatagtgctcgtaaacaaagctttactgacgacttatggctttccctctcctatcttcctcggaattgggcaaatggctgcaactattatgatcctgtacgttagcaagctcaacaagattatccacttcccagatttcgataagaagatcccagttaagttatttccactgccactgctctacgtgggaaaccacattagtgggttgagctccacctccaaactgagcctgccaatgtttactgttttgagaaaattcactattccactcaccctgctgttggagaccattattctgggcaagcagtatagtctgaacataattttgagcgttttcgccattattttaggagcatttatagccgctgggtttctccttatgtactcaaccgtgttgtgcagctattacaattcagcgctgaccaccgccgtcgtaggggccatcaagaatgtctctgtggcttacattggtattttaattggtggcgactacatcttctctctgctcaacttcgtaggattaaacatatgtatggctggtggcctgaggtactcgttcctgactctgtcatcccagttgaagccgaaacccgtgggggaagagaacatttgtctggatttgaaaagttag

SEQ ID NO: 206099 - DNA, 1251 bp, synthetic construct
  misc_feature 1..1251: note = Description of Artificial Sequence: Synthetic coding sequence
  source 1..1251: mol_type = other DNA
atgcggcagctgtgccggggccgggtgctgggcatcagcgtggccatcgcacatggggtgtttagtggctcactgaacattttactcaaatttctcatatcaaggtaccaattctccttccttaccctggtgcagtgcctcaccagcagcactgccgccctcagcctggagttgctgaggagactcgggctgatcgctgtcccacccttcgggctttcactggctaggtcctttgccggagtcgcggttctgtcgacccttcagagcagcctgaccctgtggtcccttcggggtctctctcttcctatgtacgtcgtgttcaagcggtgcctgcctttagttacaatgttaatcggcgtcctggtattaaaaaacggagccccttctccaggggtgctcgccgccgtgctgatcaccacatgcggcgctgcactcgccggtgctggcgatctgacaggagacccaatcggatacgtgacgggtgttctggctgtactggtccacgcggcatacctcgtcttaattcaaaaggcaagcgctgacactgaacacggacccttaaccgctcaatatgtgatcgctgtcagcgccacccctctattggtgatctgcagcttcgcttccaccgactcaattcacgcctggacttttcctggctggaaggatccagcaatggtctgcatctttgttgcctgtattcttatcgggtgcgccatgaattttactacgctgcactgcacatatataaatagcgctgtgactacatcatttgtcggagtcgtgaagtccattgccacgatcacagtcggcatggtggcgttctccgacgtggaacctacatcactcttcattgcaggcgtcgttgtgaatacattgggctctattatctattgtgttgcgaagtttatggaaacacgcaagcaatcaaattacgaggatcttgaggcccaacctagaggtgaagaagcccagttgagcggggaccaattgcctttcgtgatggaagagctgcccggcgagggtggtaatggccggtccgagggcggggaggccgctggaggccccgcccaggaaagtaggcaagaagttaggggaagcccaagaggtgtgccactggtggccggtagttctgaggagggttctcggagatcgcttaaggatgcctaccttgaggtgtggcgcttagtgcgaggaacacgatacatgaaaaaagactatctgatcgagaacgaggaattgccctctccttag

SEQ ID NO: 206100 - DNA, 1431 bp, synthetic construct
  misc_feature 1..1431: note = Description of Artificial Sequence: Synthetic coding sequence
  source 1..1431: mol_type = other DNA
atgagcacccagcggctgcggaacgaggactaccacgactacagctccactgacgtgtccccagaggagtctcctagtgaaggactgaacaatttgagttcccctggcagttatcaaaggtttggacagtcaaattcaaccacttggtttcagactctgattcatctcctcaaagggaatattggaacaggtctgctgggactcccactggcagtgaagaatgccggaattgttatgggccctattagcttgctcatcattggcatcgtggcagtgcactgcatgggcatcctggtaaagtgtgcccaccacttctgtcgtcgcctcaacaagtcttttgtggattacggcgacactgtgatgtatggtttagaatctagcccctgctcctggttacgtaaccacgctcactggggccggagagttgtggacttctttctcattgtgacccagttgggtttttgctgtgtgtactttgtttttctggctgataacttcaaacaagtgatcgaggcggcaaatggtacaactaacaactgccacaacaacgaaactgtgatcttgacgccaactatggattcacggctgtacatgctatctttcctgcctttcctggttttgctggtctttattaggaacctgcgagcattgtcgatctttagcttactggccaacattaccatgctggtttccttggtgatgatctatcagtttatagtgcagcgcatccccgatccgagccaccttccattagtggctccatggaagacctatcccttgttctttgggaccgccatcttcagctttgagggaattggtatggtcctgcctttagagaataaaatgaaagaccctcgtaaatttcccctgattttgtatcttggaatggtcatagttacaattctctatatttccctgggttgcctcgggtacctccagttcggggccaacatacaagggtctatcacactgaacttacctaactgttggctttaccagtctgtcaagttgctatattccatcggcattttttttacctacgcactgcagttttacgtaccagcagagattatcatcccatttttcgtgtcaagggctccagaacattgcgagctggtggtggacctgtttgtgagaaccgtactggtgtgtctgacatgcatcttggccattctgatccccagactcgacctggttatctcccttgttggcagtgtatcttcctctgccctcgcgctcattatcccgccactgctggaggtgacaacattctactccgaaggaatgtcccccctcacgatttttaaggacgccttgatttcaattttggggtttgttggtttcgtggtaggaacatacgaggctctatatgaacttatccagccatcaaatgctccaattttcatcaacagtacttgtgccttcatatag

SEQ ID NO: 206101 - DNA, 1161 bp, synthetic construct
  misc_feature 1..1161: note = Description of Artificial Sequence: Synthetic coding sequence
  source 1..1161: mol_type = other DNA
atgagcacccagcggctgcggaacgaggactaccacgactacagctccactgacgtctctcctgaagagagtccttccgagggcttaaacaatctctctagccccggcagttatcaaagattcggtcagtctaattcgactacgtggtttcagaccctaatccacctgttaaaaggcaatattggcacaggtctgctggggctcccactagccgtgaagaatgccggcatcgtgatgggcccaatttctttactgattatcggtatcgtcgcggtgcattgtatggggatcctcgtgaagtgcgcccaccacttctgcaggcgcctcaacaagtccttcgtagactacggggacacggtcatgtacggcctagagagttctccctgttcttggttaagaaaccacgctcactggggacgccgcgtcgtggatttttttctcatcgtgacgcagttggggttctgctgtgtgtactttgtgtttctggccgacaacttcaagcaagtgattgaggctgctaatgggacaacaaacaattgtcataacaatgagactgttattctcactccgaccatggactccaggttgtacatgctctcgtttctcccctttctggtgctcctggttttcatcagaaatcttcgggccttgtcaatcttctctctgctagcaaatattaccatgttggtgtcactagttatgatctaccaatttattgttcagcgaataccagatccttcccatttgcccctggtagctccatggaagacctaccccctcttcttcggcaccgccatcttctcattcgagggcattggtatggtcctcccactcgaaaataagatgaaggacccacgcaagtttccacttatcctctatctaggcatggtgatagtgactatcctatacatctccctaggatgtctgggctacctccaattcggggccaacatccaggggtctatcaccctcaatcttcccaactgctggctgtaccagagcgtgaagctgctatattcaatcggtatctttttcacttacgctttgcagttttatgtgccagccgaaataatcattcctttttttgtaagcagggcaccagagcattgtgaactggtcgttgatcttttcgtgcggacggtcctggtgtgcttaacctag

SEQ ID NO: 206102 - DNA, 213 bp, synthetic construct
  misc_feature 1..213: note = Description of Artificial Sequence: Synthetic coding sequence
  source 1..213: mol_type = other DNA
atgagcacccagcggctgcggaacgaggactaccacgactacagcagtaccgatgtaagtcccgaagagagcccttctgaggggctaaataatctgtccagccctggcagctaccagcgcttcggtcagtccaatagcactacatggttccagaccctgattcacctgctgaaaggaaatattggtaccggactgcttgggttgccactttag

SEQ ID NO: 206103 - DNA, 219 bp, synthetic construct
  misc_feature 1..219: note = Description of Artificial Sequence: Synthetic coding sequence
  source 1..219: mol_type = other DNA
atgagcacccagcggctgcggaacgaggactaccacgactacagcagcacagacgtcagtcccgaggaaagcccaagcgagggattgaataacctgtcgagcccagggtcttaccagagatttggccagtcaaacagcacgacctggtttcagaccctgattcacttgctcaagggaaatatcgggaccggcctcttgggtcttcccctagcagtgtag

SEQ ID NO: 206104 - DNA, 1431 bp, synthetic construct
  misc_feature 1..1431: note = Description of Artificial Sequence: Synthetic coding sequence
  source 1..1431: mol_type = other DNA
atgagcacccagcggctgcggaacgaggactaccacgactacagctccaccgacgtgagcccagaagaaagtccctcagagggcctgaataatctaagcagccccggcagctatcagcggttcgggcagagcaactcaactacatggtttcaaacacttatccacttgctgaaaggcaacatcggcaccgggcttctcggattacccttagctgtcaagaatgccgggattgtgatgggcccaatttcactgcttataattggaatcgttgccgtccactgcatgggtattctggttaagtgtgcccaccacttctgccgccgactgaacaaaagctttgttgattacggcgacacagtcatgtatgggctcgagtcttccccctgtagttggctccgaaaccatgcacactggggccgaagagtcgttgattttttcctgatcgtgacgcagctggggttttgctgcgtctactttgtttttctcgctgacaactttaagcaggtcattgaagctgcgaatggaacaaccaataactgccacaacaacgagactgtaattctgaccccaaccatggatagcagactgtatatgctgtcctttctcccgttccttgtgctgctcgtcttcattagaaacctccgagcattgtcgatattcagtttgctggccaatatcactatgttggtgtcactcgtgatgatctaccagtttatcgtgcagcgtatcccggacccttcccacttgcctctggtggctccatggaagacttatcctctattcttcggaaccgcaatcttttcattcgaaggcataggaatggtcctgcccctggagaataagatgaaggatccccgaaaattccccctcattctgtacctcgggatggtgatcgtgaccatcttatatatctctctcggatgtttgggctacctccagtttggcgcaaatattcaggggtccatcacgctgaatctgccaaactgctggctctatcagtcagtgaagctcctttacagcattggaattttcttcacttacgccttgcaattttacgtgccagcggagatcatcatcccgtttttcgtatccagggcccctgagcactgcgaacttgtagtagacctgtttgtaagaacagtgctggtgtgcctaacttgtatactcgccatcttgattccacggttggatttagtgatcagccttgttggctccgtgtcatccagcgccttagccttgatcattccacctctcctagaggtcactacattttatagtgagggcatgtctccattgactatcttcaaggacgccctgatctctatccttggatttgtagggttcgtcgtcgggacttacgaagctttatacgagctaattcagccctccaacgcccctattttcattaactccacgtgcgcctttatttag

SEQ ID NO: 206105 - DNA, 1167 bp, synthetic construct
  misc_feature 1..1167: note = Description of Artificial Sequence: Synthetic coding sequence
  source 1..1167: mol_type = other DNA
atgagcacccagcggctgcggaacgaggactaccacgactacagcagtactgatgtgtccccggaggagtcaccatccgaaggactgaataacctgagctcaccaggcagttaccagcgatttggccaatcgaactccaccacatggttccaaacacttattcacctgctgaagggaaacatcgggactggcctgctgggcctccctcttgcagtgaagaacgccgggatcgtgatgggtcctataagcctactcataatcggcatagtggccgtgcactgcatgggcatactggtcaaatgtgcccaccatttttgcaggcggctgaacaaatctttcgttgattatggggacacagtaatgtacggattggagtcatcgccttgcagctggctgagaaaccatgcacactgggggaggcgcgtcgtcgactttttcttgatagtgacacagctgggattctgctgtgtatattttgtgttcctggccgataacttcaagcaggtgatagaagcggccaatggtacaactaacaactgccacaataatgaaaccgtgatcttaacaccaacgatggatagtcggctgtatatgttgtcgttcctgccctttctggttttgctcgtttttataagaaacctgcgggctctctccattttctcgctgcttgctaacatcaccatgttggtcagtctggtgatgatctaccagttcatcgtgcagaggattcccgatcctagccatttaccgctggttgccccgtggaaaacataccctctgttcttcggtactgccatcttttcatttgaggggatcgggatggtattacctctggaaaataagatgaaagatcctcgcaaattccctttaattctgtatcttggaatggtcattgttacaatcctttacatctctctggggtgccttggctacttgcagtttggcgcaaacatccagggaagcattaccctgaatctcccaaattgctggctctatcagtctgtgaagctcctttattcaatcggaatctttttcacatacgctctccagttctatgtgcccgctgaaattattatccctttctttgtttcacgggcccccgaacactgcgagctcgtcgtggatttatttgtacgcactgtgctagtgtgtttaacctgcgagtag

SEQ ID NO: 206106 - DNA, 1452 bp, synthetic construct
  misc_feature 1..1452: note = Description of Artificial Sequence: Synthetic coding sequence
  source 1..1452: mol_type = other DNA
atgagcgtgaccaagagcaccgagggcccccagggcgccgtggccatcaagctggacttaatgtccccccccgagtcagccaagaaactggaaaacaaagattcgacttttctcgatgagagcccttcggaatccgcagggttgaagaagaccaaaggaataactgtgtttcaagcactcatccacctggttaaggggaatatgggcaccggcattctgggactgcccctggctgtgaagaatgcaggaatattgatgggacctctttcattgttggtcatggggttcatcgcatgtcactgcatgcacattttggtgaagtgcgctcagcggttctgtaagcgcctaaataagccattcatggactatggagacactgtgatgcatgggctcgaagcgaatcctaatgcctggttacagaaccacgctcactggggcaggcatattgtctccttctttttaattattacacagttgggtttctgctgtgtgtacattgtgttcttagccgacaacctgaagcaggtggtggaagcagtcaattctacaaccaacaactgctactcgaatgaaacagttattctcaccccgactatggatagtaggctgtacatgcttagcttcctgcccttcctagtgttattagtcctaatccggaatttgcggattctaaccatttttagtatgcttgcaaatatatcaatgctggtaagcctggtgataatcattcaatacattacccaggagatccccgatccatccaggctgcctctagtggcctcctggaaaacctaccctctattcttcggcaccgctattttctccttcgaaagcattggtgttgtgcttccattagagaacaagatgaagaacgcgaggcacttccctgctattcttagcctgggtatgagcatcgtgacctccctgtatatcggtatggctgctctggggtatctgagattcggggatgacatcaaagcctccattagtttaaacctgcctaattgttggttgtatcaatccgttaaactcctgtatatagccggaatcttgtgtacctacgcccttcagttttatgttcctgccgaaattataatcccctttgcaattagccgggtgagcactagatgggcactcccccttgatttgtctattagactggtgatggtgtgtctgacttgccttctggccattttgatcccccgtctggatctggttatcagcctggtgggatctgtttccggcacggccctggctctgataattccaccgcttctggaagttaccacattttatagcgaaggtatgagcccactgaccatttttaaggacgcgctcattagcatcctggggtttgttggcttcgttgtgggaacttatcaggctctcgatgagttgcttaagtctgaagattcacacccattttctaattcaacaacctttgttcggtag

SEQ ID NO: 206107 - DNA, 624 bp, synthetic construct
  misc_feature 1..624: note = Description of Artificial Sequence: Synthetic coding sequence
  source 1..624: mol_type = other DNA
atgaacgacaccgccgtgctgcccctggagaacaagatgaagaacgctaggcacttcccagctatactgagcctcgggatgtcaatcgtgacctccttgtacattggcatggcagccctggggtacttgcgtttcggcgatgacatcaaggccagtataagcctgaacttgccgaactgttggctgtatcagtccgtaaagcttctgtatatagctggcatcttatgcacgtacgcccttcagttctacgtgcccgccgaaattatcattccgttcgctatcagccgggtgtccactagatgggctctcccccttgacctgagtattagactggttatggtctgcctgacttgcctcctggccatcctgattcccaggctggacctcgtcatctcactggtcggaagtgtgagcggtaccgccctggccctgataatacctccactgctggaggtgactaccttttactccgaagggatgagcccccttaccattttcaaggacgccctgattagcattcttggttttgtcgggtttgttgtcggaacataccaggctctagatgagctgcttaagtcagaggactcccatcctttcagcaacagcacaacgtttgtccgatag

SEQ ID NO: 206108 - DNA, 1413 bp, synthetic construct
  misc_feature 1..1413: note = Description of Artificial Sequence: Synthetic coding sequence
  source 1..1413: mol_type = other DNA
atgagcctgctgggccgggactacaacagcgagctgaacagcctggataacggtccccaaagcccctccgaaagctccagctccataaccagcgaaaacgttcatcctgccggagaggctgggctatccatgatgcagacactgatccatctgctaaaatgtaatataggaacgggcctgctggggctccctctggcgataaagaatgcgggactcctggttggtccagtgtctctgcttgctataggcgtgctcaccgtgcactgcatggtgattcttctgaactgtgctcaacacttatcacagcgcctccagaagactttcgtgaattatggggaggccaccatgtacggactggagacttgccctaatacatggctgcgcgcgcatgcagtttggggccgatataccgtttcatttcttttagtgatcacacagctcggcttctgcagcgtgtacttcatgtttatggccgataatctgcagcagatggtggaaaaagcccacgtcacttctaatatctgtcagccccgcgagattctaacgctgacacccattcttgatatcagattttacatgttgattattctgccatttcttatcctcctggtattcattcagaatttaaaggtactgtcagtgttctctaccctcgccaatattaccaccctcggatccatggctctgatcttcgaatacatcatggagggcatcccctatccttcaaatctgccgttgatggccaattggaagacatttcttctgttctttggcaccgcaatctttacgtttgagggggtgggcatggtgctgccactaaagaaccaaatgaagcatccacagcagttctcattcgtactttatctcggcatgtccatagtcattatcttatatattctgctgggcactctcggctatatgaagttcggttctgacacacaagcgtctataactttgaacctgcccaactgttggctctatcagagtgtgaagcttatgtatagtataggcattttttttacctacgcccttcagttccacgtaccggctgagattatcatcccattcgccattagtcaggtgtccgaatcttgggcactatttgtcgatctgagtgtcaggtctgccctggtttgtcttacgtgcgtgtctgcaattctcatcccgcggttggacctcgtgatctcactggttggaagtgtgtcttcgtccgcattggccttaattatccccgccctacttgaaatcgtaatcttttacagcgaagacatgtcttgtgtcacaattgctaaggatatcatgataagcattgtgggcttactcggctgcatctttggtacctaccaggcactgtatgaattgccccagcccatctctcactcaatggctaatagcactggcgtccatgcttag

SEQ ID NO: 206109 - DNA, 1536 bp, synthetic construct
  misc_feature 1..1536: note = Description of Artificial Sequence: Synthetic coding sequence
  source 1..1536: mol_type = other DNA
atgagcctgctgggccgggactacaacagcgagctgaacagcctggacaacggaccacaaagcccatcagagagctcaagttctataacttctgaaaatgtgcatccagccggagaggccgggctatcgatgatgcaaaccctgatacatttgcttaagtgtaacatcggtaccggcctgctgggcttgcctttagccatcaagaatgccggtttgctggtgggaccagtgagcttgctggcgatcggggttctcactgtccactgcatggttattctgctgaattgtgcccagcacttgtcccaacgcctgcagaaaaccttcgtgaactatggtgaggccactatgtatggacttgaaacctgcccgaatacctggctcagagcccatgctgtttggggtaggtggaatttagccctttcacccaggctggaatgttcgggcaagatctccgcccactgtaatcctcatctgcaaggctccagtaactctcccgcacaggctagtcgtgtggccggcatctataggtacactgtgtcttttctgttagtgattacccagttaggtttttgctccgtgtacttcatgttcatggcagacaatttacaacaaatggtggaaaaagcccacgtgacaagtaacatctgccagcctagggaaatattgacccttactccgattttggatatcaggttctatatgctgatcattctgccttttttgattttgctggtattcattcagaacctcaaggtgctgtccgtcttcagcacgctggctaacatcacaacactcggatccatggcgctcatattcgaatatattatggagggaattccctacccgagcaacctgcccctcatggccaactggaagacttttctcctgttcttcggtaccgccatctttaccttcgagggagtgggtatggtcctccccctcaagaatcagatgaaacacccgcagcagttctcctttgtgctgtatttgggtatgagtattgtgattatcctctatatcctgttagggactctcgggtatatgaagtttgggagcgacacgcaggcgtccataaccctgaatctcccaaactgttggttgtatcagtctgttaagctgatgtatagtatcgggatcttctttacttatgctctgcagtttcacgtgcctgcagaaatcattatcccatttgcaatctcccaggtttccgagagttgggccctgttcgttgacctttctgtcagatcagcactggtttgtctgacttgcgtatcagctatactaatcccccggttggatttggtaatctccctggtaggatctgtgtccagtagcgctttggccttgataatcccggccctgctggaaattgtgattttttacagtgaagacatgtcctgcgtgactatcgcaaaggatatcatgatatcaatcgttggcttactgggctgcatttttggaacctaccaggccctgtacgaactgccacaaccaatatcccacagtatggctaactcaaccggcgtgcacgcatag

SEQ ID NO: 206110 - DNA, 1515 bp, synthetic construct
  misc_feature 1..1515: note = Description of Artificial Sequence: Synthetic coding sequence
  source 1..1515: mol_type = other DNA
atggaggccgccgccacccccgccgccgccggcgccgcccggcgggaggagctggatatggatgtgatgcgccccctgatcaatgagcagaacttcgacggcacctcggacgaggaacacgagcaagaattgctgcccgtccagaagcactatcagctcgacgaccaagagggcatctcttttgtacagacacttatgcacctcctcaagggaaatataggcactggcctgctggggcttcctctcgccataaagaatgctgggatcgtgctgggccctatcagcctcgtgtttataggaatcattagtgtgcactgtatgcacattctggtgcgctgctcccactttttgtgcctgcgtttcaagaagtcaactctggggtatagtgacaccgtgagttttgcgatggaagttagcccctggagctgtttgcagaaacaagcagcatggggtcggtctgtcgtggacttcttccttgtgataacccaacttggtttctgctccgtttatatagtgtttttagccgaaaacgtcaagcaggtgcacgaggggttcctggagagcaaagtatttatctcaaatagcacaaactctagcaacccctgcgaaaggcgaagcgtcgacttgcgcatctacatgctgtgtttcctgcctttcattatcctcctggtctttatccgggaactcaagaacctgttcgtattgagtttcctggctaatgttagtatggctgtgagcttggtaatcatctaccagtacgtagttcggaatatgcctgatcctcataacttgcccattgtcgcgggatggaagaagtacccactgtttttcgggacggcagtcttcgcctttgaggggatcggcgtcgtgctgccactcgagaaccaaatgaaggagtccaagcgtttcccccaggccctgaacatcggcatgggaatcgtgaccaccctctatgtcacactcgccaccctgggctacatgtgctttcacgatgagatcaagggatctatcactcttaatctgccccaggatgtgtggctttaccaatccgtcaagatcctgtactcctttggaatcttcgtgacatactccattcagttctatgtgccagcggagattattatacctggtataaccagtaagtttcataccaaatggaagcagatctgtgaatttggtattagatctttccttgtgtcgataacatgcgctggggcgattcttattcccaggctagatatcgttatctcatttgttggtgctgtgagcagtagtactctggcactgatcctgcctccgctcgtcgaaatcctgacgtttagcaaggaacattataacatctggatggtgctgaagaacatctctatcgcttttacaggggtggtcgggtttctgcttgggacttacataactgtggaggaaatcatataccccacacctaaggtagttgccggtacacctcaatccccttttctgaacctaaacagcacttgcctgacctcagggctgaaatag

SEQ ID NO: 206111 - DNA, 1602 bp, synthetic construct
  misc_feature 1..1602: note = Description of Artificial Sequence: Synthetic coding sequence
  source 1..1602: mol_type = other DNA
atggcccggctgcccgccggcatccggttcatcatcagcttcagccgggatcagtggtaccgggcatttatctttatcctcacctttctcttgtatgcctcattccacctatccaggaagccaatatcaatcgtcaaaggggaactgcacaaatactgcacagcatgggatgaggccgatgtgcgtttctcttcccaaaacaggaagagtggctctgccgctccgcatcagctgcccgacaacgagacagactgtgggtgggcgccctttgacaagaataactatcagcagttattgggagccctggactactcgtttctgtgcgcctacgcggttgggatgtatttgtctggaattatcggtgagcgcctgccaatccggtattacctgacctttggtatgttagcctctggggccttcaccgcactgttcggactgggatacttctacaatatccattcctttgggttctacgtggtaactcaggtgatcaatgggctcgtgcaaacaacaggctggccttccgtggtgacttgccttggtaattggttcggaaaggggcgaagaggcctgatcatgggtgtgtggaatagtcacacatcagtgggcaacatcttaggatcacttatagccggatactgggtgtcaacctgctggggactcagctttgttgtccctggtgccatcgttgcagcaatgggcattgtatgtttcctgtttcttatagaacaccccaacgacgttcgatgctcttcgacgctggtcacccactctaagggctacgagaacgggacaaatcgactgcgcctgcagaaacagatccttaaatccgaaaagaacaaacctctggatccagagatgcagtgtttgctgcttagcgatggtaaggggagtatacacccaaaccacgtcgtcatcttgccaggggacggtggatccgggaccgctgcaatcagttttacaggcgccctcaagatccccggagttatcgaattcagtctgtgtctactctttgctaagcttgttagttacaccttcctgttttggttgcctttgtatatcaccaatgtggaccacctggacgctaagaaagcaggtgagctgtctacactcttcgatgtgggcggaatattcggcggtattctggccggcgtgataagcgatagactcgaaaaaagagcaagcacctgcggactgatgttacttctggctgccccaactttatatatattttctacagtgtccaagatggggctagaggcgacaatagcgatgttgttattgtccggggccctagtgtcgggcccctacactctgatcacgaccgccgtttccgctgatcttggcacacataagtctctcaaggggaatgctcacgctctgtccaccgtcaccgctatcatcgatggaacagggagcgtgggagctgccctggggcctctcctcgccgggttgctgtcaccatcaggatggtctaatgtcttctatatgctgatgttcgcggatgcttgtgcactgttgttcttgataaggttgatacataaggagctgtcctgtccagggagcgcaacaggagaccaggtgcccttcaaagaacagtag

SEQ ID NO: 206112 - DNA, 1602 bp, synthetic construct
  misc_feature 1..1602: note = Description of Artificial Sequence: Synthetic coding sequence
  source 1..1602: mol_type = other DNA
atggcccggctgcccgccggcatccggttcatcatcagcttcagcagggaccagtggtatcgggctttcatctttatcctgaccttcctgctctatgctagctttcacctcagccgcaagcctatatcaatcgtgaaaggggaactccacaagtattgtactgcttgggacgaggccgatgtgagattttcatcccaaaatagaaagagcggatctgctgccccacaccagctgccagacaatgagacagactgtggctgggctcccttcgataagaacaactatcaacagctgctcggcgctctggactatagtttcttgtgcgcctatgcagtgggaatgtacctgagcggaatcattggtgagaggcttcctatacgatattatctgacttttggcatgctcgcttccggtgcgtttaccgccctgttcgggcttggttatttctacaacattcacagcttcggattctacgtggttacacaggtcattaatggtcttgtgcaaactaccggctggccatcggtcgtcacctgtctgggcaactggtttgggaagggtaggagaggtttaatcatgggtgtctggaatagtcatacaagcgttgggaatatactgggtagcttaattgctgggtactgggtcagtacctgctggggattaagctttgtagttccaggcgccatcgttgcggctatgggcatcgtgtgcttcctttttctgatcgaacaccccaatgacgtgagatgttcaagtactctggtgacccactctaagggctacgagaatggaaccaatcggctcagactccagaaacaaattttaaagtcagagaagaacaagcctctcgaccctgagatgcaatgtctactgttgtcagacggaaagggatccatacatccaaaccacgtggtcattcttcctggcgacggcggaagtggaacagccgctatctccttcaccggcgcactgaagatcccaggtgtgatagagttctctctgtgcctccttttcgcgaaacttgtttcctacaccttcctgttttggcttcccctctacatcacaaacgtggaccatctggacgccaaaaaggcaggcgagctttcaacactgttcgacgtgggcggtatcttcggaggcatcttagccggggtaatcagtgaccgcttagaaaagcgcgcttcgacttgcgggctgatgctgctgctggccgcacctacattatatattttttctaccgtgtccaagatgggtctggaggctactatagctatgcttctgctatctggagcgttagtctccggaccctacactctgattaccaccgctgtaagtgctgatttgggcactcataaatcccttaaggggaacgcgcacgccctgtctacagtgacagccattatcgacgggacaggctcagtcggagctgcgttgggccctctgctggccggtctgttgagcccgtcagggtggtctaatgtgttctacatgctgatgttcgcagatgcctgcgcgttactattcctgatccggctaatacacaaagaactgtcttgccctggctccgctaccggggaccaggtcccattcaaggaacaatag

SEQ ID NO: 206113 - DNA, 57 bp, synthetic construct
  misc_feature 1..57: note = Description of Artificial Sequence: Synthetic coding sequence
  source 1..57: mol_type = other DNA
atggcccggctgcccgccggcatccggttcatcatcagcttcagccgggaccagtag

SEQ ID NO: 206114 - DNA, 57 bp, synthetic construct
  misc_feature 1..57: note = Description of Artificial Sequence: Synthetic coding sequence
  source 1..57: mol_type = other DNA
atggcccggctgcccgccggcatccggttcatcatcagcttcagcagggatcagtag

SEQ ID NO: 206115 - DNA, 1464 bp, synthetic construct
  misc_feature 1..1464: note = Description of Artificial Sequence: Synthetic coding sequence
  source 1..1464: mol_type = other DNA
atgatgcacttcaagagcggcctggagctgaccgagctgcagaacatgaccgtgccggaggatgataatatctcgaatgatagcaacgacttcaccgaagtagagaatggccaaattaacagtaaatttatttctgatagagaatcccggcgttccctgaccaactctcacctggaaaaaaagaaatgtgacgagtatatccctggtaccacgagcttaggaatgtcagtgttcaacctttccaacgcaattatggggtccgggatactgggtctggccttcgccctggctaacaccggaatcttgctgttcctcgtcctgctgacctcagtcacattacttagcatttattcaatcaacttattactgatttgctccaaagaaaccgggtgtatggtgtacgaaaagttgggggaacaggtttttgggacaacgggtaaattcgtgatatttggcgccaccagtctgcaaaacaccggggcgatgctgagctacctgtttatcgtgaaaaacgagctgccctccgcaatcaagttcctgatgggcaaggaggagacctttagcgcatggtacgtggatggacgagtgctcgtcgtgatcgtaacattcggcatcatcctgcccttgtgtctgctaaaaaatctcggctatttgggatatacctccggattctctctgagctgcatggtatttttcctgatagtcgtgatctacaagaagtttcagatcccatgtatagtaccagagctaaatagtacaatctctgccaattctacaaatgctgatacttgcacgcctaagtacgtgactttcaacagtaagacagtgtacgcactgccgacaattgcattcgccttcgtatgtcacccctcggtacttccaatttactcagaactgaaggaccggagtcagaagaagatgcagatggtgtcgaacatctcattttttgccatgttcgtgatgtattttctgacagcaatattcggatatcttaccttttatgataacgtacagtcagatctcttgcataaatatcagtcaaaggatgatattctgattcttactgtgcgcctggccgtaatcgtcgccgtaatcttaacagtgcccgttctgttctttactgtcaggtccagtctgtttgagctagccaaaaagaccaaatttaatctgtgcaggcataccgtggtgacgtgcattctcttggtggtgatcaatcttctggtaatcttcataccttctatgaaagacatcttcggagttgtgggggtgacgtccgcgaacatgctgatcttcatcttaccttcctcattatacttaaaaataacggaccaggacggagacaaaggcacacagcgaatctgggcagccctatttttggggctaggcgttctgttcagcctggtgtcaattccactggtgatatacgactgggcctgcagctcaagttctgacgaaggacactag

SEQ ID NO: 206116 - DNA, 1464 bp, synthetic construct
  misc_feature 1..1464: note = Description of Artificial Sequence: Synthetic coding sequence
  source 1..1464: mol_type = other DNA
atgatgcacttcaagagcggcctggagctgaccgagctgcagaacatgactgtgcccgaggacgataatatatctaacgacagcaacgattttacagaagttgaaaatggacagataaacagtaaattcatctcggaccgggaatccaggcggtccctgactaatagccatcttgaaaaaaagaagtgcgacgagtatatccctggaactacctctctaggaatgagtgtgttcaatctatcgaacgcaattatgggcagtgggatccttggactggcctttgccctggctaacactggaattctcctctttttggtgctgctgactagcgtcaccttgctgtccatatactcaatcaatttacttctcatttgcagcaaagagaccggctgtatggtgtacgagaagttaggcgagcaggtctttgggaccacaggcaaattcgtgatatttggcgctaccagcttgcagaacaccggcgctatgctcagttacttattcatcgttaagaacgagctcccctctgccattaaatttttaatgggtaaggaggagacttttagtgcttggtacgtcgatggcagagtgctcgtcgttattgttacattcggcataatcctgccgctttgtctgctgaaaaacctcggctatctcggctacacctccggttttagcttgtcctgtatggtgtttttcctgatcgtggtaatatacaaaaaattccagatcccttgcattgtgcccgagctgaactcaactatcagcgctaattccacaaacgccgatacttgcacgcccaaatatgtaacgttcaattccaaaactgtttacgcgttgcctaccatcgcttttgctttcgtttgccatccgtctgtgttgccaatatatagcgagctgaaggaccgttcccaaaagaaaatgcagatggtgtctaatatttcattttttgctatgttcgtaatgtacttcttaaccgccatcttcggatatctaactttctatgacaacgtgcaaagtgacctgctgcataagtatcagtctaaagacgatatcctgattctgaccgtaagactggctgtgatagtggccgtcatactgacagtccctgtactattttttactgtgcgcagctccttatttgagctggcaaagaaaacaaagtttaatttgtgtcgtcacacagtggtgacatgcatcctcctggtcgtaataaatctgctcgtgatcttcattccctctatgaaggacattttcggggtcgtgggagttacgtccgctaatatgttgatcttcatcctccccagtagcttatacctcaaaataaccgaccaagacggggataagggcacacagcgcatatgggccgcgctgttcctggggctcggggtcctctttagccttgtgagcataccattagtgatctacgactgggcttgtagttcatctagcgatgaaggtcattag

SEQ ID NO: 206117 - DNA, 1464 bp, synthetic construct
  misc_feature 1..1464: note = Description of Artificial Sequence: Synthetic coding sequence
  source 1..1464: mol_type = other DNA
atgatgcacttcaagagcggcctggagctgaccgagctgcagaacatgactgtgcctgaggacgataatatctccaacgattcgaacgactttactgaagtggagaatgggcaaattaattcaaaatttatctccgacagagagtccagaaggtctctcacaaactcacacttagaaaaaaaaaagtgcgatgaatacattcccgggacgacatccttaggaatgagtgtgttcaacctgtcgaatgccattatggggtctggaatcctggggttagcgttcgccctggccaacactggaattctcctcttcctcgtgctcctgactagtgtgacgttgctctctatctactccatcaatttactgctgatctgctcaaaagagacaggttgcatggtctatgaaaaactcggtgagcaagtgtttggaaccacaggcaagtttgtgatttttggtgcaacttccctgcaaaacacaggggcaatgctcagctatctgtttatagtgaagaacgagcttccaagcgcaatcaagttcctcatgggaaaagaagaaaccttttctgcctggtacgtcgatgggagagtgctcgtagttattgttacctttggcataatccttccactgtgtctgctcaagaatctggggtacctaggttacacctcaggcttcagtctctcatgcatggtgttttttttgattgttgtcatctataaaaagttccaaatcccctgtattgtgcccgaactcaacagcaccatttccgccaacagcactaacgcagacacttgtactcctaagtatgtcacatttaattccaagaccgtctacgccctccctaccatagccttcgccttcgtgtgtcatccgtctgttcttcctatatattccgaattaaaagaccgctcacagaagaaaatgcaaatggtgtctaacatcagctttttcgcgatgttcgttatgtattttcttactgctattttcgggtacctgactttctatgataacgtgcagagcgatttgctgcataagtaccagagcaaggacgacatcttgatcctgacggtgaggctggctgtaattgtggccgtgattctgactgtgccagtcctgttcttcactgtgagatcctcactcttcgagctggcaaaaaaaaccaagttcaatctgtgtcggcatacagtggtgacctgcatactgctcgtggtgataaacctgctggttattttcatcccctccatgaaggacatattcggagtggtgggagtgacaagcgccaatatgctcatatttatcctgccgtcatccctatatttgaaaattacagaccaagatggtgataagggcactcagaggatttgggccgctctcttcctcggactgggcgtgctcttctccctggtgagcattcccctcgtaatatacgactgggcctgttcctcttcatccgatgagggccattag

SEQ ID NO: 206118 - DNA, 1464 bp, synthetic construct
  misc_feature 1..1464: note = Description of Artificial Sequence: Synthetic coding sequence
  source 1..1464: mol_type = other DNA
atgatgcacttcaagagcggcctggagctgaccgagctgcagaacatgaccgtgccagaagacgacaacatctcaaacgattcgaacgactttactgaggtggaaaatgggcagataaactcaaaattcatttcggaccgggagtctcgacggtcattgacgaactcacacctcgagaaaaagaagtgtgatgaatacattccaggcaccacatcactgggcatgagcgttttcaatttatccaacgcaatcatgggctctggtatactcggactggcattcgccctggctaatacaggaattctgctctttctcgtgttgctcaccagcgtgacactgctatccatctactctattaatctgctcctgatatgcagcaaagagacaggatgtatggtttacgagaagctgggtgagcaggtgtttgggaccactggaaaatttgtgatcttcggggcaacgtccttgcagaatactggagctatgctgtcctatctgtttatagtaaagaacgagcttcccagcgctataaagttccttatgggcaaggaggagaccttcagcgcgtggtacgtcgacggcagagtcctggtcgtaatagtcacctttggcattatcctgcccctgtgcctattgaagaacctcggctatctgggttatacgagcggcttttccctgagttgtatggtgtttttcctcatcgttgtcatctataagaagtttcagataccgtgcatcgttccagagctgaacagcacgatcagcgccaactccacgaacgcagatacctgcaccccgaagtacgtcactttcaattctaagactgtctacgctttaccaacaatagcttttgcattcgtctgtcacccatcagtgctgccaatatactctgagttgaaggatcggtcacaaaagaaaatgcagatggtgagtaatatcagcttcttcgcaatgttcgtaatgtacttcctgaccgccatttttgggtatctcaccttttacgataacgtgcagtcagacctgctgcacaagtatcagagtaaggacgatatcctaattctcaccgtgcgcctcgccgtcatcgtggccgtaattctgactgtaccagtgctattttttaccgtgcgaagctccttgtttgaacttgccaagaagacgaaattcaatctgtgccgccacaccgtcgtgacatgcattttattagtggtcatcaatctgcttgtcatttttatcccatccatgaaggatatctttggcgtggttggagtgacctctgctaatatgctgatttttatactgcccagcagtctgtacctgaaaatcaccgatcaggatggtgacaagggcacacagcgtatctgggctgcgctctttctcgggctgggagtcctgtttagccttgtctccattcccctggtaatttatgactgggcatgtagttcgtccagtgatgaaggtcactag

SEQ ID NO: 206119 - DNA, 1521 bp, synthetic construct
  misc_feature 1..1521: note = Description of Artificial Sequence: Synthetic coding sequence
  source 1..1521: mol_type = other DNA
atgaagaaggccgagatgggccggttcagcatcagccccgacgaggactcctcaagctactcctcgaactcagactttaattatagctacccaaccaaacaggccgcgctcaagtctcactacgctgacgttgaccctgagaatcagaatttcttactggagtcaaatctcggaaagaagaaatacgaaaccgaattccaccctggtaccacctcttttggaatgtccgttttcaatctgtcaaacgccatcgtgggtagcggcatcctcgggttgtcctatgctatggccaacaccggcatcgctctgtttatcattcttctcaccttcgtctctatcttcagcctctactccgtgcacttgctgctcaagaccgctaatgagggtggcagtctcttgtacgagcaactcggctacaaagccttcggcctggtggggaagctggcggcatccggcagcatcactatgcagaatatcggcgcaatgtcttcttacctttttatagttaaatatgagttgccccttgtgatccaggcactcactaatatcgaagacaagacagggctctggtacctgaacggcaactatctggttttactagtgagcctggtggtaattctgccactgtcactgttcaggaatttgggatatctcggctacactagcgggttgagcctgctctgtatggtctttttcctgatcgtagtaatctgcaagaagtttcaagtgccctgccccgtcgaagctgccttgataatcaatgagaccattaatacgacactgacacagcctacagcgctcgtgcccgccttatctcacaacgtgacggaaaacgattcctgtcgcccccactacttcatcttcaacagtcagacagtgtatgcggtgcccatacttatcttttccttcgtctgtcaccctgccgtcctgcccatttacgaggagctcaaagacagatctcgtagacgtatgatgaacgtgagtaagataagctttttcgccatgtttctcatgtatttacttgccgccttgttcggttatcttacattctatgagcatgtggaaagcgaactgttgcacacgtactcaagcattctcgggactgacatcctgctgcttatagtgcggctggctgtgcttatggccgtaaccctgacagtgcccgttgtcatttttcccataagaagttctgtgacgcatctgttatgtgcctctaaggattttagctggtggagacactctttgattaccgtgagtattcttgcctttactaacctcttggtaatctttgtgccaacgattcgagatatatttggtttcatcggcgctagtgccgcctctatgctgatctttattcttcctagcgccttctatatcaaattagtaaaaaaggagcccatgaaaagcgtccaaaaaattggcgcccttttctttcttctctccggagttctcgtgatgaccgggagcatggcactgatcgtgctggactgggtacacaacgcccccggcggcggccattag

SEQ ID NO: 206120 - DNA, 1644 bp, synthetic construct
  misc_feature 1..1644: note = Description of Artificial Sequence: Synthetic coding sequence
  source 1..1644: mol_type = other DNA
atggaccccatggagctgcggaacgtgaacatcgagcccgacgacgagagcagctcaggagaatccgctcccgattcttacattggcatcgggaattccgaaaaagcagcgatgagttctcaatttgcaaatgaagacaccgagtcccagaagtttttaaccaacggttttctggggaagaaaaagctggctgactatgctgacgaacaccatcccgggacgacatcctttggcatgtcatccttcaacctcagtaatgccatcatggggtcagggattctcggcctgtcctatgccatggctaacaccggtatcatcctcttcatcattatgctactggctgtcgccatactcagcctgtatagcgtgcacctgctgctgaaaacagcaaaggaaggcgggtcgctgatttatgagaagctgggggaaaaagccttcggatggccgggaaagattggcgccttcgtaagtattacaatgcagaacataggcgccatgagttcttaccttttcattataaagtacgagctccccgaggtcatcagggcttttatgggacttgaggagaatactggcgaatggtaccttaatggcaattacttaatcatcttcgtctctgtgggcatcatcttgcccctgtcactgctgaagaatctcggatacctggggtacactagcggctttagcctgacatgtatggtgtttttcgtgtcagtcgtgatatacaaaaagtttcagattccgtgcccactgcccgtcctcgatcattccgtaggcaacctgtcattcaataatacactacccatgcacgtggtaatgctccctaacaactcagagtcctctgacgtgaattttatgatggactacacacatcggaatcctgctggtctggacgaaaaccaggccaaagggagcttacatgactctggcgtagagtacgaggcccactccgatgacaaatgcgagcctaagtatttcgttttcaacagcagaacggcctatgcgattccgattctagtgtttgctttcgtctgtcaccccgaggtcttgcctatatacagcgaactaaaagaccggtcacgccggaagatgcagacggtgagcaacatctctattaccggcatgctcgtgatgtatctgttggccgccctttttggctacctgacattttatggtgaagtggaagatgaacttctacatgcttactccaaagtgtacacactggacatccccctactgatggtgcgtctggcggtcctagtagccgtgaccctgacagtgcctattgtgctgttcccaatccggacttccgtgatcacgctgctgttcccgaaacgccccttctcgtggatacgacattttctgattgcagccgttctgatcgcgctcaacaacgttctggtgattctggtgccaactattaaatatatatttggatttattggggcctcatcagccacaatgttgatctttattctccccgctgtgttttacttgaagctggtgaagaaagagaccttccgaagcccccagaaagttggggctttgattttcctggtcgtgggcatcttttttatgattggctctatggctctcatcattattgattggatatatgacccgcctaacagtaagcatcactag

SEQ ID NO: 206121 - DNA, 780 bp, synthetic construct
  misc_feature 1..780: note = Description of Artificial Sequence: Synthetic coding sequence
  source 1..780: mol_type = other DNA
atggaccccatggagctgcggaacgtgaacatcgagcccgacgacgagtccagtagtggagagtccgcccctgattcatacattggaatcggaaatagtgagaaggctgcaatgtcttcccaatttgccaacgaagacaccgaaagtcagaagtttctgaccaacgggttcctcggcaagaaaaaactcgctgactacgccgacgagcatcatcctggaactactagcttcggcatgagcagttttaacctctccaacgccatcatggggtccgggattctgggcttgagctatgctatggcaaacacaggaatcatcctgttcattatcatgttgttagctgtagccatcctctccctctactcggttcatctcctgcttaagacagcgaaagagggaggctctttgatctatgagaagctcggcgagaaggcatttggctggcctgggaaaatcggcgcattcgtatccattactatgcagaacattggggcaatgtcctcttacctctttataatcaagtacgagctgcctgaggtgatccgggcctttatgggcttagaggagaataccggcgagtggtatctcaacggcaactacctgatcattttcgtgagtgtcggcatcatcttgccactgagcctcctgaaaaatctgggctatctgggctataccagcgggtttagcctgacttgcatggtcttttttgtttctgtcatgatttataagaagatcagcttctttctacaaatctttatcattctgaagctcttcttctag

SEQ ID NO: 206122 - DNA, 1644 bp, synthetic construct
  misc_feature 1..1644: note = Description of Artificial Sequence: Synthetic coding sequence
  source 1..1644: mol_type = other DNA
atggaccccatggagctgcggaacgtgaacatcgagcccgacgacgaatcctcttcaggggagtccgcaccagattcctacattggcattggcaactccgagaaggccgcaatgagctcccaattcgctaacgaggataccgagtcacagaagtttctgactaatggctttttggggaagaaaaagttagctgactatgcagacgaacaccacccgggcactacctcttttggcatgtcctcgtttaatttgagcaatgcaatcatgggatccggcatcctgggtctctcttacgctatggccaatactggcatcatcctgttcatcattatgctccttgcagtcgctatcctcagcctctactccgtacatcttctcctcaaaactgcaaaggaaggaggaagtcttatatacgagaaattgggcgaaaaagcattcggttggcctggaaagataggtgcctttgtttcaatcacaatgcagaacatcggtgctatgtcatcttatctgtttataatcaaatacgagctgcctgaagtcatcagggctttcatgggattagaggagaataccggtgagtggtatcttaacggaaactatctcatcattttcgtgtctgtgggaattatcctgcctctatcactgctcaaaaacttaggctacctgggttatacttccggattttcacttacctgcatggttttctttgttagcgtagtcatatataagaagttccagataccttgccccttgccagtcctggaccattccgtaggtaatctctcattcaataacacactcccgatgcatgtcgtcatgctcccaaataacagcgaaagctcagacgtgaacttcatgatggattacactcacaggaaccccgccgggctcgatgagaaccaggcaaagggaagtcttcacgattccggcgttgaatatgaggctcacagcgacgacaagtgtgaacctaaatactttgtgtttaacagccggactgcctacgctatccccatcctggtattcgcctttgtgtgtcacccggaagtgctacctatctatagcgaactgaaggatagatcaagacggaaaatgcagacagtctccaatatttccataactgggatgttagtgatgtatcttctggcagccctgtttgggtacttaaccttctatggagaagtagaagatgagctgctgcacgcctattcgaaagtgtatactttggatataccgctgcttatggtaagactcgccgtgctggttgctgttacactcacagttcccatagtccttttccctatccgcacctcagtgataactctgctgttcccaaagcgaccgttcagctggatccgacatttcttgattgctgctgtcctgatcgcgctgaacaatgtgctcgtgatcttggttccaactatcaaatatatttttggctttattggtgcttcatcagctaccatgctcatcttcatcttacccgccgtgttttatttaaaactggttaaaaaagagacctttcggtcacctcagaaggtcggggctctcatcttccttgtcgttggaatattctttatgatcggatccatggccctcatcattatcgattggatttacgatccgcccaattccaaacatcactag

SEQ ID NO: 206123 - DNA, 579 bp, synthetic construct
  misc_feature 1..579: note = Description of Artificial Sequence: Synthetic coding sequence
  source 1..579: mol_type = other DNA
atggaccccatggagctgcggaacgtgaacatcgagcccgacgacgagtcttcatcaggggaaagcgcacctgacagctatatcggtatcgggaacagcgagaaagccgctatgtcaagtcagttcgctaacgaagataccgagagtcaaaaatttctcaccaacggcttccttggaaagaagaaactagcggactatgccgacgagcatcatccaggaacaaccagcttcggaatgtcctcattcaatctgtcaaatgcgataatgggttctgggatactgggactgagctacgcgatggccaataccgggataatactgtttataatcatgctgctcgcggtcgccatcctaagcttatactccgttcatcttctgcttaaaacggcaaaagagggaggctcactcatctatgagaaactaggagaaaaggcctttggctggcctggaaagatcggggcctttgtctctattacaatgcaaaatattggggcaatgagttcttatctattcataatcaagtacgaactgcccgaagttatcagagcattcatgggcctcgaagagaacactggctag

SEQ ID NO: 206124 - DNA, 660 bp, synthetic construct
  misc_feature 1..660: note = Description of Artificial Sequence: Synthetic coding sequence
  source 1..660: mol_type = other DNA
atggaccccatggagctgcggaacgtgaacatcgagcccgacgacgagtcctcatccggtgagtcagccccagattcttatataggcattggcaatagtgagaaagcagccatgtctagtcagttcgcaaacgaagacacagagagtcagaagttcctcactaacggcttcctaggcaagaagaagctggctgattacgctgacgaacatcaccccggaactactagtttcggcatgtcatccttcaatctgtcaaacgcaattatgggcagtgggatactgggcctttcctacgccatggcaaatacagggataattctcttcataattatgctactggctgtagccattctgagtctatatagcgtccacctcttgctgaaaactgctaaggagggcggctctttgatctacgaaaaactgggagagaaagcatttggctggcctggaaagattggcgcatttgtgagcattacgatgcagaacattggcgctatgtcctcatatctgtttatcataaagtacgaactgccagaagttattcgtgccttcatgggcttggaagagaacacgggtgaatggtatctaaatggcaattatctaatcattttcgtctcagtgggcatcatactgcctctgagtttgctgaagaatctgtag

SEQ ID NO: 206125 - DNA, 1419 bp, synthetic construct
  misc_feature 1..1419: note = Description of Artificial Sequence: Synthetic coding sequence
  source 1..1419: mol_type = other DNA
atggagctgcaggaccccaagatgaacggcgccctgcccagcgacgctgtaggatacaggcaggagagggaggggttcctgccatctcgaggccctgcccctggttccaagccagtacagttcatggattttgaggggaaaacctcttttgggatgtcagtgttcaacttaagtaacgccatcatgggctccggcattctggggcttgcttacgctatggcccacacgggtgtgatcttctttcttgctctgctgctctgcattgccctcttgagtagctattccatccacctgctcctgacatgtgccggcatcgctggtatccgcgcatacgagcagctcgggcagagggcctttggacccgcgggaaaagtagtggtggcaacggtgatctgtctccacaacgtcggggcaatgtcctcctacctcttcattatcaagagcgagctgcccctggtgattgggacgtttctatacatggatccagaaggggactggttcctgaagggcaatttgctaatcattatcgtaagtgtcctgattatactcccactggctttaatgaaacacctgggatacctcggatatacaagcggtctgagccttacctgcatgctcttcttcctggtatccgtcatctacaagaagttccagctgggctgtgcaataggacacaacgagacagccatggagagcgaggcattggtgggcctgccctctcagggcctgaacagctcatgcgaagctcagatgttcactgtggattcccagatgagttatacagtgcccattatggcctttgccttcgtgtgtcaccctgaagtccttccaatatacacggagctctgtagacccagcaagagacgtatgcaggctgtggccaacgtctcaataggcgctatgttttgtatgtacggacttacggcaacctttggatacctgacgttctattcctcagtgaaagccgaaatgctgcacatgtacagccagaaggatcctcttatcctttgcgtccgactagcagtactccttgctgtgacattaaccgtcccagtggtacttttccccatcagaagagccctccagcagctactgttcccggggaaagccttttcttggcctcggcacgtggcgattgcactgattcttctggtactagtgaatgtcttagtgatctgcgtcccgacaatacgcgatatctttggggtgattggtagcacatccgcaccctctctcatcttcatcttacctagcatcttctatctcagaatagtgcctagcgaagtcgagccgttcctctcgtggcccaaaatccaggccctgtgtttcggcgttctgggagtactttttatggctgttagcctaggcttcatgttcgcaaattgggcgaccgggcagtcccgcatgagcggccactag

SEQ ID NO: 206126 - DNA, 1266 bp, synthetic construct
  misc_feature 1..1266: note = Description of Artificial Sequence: Synthetic coding sequence
  source 1..1266: mol_type = other DNA
atgagcgtgttcaacctgagcaacgccatcatgggcagcggcatcctcggattggcctacgccatggcacatacaggcgtcatttttttccttgccctgttgctgtgcatcgccctactctcctcctatagtatccacctgctgttgacctgtgccggcattgccggtatccgggcctacgaacagctgggccagagggcctttggccccgccggcaaggtggtcgttgctacagtcatttgcctccataatgttggggcgatgagcagctatctctttatcattaagtccgagcttcccctcgtgattggcaccttcttgtatatggatcccgagggggattggtttctgaaagggaacctgctaatcatcatcgtctctgtgctgattattctgcccctagctttaatgaagcacctgggctatcttggctacacatcgggacttagcttgacgtgtatgttattcttccttgtgtctgtaatttataaaaagttccagctgggatgcgcaatcgggcataacgagaccgccatggaatctgaagccctggtggggctcccctcccaaggcctaaacagctcctgtgaggcacagatgtttacagtggattcacaaatgtcctacaccgtgccgatcatggcgtttgcgtttgtatgtcatcctgaagttcttcccatttatacggagttgtgcaggccttctaaacggcgtatgcaagctgtggccaatgtttccataggggcaatgttctgcatgtacggcctcacggctaccttcgggtacctgaccttttactcatccgtgaaagcagagatgcttcacatgtattcgcagaaagaccctttgattctgtgtgtacgtctggccgtactgctggcggttacacttacagtgcccgtagtattatttccgattagaagagcgcttcagcagttgctgtttccagggaaagcttttagttggcctagacatgtggctatcgccctcatcctgctggtgttggtcaatgtgctggtcatctgcgtgcccacaatcagggacatttttggcgtgatcgggagcacgagcgcgcctagcctcatctttattctgccaagcatattctatctccgaatagttccctccgaagtggagccgtttctctcatggccaaagatccaggctctctgctttggcgtgctcggtgttctgttcatggcagtaagcctggggttcatgttcgctaattgggccacaggtcagtccagaatgtcgggtcattag

SEQ ID NO: 206127 - DNA, 1419 bp, synthetic construct
  misc_feature 1..1419: note = Description of Artificial Sequence: Synthetic coding sequence
  source 1..1419: mol_type = other DNA
atggagctgcaggaccccaagatgaacggcgccctgcccagcgacgccgtaggatatagacaagagcgagaaggcttcttgccaagtaggggcccagccccaggctccaaaccagtccagttcatggattttgaggggaagacatctttcgggatgagtgtgttcaacctgagtaacgcgatcatgggctcaggcattttaggcctggcctacgccatggcccacaccggcgttatcttcttccttgccctgcttctatgcattgctctacttagttcttatagcatccatctccttctgacatgtgcagggatcgcgggaatcagagcgtacgaacagctgggacagagggcattcggccctgcaggcaaagtggttgtggctaccgtaatttgcttgcataatgtgggcgcaatgtcctcctatttgtttattatcaaatcagaactccctctggtgattggaacatttctatatatggatccggagggtgactggtttctgaaagggaacctgctgattatcatagtttctgtacttattatcctgccactggcccttatgaagcacttaggctacctcggctacacgagtggcctcagcctaacctgcatgctgttcttccttgtgtcagtcatctacaaaaagttccagctgggctgcgctattggacataacgaaacagcaatggagagcgaggccctggtcggcctcccttctcaggggctgaactcctcatgcgaagctcagatgttcactgtggatagccaaatgagttacactgtccctataatggccttcgctttcgtgtgtcaccccgaggtgttaccaatttataccgaactgtgtcggccctccaaaagaaggatgcaggctgtggctaacgtcagtatcggagcgatgttctgtatgtacgggctgacggctacctttgggtatctgacattctatagttctgtgaaagccgagatgttacacatgtattctcagaaagatcctctgatcctgtgcgtccgcttagccgtcctgctagcagtgacacttactgtgcctgtggttctttttcccattcgcagagcactgcagcaactgttattccctggcaaggccttcagttggccccggcatgtggccatagccctcattctcctcgttctagtgaatgtcctggtgatttgtgtcccgaccattcgggacatcttcggggtaatcggctcaacgagtgcaccatctttaattttcattctcccctctattttttacttacgcattgtaccctcagaggttgaaccttttttaagctggccaaagatccaggctctgtgtttcggtgtactaggggtgctctttatggccgtgtctctaggatttatgttcgcaaattgggctacaggccagtcaaggatgtcaggccactag

SEQ ID NO: 206128 - DNA, 660 bp, synthetic construct
  misc_feature 1..660: note = Description of Artificial Sequence: Synthetic coding sequence
  source 1..660: mol_type = other DNA
atggagctgcaggaccccaagatgaacggcgccctgcccagcgacgccgttggataccgccaggaaagagagggctttctgccatctagagggcccgctccaggctcaaagcctgttcagtttatggatttcgagggcaaaacgagcttcggcatgtccgtgtttaatctaagcaatgctatcatgggtagtgggatacttggactggcctacgcgatggctcataccggagtgatcttttttctggcccttctcctctgtattgccctgttaagctcctactcaatccatctcctgcttacctgtgcagggatcgccggaattcgggcatatgaacagctgggacaacgcgccttcggacccgccgggaaagtggtcgtcgccaccgtcatctgtctgcataacgtcggtgccatgtcttcctatctgtttatcataaagtctgagctacccctggttattggcactttcctatatatggatccagagggagactggtttctgaagggcaacctgttgatcatcattgtgagcgtgcttatcattctgcctctggctctgatgaaacacttaggctatctgggatatacctccggattatccctgacttgcatgctcttctttctggtgtcagtgatctacaagaagttccagctctag

SEQ ID NO: 206129 - DNA, 576 bp, synthetic construct
  misc_feature 1..576: note = Description of Artificial Sequence: Synthetic coding sequence
  source 1..576: mol_type = other DNA
atggagctgcaggaccccaagatgaacggcgccctgcccagcgacgcagtcggctacaggcaggaaagggaaggcttcctgccgtcccgtggccctgctcctgggtcaaagcctgttcaatttatggacttcgaggggaaaactagcttcggcatgtctgttttcaacctgtcaaacgcaatcatgggctcagggatcctgggactcgcttacgccatggcacatactggggtaatcttttttctggccttactgctgtgcatagccctgctgagctcgtattccatacatttgctgctcacgtgcgctggcattgccggaatccgtgcttacgagcaacttggacagcgcgccttcggtcccgctggcaaggtggttgtggctacagtgatctgcctccataacgtgggagctatgagttcttatcttttcattatcaagtcggagcttccgctggtgatcggtacctttctatacatggaccccgaaggagactggttcctcaagggaaaccttctgattattattgtgagcgtgcttatcatactgcccttggccttaatgaaacacttgtag

SEQ ID NO: 206130 - DNA, 495 bp, synthetic construct
  misc_feature 1..495: note = Description of Artificial Sequence: Synthetic coding sequence
  source 1..495: mol_type = other DNA
atggagctgcaggaccccaagatgaacggcgccctgcccagcgacgccgtgggctatcggcaggaacgcgaagggtttctgccctcccgcggaccagccccaggcagcaaacctgtgcagtttatggacttcgagggcaaaacctcatttggtatgtctgtattcaatctaagcaacgcaatcatgggctctggaatattaggactagcctatgccatggcacatacgggcgtgatattttttctggccctgctcctgtgtatcgccctactcagctcatactctattcatttgcttctcacctgcgctggtatcgcaggcattcgagcgtacgagcagcttgggcagagggcgttcggtccagcgggcaaggtggtggtcgctacagtcatttgcctgcacaatgtgggagctatgtcaagttatctgttcatcatcaagtccgaattgccactagtgattggaactttcttgtacatggaccctgaggggtag

SEQ ID NO: 206131 - DNA, 840 bp, synthetic construct
  misc_feature 1..840: note = Description of Artificial Sequence: Synthetic coding sequence
  source 1..840: mol_type = other DNA
atggagctgcaggaccccaagatgaacggcgccctgcccagcgacgccgtcgggtatcgacaggaacgggaggggtttttaccaagccgaggaccagcccctggcagtaaaccagtgcagtttatggattttgagggcaaaacaagctttggcatgtccgtattcaatctatccaacgctatcatgggtagcgggatccttgggttggcttatgccatggcccacaccggagtgatcttctttcttgcattgctgctgtgtattgctctgctgtcgtcctatagcatccacctgctcctgacttgcgccggaattgccgggatacgcgcgtatgagcaactgggccagagagcgtttggtcccgccggtaaagtagtggtggccactgttatatgtcttcataatgttggagcgatgagctcttacctatttataatcaagtccgagctacccctggttatcggaacgttcctttatatggaccccgagggggactggtttttgaaaggaaacttgctgatcatcattgtgagcgtgttgatcattctgccgctcgccctgatgaaacacctggggtacctgggatacacctccggtctgtccttaacctgcatgttgttcttcctggtgtctgtgatctataaaaagttccaattaggctgtgccatcggccataacgaaacggctatggagtctgaggcactagttgggctgcccagccagggcctcaactcttcctgtgaagctcagatgtttacagtggattcccagatgagctacacagtcccgatcatggccttcgcatttgtctgccatccggaagtgctgcctatttactag

SEQ ID NO: 206132 - DNA, 819 bp, synthetic construct
  misc_feature 1..819: note = Description of Artificial Sequence: Synthetic coding sequence
  source 1..819: mol_type = other DNA
atggagctgcaggaccccaagatgaacggcgccctgcccagcgacgctgtaggttacaggcaggaaagggaaggctttttgccctcccgaggcccagccccaggatccaaacccgtccaattcatggatttcgagggaaaaacctctttcggtatgtccgtgtttaacctgtcgaatgccattatgggctcgggaatcctgggattggcatacgctatggctcacaccggagtgatctttttcttagctctcctgctatgtattgcattgctgtcgtcttactcaattcacctgttactcacttgtgcaggtattgcgggaattcgggcctacgaacagctgggacagagggcttttgggcctgcaggaaaagttgtggtggcaacagtcatctgcttacacaacgtgggcgccatgtcttcttacttattcatcatcaagagcgagctgcctttggtgatcggaacgtttctctatatggatccagaaggtgattggttcctcaaaggcaatcttcttatcattattgtgtcagttcttataatcctgccattagctctcatgaagcatctcgggtatctgggttataccagtgggctgtcacttacctgcatgctgttctttctggtgagtgtgatctataagaagtttcagttaggctgcgccattggccacaacgaaacagccatggaatccgaggctttagtgggattgccatcacaaggacttaatagttcatgcgaagcacagatgttcacagttgattcacagatgagctatacagtgccaattatggcctttgcgtttgtgtgccactag

SEQ ID NO: 206133 - DNA, 1422 bp, synthetic construct
  misc_feature 1..1422: note = Description of Artificial Sequence: Synthetic coding sequence
  source 1..1422: mol_type = other DNA
atggccacccaggccaagcggccccgggtggccggccccgtggacggaggggacttggatccggttgcctgctttctgtcatggtgtcgcagagtcggactggagctgtctcctaaagtgagcgaacgggccggtggccgcaggacacgcggcggtgctcgagcggcgctgaccagcccccccgcccaggtggccgtttccaggcagggtaccgtagcaggatatggcatggttgcacgagaatctgtgcaggctggagagttacttttcgttgttcctagggccgctctgctcagccagcacacctgttcaatcggtggtctgcttgagagagagcgggttgcactccagagccagtctggctgggtgcccctgctcctagctcttctgcatgaactacaggctccagcctcacggtggcggccatatttcgccttatggccagagcttggcaggttagaacacccaatgttttggcccgaggaggaaaggagatgtctgctccagggcaccggtgtgcctgaggctgtggagaaagatttagccaacattagatccgagtaccagtctatcgtgttacccttcatggaggcacacccagatctcttctccctgcgagtccggtccctcgaactgtaccaccagctcgtagctctcgtgatggcttattccttccaggagcctctggaagaagaagaggatgaaaaggaacctaactcccccgtgatggtgcccgctgctgacattcttaatcaccttgccaaccacaacgccaacctggagtatagtgccaattgtctgaggatggtggcaacccagcctattcccaaaggacatgagatattcaatacctatgggcaaatggccaattggcaactaatccatatgtatggatttgtggaaccctacccagacaacacagatgacaccgccgacatacaaatggtaacagttcgtgaagccgctctgcagggcacaaagacagaagctgaaaggcatctggtatatgaacgctgggactttctgtgcaaacttgaaatggtgggagaggagggtgcctttgttattgggcgggaggaggtgctgaccgaggaagaactgacaacaacactcaaagtgctgtgcatgcctgctgaagaatttagagaactgaaagaccaggatggtggcggcgatgacaagcgggaggagggcagcctcaccatcacaaatattccaaagctgaaagcttcatggaggcagctattacagaactcagttttgctgacattgcaaacctacgccaccgatcttaaaaccgaccaggggcttctgagcaacaaagaagtctacgccaagctcagctggcgcgagcagcaggccctgcaggttcgatacgggcagaagatgattctgcaccagcttcttgagctgacctcttag

SEQ ID NO: 206134 - DNA, 975 bp, synthetic construct
  misc_feature 1..975: note = Description of Artificial Sequence: Synthetic coding sequence
  source 1..975: mol_type = other DNA
atgggcccctggggcgagcccgagctgctggtgtggcggcccgaggcagtcgcgtctgagcctcctgttcccgtgggactggaggtcaagctaggtgccctggttctcctgctggtccttaccttactgtgcagccttgtgccaatatgcgtacttcgcagaccaggagctaatcacgagggcagtgcctctcgccagaaggccttatccctggtctcctgttttgccggtggggtgtttctagctacttgtctcctggatcttctgccggactaccttgccgctattgatgaagctttggccgctcttcatgtgaccctacaatttcctctgcaggagttcattctcgccatggggttctttctggttctcgtgatggagcagattacacttgcatacaaggagcagagcgggccttcaccactggaggagaccagggcgttgcttgggacagtgaatggcgggccacaacattggcacgacggccccggggtcccccaggcatctggagccccagccaccccaagcgcacttagggcatgcgtcctcgttttttcactggctctgcactcagtcttcgagggtctcgccgtgggtctccagagggaccgcgccagggctatggagctctgtttggctcttctgctgcataaaggaattctcgctgtgtccttaagtctgcgtttactgcagagtcatctacgagcccaagttgttgctggttgtggtatactgttctcgtgtatgacacccttaggcatcggactgggtgcagcactcgccgagtcggccgggcccctgcaccagcttgctcagagtgtgctcgagggaatggctgcaggtacattcttatatattacctttctcgaaattctgccccaggagctggcttcatcagaacagcgcattcttaaggtgatccttctactcgccgggttcgccttgctgacagggctgctgttcattcaaatatag

SEQ ID NO: 206135 - DNA, 975 bp, synthetic construct
  misc_feature 1..975: note = Description of Artificial Sequence: Synthetic coding sequence
  source 1..975: mol_type = other DNA
atgggcccctggggcgagcccgagctgctggtgtggcggcccgaggccgttgccagcgaacctcctgtccccgtcggcctggaagtgaagctgggagccctggtgctcttgctggtcctgacgttgctgtgctcactagtacccatttgcgtgctgcggcgcccaggagccaatcacgagggctccgcttctcgacagaaagctttgtctctggtgagttgcttcgcagggggagtttttctcgccacttgcctcctggacctgctgccagactacttggctgccatcgacgaggctctggccgcgctgcacgttaccctgcagtttcccctacaagaatttattctggccatgggtttttttctggtcttagtgatggagcaaatcaccttagcatacaaagaacaatccggaccttctccactcgaggagaccagggcactgctcggtaccgtcaatggcggacctcagcactggcatgatggccctggagtcccccaggccagtggggcccctgccacaccaagcgccctccgtgcttgtgttttagtcttttccctggcactacattccgtgtttgagggtttagccgtgggtttgcagcgagaccgggcacgcgccatggagttgtgtctggcactgctgctgcacaaaggaatactcgcggtaagtttatcacttagactcctgcaaagccacctgagggcacaggtggtggccgggtgcgggatcttattcagttgtatgaccccactgggcataggactgggggccgccctcgcagaatctgcaggccccctgcatcaactcgctcaaagtgtgctggaaggcatggccgccgggacattcctatacatcaccttcctggaaatcttgccgcaagagctggcctcttctgaacagcgaatcctcaaggtgatcctgctgctggccgggttcgcgctgctgacaggtttactctttattcagatctag

SEQ ID NO: 206136 - DNA, 975 bp, synthetic construct
  misc_feature 1..975: note = Description of Artificial Sequence: Synthetic coding sequence
  source 1..975: mol_type = other DNA
atgggcccctggggcgagcccgagctgctggtgtggcggcccgaggcggtggcctccgaacctccagttcccgttggactggaagtgaagttgggggcactcgtcctgctcttggtgctcacgttactatgctctttagtcccaatctgtgtgttgcggcggcccggagctaaccatgaggggagtgcatcgcggcagaaggccctgagcctcgtgagctgttttgctggaggcgtcttcctggcaacatgtctcctcgatttactccctgattacctggctgcgatcgacgaggccttggcggctctccatgtgacattgcagttcccactccaggagtttattctggccatgggtttctttctggtgctggtcatggagcagatcaccctcgcatataaagagcagagtgggcctagcccgctggaggaaactcgggctttgctgggcacagtcaacggtggcccacagcactggcatgatggacctggagtgccgcaagcctccggtgcaccagctacaccaagcgccctccgggcctgtgttctcgtattcagcctagccttgcactcagtgtttgagggcctagctgtagggctgcagagggaccgcgctagggccatggagctttgtctcgccctgctgcttcacaagggcattcttgctgtgagtctttccttgcgacttctgcagagccacctgagggcccaggttgtggccgggtgcggcattcttttcagctgtatgacccctctgggtatcggactaggggccgccctggccgaaagtgctggtcctttacaccagctggctcagtcggtactggaaggcatggccgccggtacttttctatatatcacctttctggagatcctgcctcaggaactggcttcgagtgagcagaggatactcaaggtgattcttctgcttgccgggttcgccctgctaactgggctcctcttcatccagatatag

SEQ ID NO: 206137 - DNA, 975 bp, synthetic construct
  misc_feature 1..975: note = Description of Artificial Sequence: Synthetic coding sequence
  source 1..975: mol_type = other DNA
atgggcccctggggcgagcccgagctgctggtgtggcggcccgaggcggttgccagtgaacccccagtacctgtggggctcgaggtcaaattgggcgcactcgtcctgctcctcgtgctgaccctcctgtgctccctggtgcccatctgtgtgttacgacgcccgggtgcaaaccatgaaggcagcgccagtcgccagaaagcattaagcctggtctcctgctttgccgggggcgtgtttctcgccacctgtctcttggacttacttcccgattatttggccgccattgacgaggcgctggctgctctccacgtcacactgcaatttcccctacaagagtttattctggccatgggctttttcctggttctggtgatggaacagatcaccctggcatacaaggagcagtcggggccatcacctttggaagagacacgggcgctgctcggcacagtcaatggaggaccgcagcattggcatgacggacctggcgtcccccaggcaagtggagcccccgccactccttctgccttgcgcgcctgcgtcctggtgtttagcctggccctgcacagtgtctttgagggacttgccgtggggttacagcgagacagagcccgtgcaatggagttgtgtctggcgctcctactgcacaaaggcattctggccgtaagcctgagtctgcgccttctgcagtcccatttgcgtgctcaggtggtcgctggttgtgggatccttttctcgtgcatgactccccttgggatcggcttgggcgctgccctggctgaaagcgccggtccgttacaccaattggctcagtccgtgttagagggaatggccgctggtacattcctttacattactttcctggaaatcctcccccaagagcttgcgtcttccgagcaaaggattttgaaggttattctgctgctggccggctttgctttactaacgggcctgttgtttatccaaatctag

SEQ ID NO: 206138 - DNA, 723 bp, synthetic construct
  misc_feature 1..723: note = Description of Artificial Sequence: Synthetic coding sequence
  source 1..723: mol_type = other DNA
atgggcccctggggcgagcccgagctgctggtgtggcggcccgaggcggtggcctccgagcctccagtgccagttggcctcgaggttaaactgggcgcattagtgctcctcctggtcctgaccctcctttgtagcttggttccgatttgcgtgcttcggaggccaggggcaaaccatgaagggtccgcaagcagacagaaggccttatctctcgtgtcatgctttgcaggcggggttttcctggcaacatgtctgctggatttgctgcccgactatctggccgcgattgacgaggctctggccgccttgcacgtgaccctacaattcccgctgcaagaattcatcctggcaatggggttcttcttggtcctggtaatggagcaaattactttggcgtacaaggaacaaagtggcccttctcccctggaggagacgcgagcgctcctgggcaccgttaacggtggacctcaacattggcacgacggacctggtgtgccccaggcaagcggagctcccgccaccccttctgcgcttcgtgcctgcgtcctcgttttctctctggcactccatagcgtgtttgagggcttggccgtaggccttcagagagaccgcgcccgcgcgatggagctgtgtctggccctgctgctgcacaaagggatactcgctgtgtcgctgtctctgaggctgttgcagagtcacctgcgggctcaggtggtggcatag

SEQ ID NO: 206139 - DNA, 621 bp, synthetic construct
  misc_feature 1..621: note = Description of Artificial Sequence: Synthetic coding sequence
  source 1..621: mol_type = other DNA
atgggcccctggggcgagcccgagctgctggtgtggcggcccgaggccgtagcttctgaaccaccggtcccggtaggcttggaggtgaaactcggagctctggtgcttttgcttgttcttacactactctgcagcctggtaccaatatgcgtactccgcagacctggcgctaaccacgagggaagcgcttcacgacagaaggcattaagcctcgtcagttgctttgcaggcggggtttttctagcaacctgcctgttagatcttctgcccgattatctcgcagcaatcgacgaggccctggccgctcttcacgtaaccttacagtttcccctgcaggagttcatactggctatggggtttttcctggttttagtgatggaacagatcacgcttgcttataaagagcaatccgggccctctccacttgaggagacacgggctttactcggtacggtcaacggtggtccccagcactggcatgatggccctggtgtcccccaggccagtggggctcctgcaacgcctagcgctcttcgggcttgcgtgctggtgtttagccttgccttgcactccgtcttcgagggactggctgtcggactgcagagggatcgggctaggtag

SEQ ID NO: 206140 - DNA, 966 bp, synthetic construct
  misc_feature 1..966: note = Description of Artificial Sequence: Synthetic coding sequence
  source 1..966: mol_type = other DNA
atgggcccctggggcgagcccgagctgctggtgtggcggcccgaggcggtagccagcgagcctccggtgcccgtcgggctggaagtaaagctcggggcgctggtcctgctgctagtattgactctcttatgcagtctggttcctatttgcgtgttgcggaggcctggcgctaaccacgaaggatcagctagcaggcaaaaagcactgtcgctagtgagttgtttcgcagggggggtgtttcttgctacctgcttgctcgacctgctgcctgactatctggctgcgatagacgaggccctggccgccctgcacgtcaccttgcagtttcctttgcaagagtttatcttagccatgggcttttttttagtcctggtcatggaacaaataaccctcgcctataaagaacagtccggcccaagtcctctggaagagacccgggctctgctgggcacagtaaatggtggaccacaacactggcacgatggtccaggggtaccacaggcctctggggctccagcgacaccatctgcactgcgcgcttgcgtgcttgtattcagtttagctctgcactccgtctttgaggggctggcggtcgggctccaaagagacagggctagagcaatggagctttgcctcgccttactgctgcataaaggcatccttgcagtgagcttgtctctgcgactgttacagtcacaccttagagcccaggtggtcgcaggctgtgggatccttttttcatgcatgactcctcttgggatcggactgggcgctgcactggctgaatccgcaggccccctacaccagcttgcccaaagcgtgctggaaggaatggccgccggcactttcctttatattacgttcttagagatcctaccccaggaattggcaagcagtgaacagcgtatcttgaaggtcattctgttgctcgcagggtttgctctgcttactggcctgctgttctag

SEQ ID NO: 206141 - DNA, 669 bp, synthetic construct
  misc_feature 1..669: note = Description of Artificial Sequence: Synthetic coding sequence
  source 1..669: mol_type = other DNA
atgaaggcccagctgcagttccccctgcaggagttcatcctggccatgggattctttctagtgctggtgatggagcagattacactagcgtataaggagcagtcaggtccatcaccattggaagagacccgtgctttgctaggcaccgtaaatggtggacctcagcattggcacgatggtccaggcgttcctcaggcctctggcgccccagctactcccagcgccttacgagcatgcgtgctggtgttctcacttgcactccactccgtgttcgaaggattagcagtgggactgcagagagatcgagcccgggccatggagctatgtcttgctctgctgttgcataaaggaatcctcgcagtcagtctgtctctgaggctcttacaaagccatttgagagcgcaggtggttgccgggtgcggaatactcttttcatgtatgacacccctcgggattggactgggtgccgcgctggcagagtccgctggtcctttacaccagctagcccagagcgtcctcgaaggaatggctgcagggaccttcctgtacattacctttctggagattctaccccaggagctcgcttctagtgagcagagaattttgaaagtgattctgctgcttgccggctttgcactcctgaccggtctgctatttatccaaatttag

SEQ ID NO: 206142 - DNA, 942 bp, synthetic construct
  misc_feature 1..942: note = Description of Artificial Sequence: Synthetic coding sequence
  source 1..942: mol_type = other DNA
atgggcccctggggcgagcccgagctgctggtgtggcggcccgaggccgtggcctctgagccgccagtgcctgtgggactggttctaacacttctgtgcagcttagtgccaatctgtgtgctccggaggcccggcgctaatcatgaaggttcagcttctaggcagaaggcattatcgctcgtttcctgctttgcagggggcgtgttcctggccacttgtctgcttgatctgctgccagactatctcgcagccatcgacgaggccctcgctgccctgcacgtaacactccaatttccactacaagagttcatcctagccatgggattcttcctggtgctggtgatggagcagataaccctcgcttacaaggaacagagcggcccatcaccattggaggaaactcgggcactgttgggcacagtgaatggcggccctcagcattggcatgatgggccaggcgtaccacaggcttccggcgcacctgctaccccttccgctttgcgtgcctgtgttctcgtgtttagcctggcgctgcactccgtctttgagggcctggccgtcggtctgcagcgggatagagctcgagcgatggaattgtgccttgcactgttactgcacaagggaattctagccgtgtctttatccttgagacttttgcaaagccacctcagagcccaagttgtcgcaggttgcgggatactcttttcttgcatgacccctttggggattggtttgggcgccgcgcttgcagagtcagccgggcctttgcatcagcttgcacagagcgttctagagggcatggcagctggcacttttttgtatatcacattcttggaaatattaccacaggaactggccagctctgagcaaaggatactcaaggtgattttgctattggccggatttgccctgttaaccgggctcctttttattcagatatag

SEQ ID NO: 206143 - DNA, 1095 bp, synthetic construct
  misc_feature 1..1095: note = Description of Artificial Sequence: Synthetic coding sequence
  source 1..1095: mol_type = other DNA
atgcccggctgcccctgccccggctgcggcatggccggcccccggttacttttcttaacagccctcgccttggaactgctggagcgggctggagggagccaacccgctctaaggtcacggggcaccgctactgcatgtcggctcgacaacaaagagtctgaatcatggggagcccttctgtcaggggaacgtctcgacacctggatctgcagccttttgggctccctgatggtgggcctaagcggtgtattccccttgcttgtgattccactcgaaatgggcaccatgctgcggtcagaggccggagcctggcgtcttaagcagctgttgtcctttgctctgggaggcttgctgggcaacgtttttttgcatttactgccagaagcctgggcttatacgtgtagtgcttcacccggaggcgaagggcaaagtctgcagcagcaacagcagcttggcttgtgggtgattgccgggattttaaccttcttggctctcgaaaaaatgtttctggactcaaaggaggagggcacaagtcaagcgcctaacaaggaccctaccgcagcggcggctgcactgaacggtggacattgtttggcacagccagctgcggagccaggcttaggcgccgtagtaagaagcatcaaggtgtctgggtacttgaaccttctggccaacactattgataactttactcacggcctagccgtcgcagcatccttcttggtcagcaaaaagattggcttgctgacaaccatggccatactactgcacgagattccacacgaggtgggcgatttcgcgattttgctgcgggctggatttgatcgatggagcgccgctaaacttcagttatctacagcactgggcgggcttctgggagccggctttgctatctgcacacaaagccctaagggcgtggaggagaccgcggcttgggtgttgccatttacttcaggcgggtttttatatattgccctcgtgaacgtgctccctgacttgctggaggaggaggatccatggaggagtctgcaacagctcctgctactgtgtgccggaatcgtggtgatggtgctctttagtctcttcgtcgattag

SEQ ID NO: 206144 - DNA, 1116 bp, synthetic construct
  misc_feature 1..1116: note = Description of Artificial Sequence: Synthetic coding sequence
  source 1..1116: mol_type = other DNA
atgcccggctgcccctgccccggctgcggcatggccggcccccggctcctgttcctgactgcccttgctctcgagcttctcgaaagagccggcgggtcacagccagccctgagatctcgtggtactgctaccgcttgccggctcgacaacaaggagagtgagtcctggggtgcactccttagcggagaaaggctggatacctggatttgtagtctgctggggtcacttatggtcgggttaagcggagtgttccctctgcttgttattcccctagagatgggcaccatgttgcgcagtgaggccggcgcgtggagattgaagcagcttctgtccttcgccctgggaggtcttctgggcaacgtgttcctccacctgctccctgaggcttgggcatacacatgttctgcctctcccggcggcgaagggcagtcgcttcagcagcaacagcagctgggtttatgggtcattgcaggcattctcacctttctagctctggaaaagatgttcctcgacagcaaagaagaaggtacatcacaggccccaaataaagacccaacagcagccgccgctgccctaaacggcggtcactgcctggcacagccagcggcggagccaggactcggcgcagttgtgaggagtatcaaggtgtccgggtacctgaatctgcttgctaataccattgacaacttcacacatggactggcagtcgccgcaagtttcctggtgagcaaaaaaatcggcctcctcactactatggcaatactcctgcacgaaatcccacacgaggtcggggacttcgcaattctgcttcgggcagggttcgaccgctggtctgcggccaaactgcagcttagtaccgccttaggtggattgttgggagccggcttcgcaatctgcacacaatcccccaaaggagtggtgggctgctcacccgccgctgaggagaccgctgcctgggttttgcctttcacatccgggggattcctgtatattgcgctagtgaatgtcctgcctgacctgctggaagaagaagatccttggaggagcctgcagcagctgctcctcctctgcgctggaatcgtagtgatggtgctgttttccttatttgtggactag

SEQ ID NO: 206145 - DNA, 930 bp, synthetic construct
  misc_feature 1..930: note = Description of Artificial Sequence: Synthetic coding sequence
  source 1..930: mol_type = other DNA
atggagcagctgctgggcatcaagctgggctgcctgttcgccctgctggccctaactttgggatgtggattaactccaatctgtttcaagtggttccagattgatgctgccagaggccatcaccgcctggtactcagactgttgggctgtatcagtgcaggcgtcttcctcggagcgggcttcatgcacatgacagctgaggcgttggaggaaatcgaatcccagatccagaaatttatggtacaaaataggagtgcaagtgaacgtaactcttcaggtgatgccgacagtgcacatatggaatacccctacggcgagttgatcatttctctgggatttttcttcgtctttttcctggagagcttggccctacagtgttgtcctggagccgctggcggaagcaccgtgcaagatgaggagtggggcggggcgcatatctttgaactgcacagtcatggacaccttccctcgccatctaaagggcctctcagagccttggtgctgctgctcagcctgagctttcactccgtctttgaggggttagctgtgggacttcagcctacagtggcagctaccgtccagctatgcctcgcagtgctcgctcataaggggcttgtggtctttggcgtgggcatgcgtcttgtacatttgggtacctcctcccgatgggccgttttctccattcttcttctggcccttatgagccccttggggttggccgtgggactggcagtgactggaggcgatagtgaaggtgggcgcggcttagctcaggcagttctggagggagttgccgccggtaccttcctgtatgtaactttcctggaaattctgccaagggaacttgcttcacccgaggcccctctagcaaagtggagctgcgtcgcagcggggttcgcctttatggcgttcattgcactgtgggcctag

SEQ ID NO: 206146 - DNA, 945 bp, synthetic construct
  misc_feature 1..945: note = Description of Artificial Sequence: Synthetic coding sequence
  source 1..945: mol_type = other DNA
atggtgaagctgctggtggccaagatcctgtgcatggtgggcgtgtttttcttcatgttgttgggatccttgctacccgtcaaaattatagaaactgactttgaaaaggcccatcgatcaaagaagatcctcagcctgtgcaacacttttggcggaggcgtcttccttgcaacatgttttaatgcactcctgccagcggttcgcgaaaaactgcaaaaggtgctcagcctcggacatatctctacagattatcctctcgccgagactattttactattgggcttcttcatgactgtgtttctggaacaactgatcttgacttttcgcaaagagaaacccagcttcattgacctcgagacttttaacgccggctccgatgtcggaagtgacagcgagtatgaaagcccattcatgggtggtgcgcggggccatgctttatacgtggagccccacggacacggcccaagtttgtctgttcaggggttgtccagggcatcacccgtgcgcctgctcagtctggcttttgccctcagtgctcatagtgtgtttgagggacttgccctgggattacaagaagagggcgagaaagttgtctctctcttcgtgggagtcgcagtccacgaaactctggtggccgtggcattgggaatctcaatggctcgaagcgccatgccccttcgagacgccgccaagctggcggtgaccgtttcagccatgatccctctgggcataggcctcggcttgggtatcgagtcggctcagggggtgcccggcagcgtcgcttctgttctgctccaaggcctggcaggaggtactttcctgttcatcacttttctagaaatacttgccaaggaacttgaagaaaagtccgaccgtctgctgaaggtgttgtttctcgtactcggctacactgtcctggcagggatggtcttcttgaagtggtag

SEQ ID NO: 206147 - DNA, 318 bp, synthetic construct
  misc_feature 1..318: note = Description of Artificial Sequence: Synthetic coding sequence
  source 1..318: mol_type = other DNA
atggtgaagctgctggtggccaagatcctgtgcatggtgggcgtgttcttcttcatgctgctgggaagtctgcttcccgtgaaaattatcgaaacagactttgaaaaggcgcatagatcaaagaagatcctgagtctttgtaatacctttggtgggggcgtgtttcttgccacatgttttaacgctcttctccccgcggttcgcgaaaaagtgagggctccttgggctctggcggccgcattgggtaccctgtggccacgggattccgatgccttttccacgctgatgcctagtagtgtgaaggctttaatgctttag

SEQ ID NO: 206148 - DNA, 972 bp, synthetic construct
  misc_feature 1..972: note = Description of Artificial Sequence: Synthetic coding sequence
  source 1..972: mol_type = other DNA
atggtgaagctgctggtggccaagatcctgtgcatggtgggcgtgtttttctttatgctgctgggatcactcctgcctgtaaagattatcgaaaccgactttgaaaaggcccaccgatctaagaaaattctgagcctgtgtaatacctttggagggggggtgtttctggccacctgctttaacgcccttcttcctgccgtccgtgagaaactgcagaaagtcttgagtctaggacacatatcaacggactacccgctcgctgagactatcctgctgctgggcttcttcatgaccgtgttccttgagcagctgatactaacatttcgtaaagagaaaccgtcattcattgacctggaaacctttaacgcaggctcagacgtaggctctgactctgagtatgagtcccccttcatggggggtgcccgaggccacgctctttatgttgaaccccacggtcatggcccgagtttaagcgttcagggattgtctcgggcatcccccgttcggctgctgagcttggcctttgctctgagcgcacattctgtcttcgaagggttggcacttggcttgcaggaggagggtgaaaaggtcgtgtcactctttgtcggggtagctgtacatgaaacactggtcgctgtcgcacttggcatctccatggctaggagcgcaatgcccctgcgcgacgctgccaagttggcggtgactgtctccgccatgattccattaggcatcgggctgggtttgggaattgaaagcgcacagggcgtgcccggaagcgtggcatccgttctgctgcaggggcttgccggcggaacattcttattcatcacttttttagagatactggcaaaggaacttgaagagaagtctgacagactgctaaaagttctatttctcgtcctagggtacacagtcctggctggaatggtatttcttaagtggatatcaccgcccgaacctcgcgttagctag

SEQ ID NO: 206149 - DNA, 1869 bp, synthetic construct
  misc_feature 1..1869: note = Description of Artificial Sequence: Synthetic coding sequence
  source 1..1869: mol_type = other DNA
atggtggacgtggtgggcctggagcgggagaccggcccccggggctcaccatggcccgggctgccattaccttccttggtgggccctgccccactgctgacttgtctgtgcccacagtgcctatctgtagaggacgcactagggctgggggaacccgaggggtccggcctgcccccaggacccgtgcttgaagcgaggtatgttgctcgcctctccgctgcagcagttttgtacctgtccaaccctgaaggaacctgtgaggacgctagggcaggtctgtgggcgtcccatgcagaccacttgttggccctgctcgaatccccaaaggctctcacaccaggactgtcgtggctcctgcagcggatgcaggcaagggccgctggacagacgcctaagaccgcatgtgtagacatccctcagctcctggaagaagcagtgggtgcaggcgcgccaggctctgccggcggcgtgctcgccgcgctgctcgaccacgtaaggagtggcagttgctttcacgccctaccttctcctcagtatttcgtggactttgtcttccagcaacactcctcagaggttccaatgacattagccgagctgagtgccttgatgcaaaggctcggcgtgggacgggaagctcactctgatcacagtcatagacaccgaggggctagctcttgggacccggtgccgctgataagcagtagcaacagcagctctgtgtgggatacagtgtgtttgtcggctcgagacgtgatggcagcatacggactgtctgagcaggctggagtgacgcctgaggcttgggcccagttgtccccagctctgctccagcagcagctaagcggtgcttgcacgtcgcaatctagaccgccagtccaggaccagttgagccagtccgagcgctatctgtatggaagcctggccaccctgctgatctgtctgtgtgccgttttcggacttctgcttctgacctgtactggatgccgcggagtgactcactacattctgcagacgttcctgtctctggccgtgggtgcattgactggtgacgctgtactccatctgacccccaaagtcctcggcctgcacacccattccgaggagggactgtccccccaacctacgtggcggctgctcgcgatgctggcagggctgtacgctttctttctcttcgaaaatttgttcaatttgctgctgcccagggacccagaagatctcgaggacgggccctgtggccactccagtcactctcatgggggccattcacacggggtgtccctgcagctcgcgccctccgagcttcggcagcccaagccgccccatgagggcagtagggccgatcttgtagctgaagaatccccggaattgttgaacccagaacctagaaggctgagcccagagcttcggcttctgccttatatgattacgctgggcgatgcggtccacaacttcgctgacggactggcggtgggggccgcatttgcgtctagttggaaaacaggcctcgccacttcactagctgtgttctgccatgagctaccccatgagcttggagattttgccgctctgctgcatgcaggactctcagtgcgccaggcgctgctgttgaatctggctagtgctcttactgcctttgccggactctacgtagccctggccgtcggcgtcagcgaggagagtgaagcttggatactggccgttgcaaccggattgttcttgtacgtggccctctgtgatatgctcccagcaatgcttaaagttcgcgatcctaggccgtggcttctgttcttgctgcacaatgtgggcttactaggcggttggactgtgttacttcttctgtctctctacgaagatgacatcaccttctag

SEQ ID NO: 206150 - DNA, 1944 bp, synthetic construct
  misc_feature 1..1944: note = Description of Artificial Sequence: Synthetic coding sequence
  source 1..1944: mol_type = other DNA
atggccagcctggtgagcctggagctgggcctgctgctggccgtgctggtagtgaccgccaccgcctccccaccggccgggttactgagtctgttaacctctggacaaggtgcgttagaccaggaggcgctgggaggcctgctgaacaccctggccgatagggtgcactgtgctaatggcccatgtggtaagtgcctgagtgttgaggacgcccttgggttaggtgagccggagggtagtgggcttcctccaggacctgtcttggaagctcgatatgttgccaggctgtcagctgctgcagtgctttacttaagtaatccagaaggaacctgtgaggacgcgcgggcaggtctgtgggcctcacacgctgaccacttgctcgccctcctagagtcacctaaggcgcttacccccggcctgtcctggctgttgcaaagaatgcaggcgagggccgctggacagactcccaagactgcatgcgtggatattccgcaactcttagaggaggcagttggcgccggagctcctggctcagcaggaggggtgctggctgctctcctcgatcacgtgcgctccggctcatgtttccacgcattgccgtccccacagtactttgtggactttgtgtttcagcagcacagcagcgaagttcccatgacactagccgaactgtccgcgctgatgcaaaggctgggagtaggaagagaggcccactctgatcattctcaccggcataggggtgcaagctcctgggatcctgttcctctgatatctagttctaattcctcctctgtctgggacacagtgtgccttagcgccagagacgtgatggctgcttacgggctctccgagcaagcaggagtcacaccggaggcatgggcccagctgtcccccgcccttttgcagcagcagctgagtggcgcatgcacctcccaatcccggccgcccgtacaagaccaattaagccaatcagagcgctacttatacggatccctagcaaccctcctgatatgcctttgcgcagtcttcggcctgctcctgttaacttgcaccggctgtcgcggggttactcattacatcttgcagaccttcctgtccctggcagtcggggcactcacgggcgacgccgtactgcatctgacgcccaaagttctcgggctccatactcactccgaggagggcctgtctcctcagcccacctggaggctgctcgcaatgctggccggattgtacgctttttttctgttcgaaaacctgttcaacctgctgctgccaagagacccagaggacctcgaggacggtccatgcgggcactcctctcattcccatggcggtcactcacacggagtcagtttgcagctggctcctagcgaattacgccagccgaagcccccccacgaagggtcccgcgcagacctggtggccgaggagtcccccgagctgttaaaccccgagcccagaaggctgtcacccgaactgcgactactgccttatatgatcaccctcggcgatgccgtgcataactttgccgatggactcgccgtgggagccgctttcgcatcctcatggaagacaggcctggctacaagtttagcggtcttctgccatgagttgccccatgaactcggggacttcgctgccctactgcatgctgggctgtccgtcaggcaggcactgctgctgaacctcgcctctgcactgactgcatttgcaggcctctatgtggccctggccgttggcgtgagtgaagagtccgaggcctggattcttgctgtcgccaccgggcttttcttgtacgtggctctgtgtgacatgctgcctgcgatgttgaaagtgcgagatccacggccgtggctgttatttctgttgcacaacgttggccttttgggcggctggactgtgctcctgttactttccttgtacgaagacgatatcaccttctag

SEQ ID NO: 206151 - DNA, 1410 bp, synthetic construct
  misc_feature 1..1410: note = Description of Artificial Sequence: Synthetic coding sequence
  source 1..1410: mol_type = other DNA
atggcccggggcctgggcgccccccactgggtggccgtgggcctgcttacgtgggctaccctcgggttactggtagctggactaggcggacatgacgacctacacgacgatctccaggaggatttccatgggcactctcaccgacatagccatgaggacttccaccatggccactcgcacgcccacggacatggacacacacatgagtcgatctggcatggacacacacatgaccacgatcacgggcactcccacgaagacctacaccacggccacagccacggatacagccacgaaagtctgtaccaccgtggccacggacacgatcacgaacacagccatggtggctatggagaatcaggcgccccgggcataaagcaggacttagatgcggtgacactgtgggcctatgcgcttggggctacagtgctgatttccgctgctccgttcttcgttttattcctgattcctgtcgaatccaattcccctcggcacaggtccctgcttcagatcctcctttcatttgcatcaggcggtctactcggagatgcttttctgcacctcataccccacgccttagagccccactcccaccacacactggagcagcctggccacggacattcacactccggccagggtccgattctgagcgtggggctatgggtcctgtccggtattgtcgcctttcttgtggtcgagaaatttgtgcggcatgtcaagggcggacacggccatagccatggtcatgggcacgcccattcacatactcgcggctctcacggacacggcagacaggagcgctctacaaaagaaaagcaaagcagtgaggaggaggaaaaagagacaagaggcgttcagaaacggcggggcggaagcaccgtacccaaggacggcccagtgaggcctcaaaacgcagaagaggagaaacgcggactggacttgcgggtgagcggatatcttaacctggctgccgatctggctcataatttcacggatggattggctatcggcgccagttttcggggtggacgcggactcgggatacttactactatgaccgtgctcctgcatgaggtcccacacgaggtaggggattttgccatcctggtacagtccggatgctccaagaagcaggccatgcggttgcagctactgacagccgtgggggccttagccggaaccgcatgcgctcttctcactgagggcggcgcagtggggagtgagatcgccggaggcgctggaccaggatgggtattaccttttactgccggaggcttcatctacgtagccacagtcagcgtgctcccagagctactgcgtgaggcctcaccactgcagtctctcctggaggtgctcggtctgctgggcggcgtcataatgatggttttgatcgctcatttggagtag

SEQ ID NO: 206152 - DNA, 1410 bp, synthetic construct
  misc_feature 1..1410: note = Description of Artificial Sequence: Synthetic coding sequence
  source 1..1410: mol_type = other DNA
atggcccggggcctgggcgccccccactgggtggccgtgggcctgttaacctgggccaccctggggctcctggtcgccgggctcggcggacacgatgaccttcacgacgacctgcaagaagacttccatggccattcccaccggcacagtcacgaggactttcaccacggtcactcccatgcacacggccatggccacacccatgagagtatctggcatggccacacgcatgatcacgatcacgggcactctcacgaagatcttcatcacggtcactcccatggctacagccacgagtccctgtatcaccgtggccatggtcacgaccacgagcactctcatgggggctacggtgagagtggcgctcctggaatcaaacaggaccttgacgcagtaaccctgtgggcctacgcacttggagccaccgtgttaatctcggcagcccctttctttgttctgtttctcatccccgtggagtccaactcgccacgacatcgctctcttctgcaaatcctgctgagctttgccagcggaggcctccttggggacgcttttttgcacctgataccacatgctcttgagcctcattcgcaccacacccttgaacaacccggacatgggcacagccactccggccagggacccatcttgtccgtggggctgtgggttctctctggcatcgtggcgtttctcgtcgtggaaaaatttgtgaggcatgtgaagggcggccatggccattctcacggccacggtcatgcccacagtcatactaggggcagtcacgggcacgggaggcaggaaagatccacgaaagagaaacagagcagtgaggaggaggagaaagaaacaaggggagttcagaagcgcagagggggcagcacagtgcctaaggatggtcccgtgcggccccagaacgccgaggaagaaaaaagaggattggatctgcgagtgagtggctacctgaaccttgccgcagatctggctcacaattttacagatgggctagcaattggggcttcttttcgggggggacgaggtttggggatcctgactacaatgaccgtactgctgcatgaagtgccacacgaggttggggatttcgccatcctggtccagtcggggtgtagcaaaaaacaggctatgagactgcagttgctcactgctgtgggcgctctggccgggactgcgtgtgcattactgacagaggggggagccgtgggctccgagattgctgggggggccggacctggctgggtactcccctttaccgcaggcgggtttatctatgtcgcaaccgtcagtgtcctgccggaactgctccgggaagctagccccctgcagtccctgcttgaggtgcttggccttttagggggtgtcattatgatggtgctgatcgctcatctggaatag

SEQ ID NO: 206153 - DNA, 1410 bp, synthetic construct
  misc_feature 1..1410: note = Description of Artificial Sequence: Synthetic coding sequence
  source 1..1410: mol_type = other DNA
atggcccggggcctgggcgccccccactgggtggccgtgggcctgctgacatgggctacccttggactgctggtcgcggggctcggaggccatgacgacctgcatgacgatcttcaagaggattttcacgggcactcgcaccggcactctcatgaggatttccaccatggtcatagtcacgctcatgggcacggacatacccatgaatccatatggcacgggcacacacacgatcacgaccacggacactctcacgaggatctgcatcacgggcacagtcacgggtatagccatgagagtttgtaccaccggggacacggacatgatcacgagcattctcacggagggtacggcgaatcgggggctcccggaatcaaacaggacctcgacgctgtcactctttgggcgtatgcattgggcgccacggttctcatttcggccgcaccgttcttcgtcctgtttctgattccagtagagtccaactcgcctagacatcgtagcctgctccagatcctcttgagtttcgcttccggggggctgctgggtgacgcctttctccacctcatcccacacgccctggagccgcacagccaccatacactcgagcaacccggtcacggacatagtcacagcgggcagggcccgattctatcagtcggactctgggtactcagcgggatcgtggcattcctggtggtggagaaattcgttcgacacgtgaaaggtggtcatggtcactcgcacgggcatggtcatgcccatagccacacccgcggctcacacgggcacgggcggcaggagcgatccacaaaagaaaagcagtcatcggaggaagaagaaaaggaaaccaggggagtccaaaaacgccgagggggaagcaccgtgccaaaagacggcccagtgagaccacagaatgccgaagaggaaaaaagaggattagatcttcgggtctccggctacctaaacctggcggctgatttagcacataatttcactgacggtctcgccataggggctagtttcaggggtggtcgcggcttaggtattctgacaaccatgacggtacttcttcatgaagtgccccacgaggtaggcgatttcgcgatcctggtgcagagcggatgttcaaaaaagcaggccatgaggttgcagctgctgaccgcggttggagccctcgccggcacggcctgcgccctcctgacagaaggtggggccgtaggctcagaaatcgccgggggcgccgggcctgggtgggttttgccattcactgctggtggcttcatctacgtcgcaaccgtttccgtcctgcccgaacttctgagagaagcttcccctctgcagagcctcttggaagtgctcggactcctgggcggggttatcatgatggtacttatagcacacttggagtag

SEQ ID NO: 206154 - DNA, 1410 bp, synthetic construct
  misc_feature 1..1410: note = Description of Artificial Sequence: Synthetic coding sequence
  source 1..1410: mol_type = other DNA
atggcccggggcctgggcgccccccactgggtggccgtgggcctgctgacctgggctacactggggcttctggtggccggtttgggcggtcacgatgatctgcacgatgacctacaagaagacttccacggccacagtcaccgccattcacatgaagactttcaccacggccactcccatgcacacggacatggacatacccacgagtcgatctggcatggacacacacatgatcacgatcatgggcactcccacgaggatctacatcacggacactcacatggttacagccatgaatcactgtaccaccgcgggcacggacatgaccacgaacattcacacggcggctacggtgaaagcggagctccaggaatcaagcaggacctggacgctgttaccctttgggcctatgcattgggtgccacagtgttgatatccgcagccccattctttgtgctgttccttattccagtcgagtcgaattcgcctcggcatcgcagcctgctgcagattctcctgagcttcgcgagcggcggccttcttggagacgcatttcttcatctcatcccacacgctctagaaccccactcccaccatactctggagcagccgggccacggccacagccattccggccaggggcccatcctgagcgtggggttgtgggtgctgtctggaatagtcgccttcttggtggtcgagaaatttgtccgccatgtgaagggtgggcacggtcattcccatggccatggccatgcgcattcacacaccaggggctcccacggtcatggtaggcaggaacgcagcacaaaagagaaacagtccagcgaggaggaagagaaggagacgcgaggcgtgcagaaaaggcgcgggggaagtacggtccctaaagacggccccgtgcgcccccaaaacgcagaggaggagaagagaggcctggatttgagggtgagtgggtatctgaacttagctgcggatctggcccacaattttactgacggactagccatcggggcatctttcaggggcggacgcgggctaggcattctcacaacaatgaccgtccttctgcatgaggttccccatgaagtcggagacttcgcaatcttggtgcagagtggatgtagcaagaagcaggcaatgagactgcagctcttgaccgcggtaggcgctctggccggcacagcatgtgcgctgcttacagagggcggggctgtgggaagtgaaatcgctggaggagccgggcctgggtgggtgctaccattcactgcgggagggtttatctacgtggccactgtgtcagtgttgcctgaattactgcgcgaggccagtccgctacagtccctactggaggtgctgggcctcctaggtggcgttataatgatggtgcttatagcccacctagagtag

SEQ ID NO: 206155 - DNA, 663 bp, synthetic construct
  misc_feature 1..663: note = Description of Artificial Sequence: Synthetic coding sequence
  source 1..663: mol_type = other DNA
atggacagcagcctgcccgagtgccggcacatcggcaagggcatcagggctaaggtggagcgaaacttcctgttttctcgcgacctgaaagccggcctgcctagaccgtccaagccaggaaaagagaggatccccgagccagcactgggagcaaccgttcttattagcgccgctccattctttgtcctatttctgatccctgtggagagcaacagccccagacatcgatcactcctccagatcttgctgagctttgcctccgggggcctgctgggagacgcatttctgcatctgatcccacacgcccttgagccccactcgcatcacacgctggagcaaccaggccatggccacagccattctggtcagggccctattctgagtgtaggactgtgggtgctgagcggcatagttgctttcctcgtagtagagaagtttgtgcggcacgtgaaaggaggccacgggcactcccacggccacgggcatgcccacagccacacccggggatcacacgggcacggtaggcaggaaagaagtacaaaagaaaaacagtcatctgaagaagaggagaaggaaacccggggcgttcagaagaggagggggggatctacagtgcctaaggacggccccgttcgtccccagaacgcagaagaggagaaatag

SEQ ID NO: 206156 - DNA, 663 bp, synthetic construct
  misc_feature 1..663: note = Description of Artificial Sequence: Synthetic coding sequence
  source 1..663: mol_type = other DNA
atggacagcagcctgcccgagtgccggcacatcggcaagggcatccgggctaaggtagaacgcaactttctattcagtcgggacctgaaagccggcctcccgaggccttctaaaccaggaaaagaacggatccccgaacccgcactcggggctaccgttcttattagcgctgctcccttctttgtgctctttctcatacccgtcgaatcgaatagccccagacaccgctctctgctccagatcctcctcagctttgcctccggaggcctgctaggtgatgccttcctgcatttgattcctcacgccttggagcctcacagccaccacactctcgaacaaccaggccacggacatagccattccggccaggggcctatcctgtcagtcggtctctgggtcctgtcagggatagtggcttttctggtcgtcgagaaattcgtaagacatgtgaaaggaggtcatggccacagtcatggtcacgggcatgcccactctcatacacgtgggtcccacggacacgggagacaggagagatctacgaaggaaaagcagtcatcagaagaggaagaaaaggagacgcggggcgtacagaagagaagagggggctcaaccgtcccaaaggatgggcccgtgcgccctcagaatgctgaagaggagaagtag

SEQ ID NO: 206157 - DNA, 1410 bp, synthetic construct
  misc_feature 1..1410: note = Description of Artificial Sequence: Synthetic coding sequence
  source 1..1410: mol_type = other DNA
atggcccggggcctgggcgccccccactgggtggccgtgggcctgcttacgtgggccactctggggctgttggttgctggccttggcgggcatgatgatctgcatgatgacttacaggaggattttcacgggcattctcacagacacagtcacgaggactttcaccacggtcattcacatgcccacggccatggacatacccatgaaagcatatggcatggtcacactcacgaccacgaccacggtcacagccacgaggacctacatcacgggcactctcatggatacagccacgaaagcttgtaccaccgcggtcacggccacgaccacgagcattcacacggcggctacggagagagtggtgcccccgggatcaaacaggacctggacgccgtgactctgtgggcctacgccttgggagctaccgtcctcattagtgcagcccccttctttgttctgttcttgattccagttgagtccaattctcctagacacagaagcctactgcagatccttctctcctttgcctctgggggcctactgggggacgcattccttcacttgattccccacgcgctggagccgcactcacaccacaccttggagcaacctggacacggacattcccattccggtcagggcccgattctcagcgtgggcctgtgggtgctgtctggcattgtggcgttcctggtcgtggagaagttcgtacgacacgttaagggggggcacggtcatagccacggacatgggcatgcacattcccatacgcgcggctcccatgggcatggacgtcaggagcggagcactaaggaaaaacagtctagtgaggaggaggagaaggagaccagaggggtgcaaaaaaggcgcggaggtagtaccgtgccgaaagacgggcctgtgcgcccccagaacgccgaggaagagaaacgcggactagatctgagggtgtcagggtaccttaatctcgctgccgacctagcccacaacttcacagatggactagccatcggggccagctttcgggggggaagagggttggggattcttactaccatgacagtgctactgcatgaagtgcctcacgaagtgggggacttcgccattctcgtgcagtcaggatgtagcaagaaacaagcgatgcgtctgcagctcttaaccgcagttggggcccttgccggcacagcctgtgcactacttaccgaaggtggagcggtgggctcagagatcgccggcggagctggcccaggttgggtcctcccctttacggccggggggttcatttatgtggctactgtgtccgtcctgcctgagcttttgcgcgaggcatcaccccttcagagtctcctagaagtgctgggcctgctaggtggtgtgattatgatggtgctgattgctcatctggaatag

SEQ ID NO: 206158 - DNA, 1410 bp, synthetic construct
  misc_feature 1..1410: note = Description of Artificial Sequence: Synthetic coding sequence
  source 1..1410: mol_type = other DNA
atggcccggggcctgggcgccccccactgggtggccgtgggcctgctcacgtgggccacattaggcctcctggttgcaggcctgggtggccatgacgatctacacgacgatcttcaggaagatttccacggacactcccatcgccactcacatgaggattttcaccatggccacagccatgcacacggacatgggcatactcacgaatccatctggcacggacacacccacgaccatgaccacggacactcacatgaagatttgcaccatggtcacagccacggttactcacacgaatccctttaccacagaggtcacggccacgaccacgaacactctcatggcggatatggggaatctggggccccgggtattaagcaagacctggacgccgtcacactgtgggcatacgcgcttggcgcaacagtgctgatcagcgctgcacccttcttcgtcctgtttctgattcccgtggagtcgaatagtccacggcaccggtcacttctccaaatcctcctgagcttcgcttctggaggactcctcggcgacgcttttttacatctaataccacacgctctggaacctcattcgcatcataccttggagcagcccggccacgggcattctcacagtggccaaggtccaatcctgagcgttggcctgtgggttctcagtgggatcgtggcttttctcgttgtcgagaagttcgtgcgccacgttaaggggggacatgggcacagtcatggccacggacatgcacacagccacaccagagggtcccatgggcacggccggcaggagaggagtaccaaagagaaacagagttcggaagaggaggaaaaagagacccgaggagtgcagaaacggaggggaggttccactgtgcccaaagatgggccagtacgcccccagaatgccgaagaggaaaaacgtgggcttgatctgagggtgtcaggatacctgaacctggcggccgatctagcccataatttcaccgatgggctcgcaattggcgcctccttccggggcggccgcggcctgggcatactgaccaccatgacagtcctgctgcacgaagtgccgcacgaggtgggcgactttgccattctggtccagagcgggtgtagcaaaaagcaggctatgcggctccaactattgaccgccgtgggcgctttggcaggcaccgcttgcgctcttttgacggaaggtggcgctgtggggagcgagatcgccggcggcgctggacccggctgggtgctgccattcactgccggaggtttcatttatgtcgccacagtgagtgttctgccagagttacttagagaagcttcacctctccagtcactcctggaggtcctgggtttacttgggggagtcattatgatggttctgatcgcccaccttgaatag

SEQ ID NO: 206159 - DNA, 1410 bp, synthetic construct
  misc_feature 1..1410: note = Description of Artificial Sequence: Synthetic coding sequence
  source 1..1410: mol_type = other DNA
atggcccggggcctgggcgccccccactgggtggccgtgggcctgctgacatgggctaccttaggtcttctcgtagctgggctgggcggacacgacgatttgcacgacgacctgcaggaagattttcacggacatagccatagacattcacacgaagactttcaccacgggcactctcatgcacacggccatggccacacccacgagagcatctggcatggtcatacacacgaccatgatcatggccacagccatgaggatctccaccacggtcactctcacgggtatagtcacgagtcattataccatcgcggccatggccatgatcacgaacatagtcatggaggatatggcgaatccggagctcctggcattaaacaggatcttgacgcagtgacactgtgggcatacgccctgggcgcgacagtccttatttcagctgctcccttttttgtgctgttcctgatccctgtcgaatcaaattctccacggcaccgttccctactccagatactgctatccttcgcttcagggggcttgctcggagacgcattcctccatctcatcccacatgctctcgaacctcatagccatcacacgctggagcagccaggccatggtcactctcacagcggccagggccctatcctcagcgtgggcctgtgggttttgagtgggatcgtcgcttttcttgtggtcgagaaattcgtcagacatgtcaagggcggccatggccacagccacggtcacgggcacgcgcacagccatactagaggaagtcacggtcacgggcggcaggaaagatcaacgaaagagaagcagtcttccgaggaggaggagaaagaaacccgaggagtacaaaaacggcggggcggttcaactgtgcccaaagacggtccggtccggccacagaatgccgaggaggaaaaaagagggctggacctccgagtctccgggtatctgaacctggcggccgatctcgctcacaactttaccgacggcctggctataggcgccagcttcaggggcggccgggggctcggcatcctcactaccatgacggtactgctccacgaagtcccccatgaggtcggagactttgctattctagttcagagtggctgcagtaagaaacaagccatgcgactccaactcctcactgccgtgggtgccctggcgggcactgcttgtgccctgctgactgagggaggcgccgtggggtccgaaatagcaggaggcgctggccccggctgggttcttcccttcactgctggcggattcatctacgtcgctaccgtctccgtgctgcccgaactgctgagagaagcaagccccttgcagtccctgttggaggtgctgggactgttgggaggggtgataatgatggtccttattgctcacctcgaatag

SEQ ID NO: 206160 - DNA, 663 bp, synthetic construct
  misc_feature 1..663: note = Description of Artificial Sequence: Synthetic coding sequence
  source 1..663: mol_type = other DNA
atggacagcagcctgcccgagtgccggcacatcggcaagggcatccgtgctaaggtagagcgaaattttttattttcacgcgatctgaaggcaggtctgccccgcccttctaagccagggaaggaacgtattccggaacccgctctgggagctactgtcctgatttctgctgctccgttttttgtgctgtttctaatacctgtggaatctaatagccctcggcaccgctccctgctgcagatcctgttatcctttgcttctggaggactactgggcgacgcattcctgcacttaatacctcatgcgctggagccccactcccatcacacacttgagcagccagggcacggccactcacattccggccagggcccaattctttcagttgggttatgggtcctaagcggaatcgtcgccttcttggtcgtcgaaaagttcgttcgccatgtgaaaggtggtcacggccattctcatgggcacggtcacgcccacagccatactaggggatcccacggacatggcaggcaggagcggtctaccaaggaaaaacagagcagcgaggaagaggagaaagagaccaggggagtgcagaaaagaaggggagggtcaaccgtcccaaaagacgggcccgtgcggccacaaaatgcagaagaagagaaatag

SEQ ID NO: 206161 - DNA, 663 bp, synthetic construct
  misc_feature 1..663: note = Description of Artificial Sequence: Synthetic coding sequence
  source 1..663: mol_type = other DNA
atggacagcagcctgcccgagtgccggcacatcggcaagggcatccgggccaaggtagagagaaattttctgttttccagggacctgaaggctggcctccctagaccctccaagccaggcaaggaaagaatccctgagccagctcttggcgccactgtactaatctcagccgcgcccttctttgtactgtttctcattcccgtggagtctaacagtccacgtcaccggtcactgttgcagatcctcctctcatttgcatctgggggactgctcggcgacgccttcctccatcttattccccatgctcttgagccccacagtcaccataccctggagcagccaggccacggacatagtcattctggtcaagggcccatcctgagtgtgggcctttgggtattgtccggaattgtggccttcctggtcgtcgagaaatttgttcggcacgtgaaggggggccatggccacagtcacggccacggtcacgcccatagtcacacaaggggatctcatggccatggaaggcaggagcgcagtaccaaagagaagcagtcctcggaggaggaagagaaagaaactaggggcgtgcagaaaaggcgcggggggtcaacagttcctaaggacggacctgtccgcccacaaaatgccgaagaggaaaaatag

SEQ ID NO: 206162 - DNA, 1410 bp, synthetic construct
  misc_feature 1..1410: note = Description of Artificial Sequence: Synthetic coding sequence
  source 1..1410: mol_type = other DNA
atggcccggggcctgggcgccccccactgggtggccgtgggcctgctcacctgggcaacgcttgggctgctggtcgcagggctgggcgggcatgacgatctacacgatgatctgcaggaggacttccacggccatagccatcgacatagccacgaggattttcaccatggacactcacacgctcacggacatgggcatactcacgagtcaatctggcacgggcacacacacgatcacgaccatggacattcccacgaggatcttcaccacggccatagtcatggctattcccatgagagcctctaccacagaggccacgggcacgatcatgagcatagtcatgggggctatggagagagcggcgctcctgggattaaacaggatttagacgccgtgaccctgtgggcctacgccctcggcgccacggttctcatatctgcagcgcctttttttgtcttattcctcatcccagtggaaagcaattccccaaggcaccggagcttgctgcagattctactcagctttgcctctggaggcctgctgggcgatgcgttcctgcacctgatcccacatgccctcgagccccactctcaccataccctcgaacagcccgggcacggccattcccactctggacagggccccatactgagcgtgggactatgggtgctgagcggcatagtagcgtttctcgttgtggagaagttcgtgcgccatgttaagggcggccatggtcactcgcacggacacgggcacgcccactcccacactagaggctctcacggccatgggcggcaggagaggagtacaaaagagaaacagtctagtgaagaagaggagaaggaaaccagaggtgtgcagaaacgcagaggagggagcacagttccgaaagatggcccagtgcggccccagaacgcagaagaggagaagaggggactcgacctgagagtatctgggtatctgaatctcgccgctgacctcgctcataacttcaccgacggactggctattggagcctcctttcgcgggggtagggggttgggcatcctgaccacaatgacagttctgctccatgaggtcccacatgaagtaggtgatttcgcgatactggtgcagagcggctgctccaagaaacaggccatgaggctgcagctgctcacggctgtcggtgccctggctggcaccgcctgcgcactcttaaccgagggtggagcagtcggctctgagattgcgggcggcgccgggccgggttgggtccttcctttcacagcgggaggatttatatacgtggcgacagtaagcgtcctcccagaactgctgcgggaggcgtctccattgcagagcctgcttgaggtcttgggacttctcgggggggtgatcatgatggtactgatcgcccatttggagtag

SEQ ID NO: 206163 - DNA, 1410 bp, synthetic construct
  misc_feature 1..1410: note = Description of Artificial Sequence: Synthetic coding sequence
  source 1..1410: mol_type = other DNA
atggcccggggcctgggcgccccccactgggtggccgtgggcctgctgacatgggctactctggggctgctcgtggccggcctgggaggtcatgatgacttgcacgacgacctgcaggaagattttcacggacattctcacagacacagccacgaggacttccaccacgggcactcacatgcccacggccacggccacactcacgaatcaatttggcacggtcatacccatgatcacgaccacggccacagccacgaggatttgcaccatggacactctcacggatattctcacgagtccctgtatcacagggggcacggtcatgaccatgaacacagtcatgggggttatggcgagagcggagccccaggcatcaagcaggatctggacgctgtgaccttgtgggcttatgccctgggggcaacagtcctgattagcgctgcccctttctttgtcctttttctgattcctgtcgaatccaattctccccgacaccggagtttgttgcagatcctgcttagcttcgccagcggtggcctgctcggtgatgcctttttgcacttgatcccacacgcccttgaacctcactctcatcacacacttgaacagcctggccacggacacagtcacagtggccaggggcctatcctgagtgtcggactctgggtgttatcgggcatcgtggcatttttggtggtagagaaattcgtgcgtcatgtgaaaggtgggcatgggcactctcacggccacgggcacgctcactcccatacccgggggagccatggacatggcagacaagaacggtctactaaagagaaacagagctcagaagaggaagagaaagaaacccggggggtgcagaaacgtagaggaggctcaacggtacccaaagacggacccgtccgcccccagaacgccgaggaggagaaacgaggtttagaccttagagtctcaggctacctcaacctggccgccgacctggcccacaactttaccgatgggctggctatcggtgcttctttcaggggcggtcgcggacttggcattctgactaccatgactgtcctgctgcacgaagtgccacacgaggtaggggacttcgcaatcctggtacagtcggggtgcagtaagaagcaagctatgaggcttcagttattgacagcagtaggggctcttgccggcacagcatgcgccctacttactgagggaggggctgttggttcagagatagcaggaggtgccggccccgggtgggtcctgccttttaccgccggagggttcatctacgtcgccactgtgagcgtgttacccgagctcctaagagaagcctcacccctgcagtctcttctggaagtattgggattattgggaggagtcattatgatggtccttatcgctcaccttgagtag

SEQ ID NO: 206164 - DNA, 1410 bp, synthetic construct
  misc_feature 1..1410: note = Description of Artificial Sequence: Synthetic coding sequence
  source 1..1410: mol_type = other DNA
atggcccggggcctgggcgccccccactgggtggccgtgggcctgctgacctgggcaaccctgggacttctcgtggcagggctgggcggccacgatgatttgcatgacgatctgcaagaggactttcacgggcactcccacaggcattctcatgaagattttcatcacggccactcccatgcccatggccacggtcatactcacgaatctatctggcacggccatacacatgaccacgatcatgggcattctcatgaggacctccaccatggacactctcacggctacagtcacgagagtttgtatcacagagggcacggccatgatcacgagcactcccatggaggctacggcgaatcaggagcgcccggaatcaagcaagatctggacgccgtgaccctgtgggcttacgcgctgggcgcaaccgtactcataagtgccgcccctttctttgtgctgtttttgatccctgtagagtcaaactctcccagacatcggtcgctgctccagattctgctgagtttcgcctccggaggacttctgggagatgccttcctgcacctgatccctcacgccctggagccccactcacatcacacactcgaacagcctggccacggccacagccactctggtcaggggcctattttgtccgtcgggctctgggtgctgagcgggatagtcgccttcctcgtggtagaaaaatttgtgaggcatgttaaaggtggccatggacactctcacggccacggccatgcccattcacacactaggggaagccacggacatggtcgacaagagcgcagtaccaaggaaaaacagtcctcggaagaggaagaaaaagagactcgcggtgtgcaaaagcgaaggggcggcagcactgttccaaaggacggtccagtcagaccgcagaacgccgaggaggaaaaacgcggcctcgatttgcgcgtgtctggataccttaacctcgcggccgacctcgcgcacaatttcactgacgggctggccattggggcgagttttagggggggacgcgggctggggattctgactactatgacggtcctgcttcatgaagttccacacgaggttggggatttcgcgatcctcgtccagtccggctgctccaagaagcaggctatgcggctgcagcttctgacagctgttggagcccttgccggcaccgcttgtgccctcctgacggaaggcggggctgtcggaagtgaaatcgccggcggagccgggccaggatgggtgctgccttttacagccggcggctttatatacgtcgccaccgtaagtgttctgcccgagctgctgcgggaggcaagccccctgcagtcgctattggaggtgttaggtctccttggaggggtcattatgatggtgttgatcgcccaccttgagtag

SEQ ID NO: 206165 - DNA, 1410 bp, synthetic construct
  misc_feature 1..1410: note = Description of Artificial Sequence: Synthetic coding sequence
  source 1..1410: mol_type = other DNA
atggcccggggcctgggcgccccccactgggtggccgtgggcctgcttacatgggccacactgggcctgcttgtggctggcctgggggggcatgacgacctgcatgacgatctgcaagaggactttcatgggcacagtcacaggcactcacatgaggatttccaccacgggcattcacacgcccacggacacggccatacacatgagtccatctggcacgggcatactcatgatcacgaccatggccacagccatgaagacctccaccacggccacagccatggctatagtcacgaaagtctctatcaccgcggacatggtcacgaccatgaacatagccacggcggttatggagagtcaggcgctcctggaattaagcaggatctggatgctgtgaccctgtgggcatatgccctgggcgccactgtgctcataagtgccgcaccattttttgtgctgtttctgattccagtggagtccaactctccgcgtcatagaagcctgctccagatattgctctcatttgcctccggggggctcctgggggacgcattcctacatcttattccacacgccttggagccgcactctcaccacactctggagcagcccggccacgggcactcacattctggacagggtcccattctaagtgtgggtctctgggtgctgtctgggatcgtagcttttctcgtggttgaaaaatttgtccggcatgttaagggtggccatggccactctcacggccacggacacgcacactcccacacaaggggatcacacggccacggcaggcaggagcgaagtactaaggagaaacagagttcagaggaagaggagaaagagaccaggggcgtgcagaagaggcgcggggggtctaccgtgccgaaagatggcccggtgcggccacagaacgctgaggaagaaaagcgggggctcgacctgagagtgtccggctatctaaatctagccgcagacttagcccacaatttcactgacggtctggcaatcggggcatccttcaggggcggtcgtggtttgggcattttaaccacgatgacagtcctgctgcatgaagtaccacacgaggtgggcgattttgcaatcttagtacaatccggctgtagcaagaagcaggctatgaggctgcagctgctcacagccgttggtgcacttgcggggactgcttgcgccctacttactgaaggtggggctgtgggcagcgaaatcgctgggggcgccggtcctggctgggttctgcccttcaccgctggcgggttcatatacgtggccaccgtgagcgtgctccctgaattgctgagggaagcaagccctcttcaatccctgctggaggtcctaggccttctcggcggcgtcataatgatggtccttattgcccacctggagtag

SEQ ID NO: 206166 - DNA, 663 bp, synthetic construct
  misc_feature 1..663: note = Description of Artificial Sequence: Synthetic coding sequence
  source 1..663: mol_type = other DNA
atggacagcagcctgcccgagtgccggcacatcggcaagggcatccgcgctaaagtagaaaggaatttcctctttagtagagatttgaaggccggccttcctcgtcctagcaaaccaggcaaggagagaattcccgagcccgccctgggcgcaaccgtacttatctccgctgcccccttttttgtgctctttctcattcccgttgagagcaactcccctagacaccgctcactgctgcagattctcctgtcattcgccagcggcggcttattaggagacgcgttcctgcacctcattccccacgctcttgagccccactcccaccatacactcgagcagccaggccatggacactcccattcgggccagggaccaatcttgagcgtgggcctttgggtcttgtcaggcattgttgcgttcctagtcgtggagaagtttgttcgacatgtgaaagggggccacgggcacagtcacgggcacggacatgctcacagccacactcgaggatctcatggccatggccggcaggagcgctctactaaggaaaaacaaagttcagaagaagaagaaaaggagacccgcggagttcagaaaagacgagggggatcgacggttcccaaagacggacccgtcaggccccagaacgctgaagaggagaagtag

SEQ ID NO: 206167 - DNA, 1125 bp, synthetic construct
  misc_feature 1..1125: note = Description of Artificial Sequence: Synthetic coding sequence
  source 1..1125: mol_type = other DNA
atggcccggggcctgggcgccccccactgggtggccgtgggcctgctgacatgggccacccttgggttgctcgttgcgggccttggcgggcatgatgaccttcacgacgatctccaggaggacttccacggtcattcccatagcgccgacttaagcagcagcatcttttgccccctaccatacccccgcggcgttgaactgtctcctgcatccttgtcaacttccgatttagcccaattctgttttcgctgggccccagggaggtgtttcctgcacctgatccctcatgccctggagccccactctcatcacacccttgagcagccagggcatggtcactctcactccggacaaggtccaatcctgagtgttggcttgtgggtcctaagcggaatagtggcttttctggtggtggaaaaatttgttaggcacgtaaaaggcggtcatggacactctcatgggcacggacacgctcactctcacacccgaggttcgcatgggcacggacgtcaggagagatcgaccaaagagaagcagtcaagcgaggaggaagagaaggagactaggggcgtccagaaaaggaggggaggctccacggttccaaaggatgggccagttaggcctcagaatgctgaagaggagaagcgtgggcttgacctgagagtgagcgggtatctgaatttggcagccgatctggcccacaactttacagatggactcgctatcggcgcgtcgttcaggggtgggagagggcttggcatcctcaccactatgaccgtgctactgcatgaggtcccgcacgaagtcggcgattttgcaatcctggtgcagagcggttgttccaaaaaacaggctatgaggctacagttgctgaccgccgtgggggctttggccggaacagcttgtgcactgctcacagagggtggagccgtgggctccgagatcgcagggggggcggggcccggctgggtgctcccgttcactgccggcgggtttatttacgtcgccaccgtgtcggtactgccagagttgctccgggaagcatcaccactccagtccctgctggaggtcctcgggctgcttggcggggtgataatgatggtactgatcgcccaccttgagtag

SEQ ID NO: 206168 - DNA, 1353 bp, synthetic construct
  misc_feature 1..1353: note = Description of Artificial Sequence: Synthetic coding sequence
  source 1..1353: mol_type = other DNA
atggcccggggcctgggcgccccccactgggtggccgtgggcctgcttacatgggcaactctgggactgttagttgccggactcggaggacacgatgacttacatgacgatctgcaagaagatttccatggacatggccacacccacgagagtatctggcacgggcacactcacgatcacgatcacggacatagtcatgaggatcttcaccacggccatagccatggctattcacacgaatctctgtaccaccgcggtcatggccacgaccacgaacatagccatggcggttacggggagagtggcgcccctgggattaaacaggaccttgatgccgtgaccctgtgggcctatgcgcttggcgcaacagttcttattagcgcagccccctttttcgtgctgtttctcatccctgtcgaaagcaattcaccccgtcacagaagcctcttgcagattctactgagcttcgctagcggtggtctgctcggcgatgcctttctgcacctcattcctcacgctttggagcctcatagccatcacacattggaacagccagggcacgggcactctcatagcgggcagggccctatcctgtcagtgggactgtgggtgctcagtggaattgtcgcgttcctggtcgttgaaaaattcgtgcgtcacgtgaagggaggacatggtcactcccatggtcacggccatgctcacagccacacaagaggctcccatgggcacggtcgccaagagagatctacgaaggaaaagcaaagtagcgaggaagaagagaaagaaactcggggcgtccagaagcgccgaggcggcagcactgtgccgaaagacgggcccgtcagaccccagaatgctgaggaagagaagagggggctggacttgagagtctcgggctatcttaacttagctgccgacctcgcccacaactttactgacggcttggccatcggcgctagcttccgggggggcaggggcttgggcatattaacgactatgacagtacttcttcatgaggtcccccatgaagtcggtgactttgccattcttgtccaaagtgggtgctccaaaaaacaggctatgcggctgcaactgctcactgccgtgggagcacttgcaggcaccgcttgcgccttgttgaccgaggggggcgccgtcggttccgaaatcgcagggggggccggacctggctgggtattgcccttcactgcaggcggatttatttacgtcgcaaccgtaagcgtcctgccagagctattaagagaggcttctcctttacagtctctccttgaagtgttaggtctactcggaggcgtgatcatgatggttttgatcgcccatctggagtag

SEQ ID NO: 206169 - DNA, 663 bp, synthetic construct
  misc_feature 1..663: note = Description of Artificial Sequence: Synthetic coding sequence
  source 1..663: mol_type = other DNA
atggacagcagcctgcccgagtgccggcacatcggcaagggcatcagagctaaggtcgaacgaaacttccttttctccagggacctcaaggcgggcctgccaaggcccagtaaacctggcaaagaacggatacctgaacccgctctcggcgccacagtgctgatctccgctgcccctttcttcgtgctttttctgatacccgtggagagcaactcacctcgacacaggagcttgttgcaaattctgctgtcgtttgcctcgggaggccttctgggcgacgctttccttcatctcatcccacacgccctcgaacctcacagtcaccatacactggaacagcctggccatggacactcacattcaggtcaaggccccatattgtcagtcgggctgtgggtcctgtccggcatcgttgcattcctggtggtggaaaaatttgtgcgtcatgtgaaggggggacacgggcactcgcacggtcacggccatgcacattcacatacccgcgggtcgcacggtcacggtcgacaggaaaggagtactaaggagaagcagtcgtctgaggaagaggagaaggagactcggggggtgcagaagcgacgcggaggttctactgtcccgaaggacggacctgtgcggcctcagaacgctgaagaggaaaagtag

SEQ ID NO: 206170 - DNA, 1410 bp, synthetic construct
  misc_feature 1..1410: note = Description of Artificial Sequence: Synthetic coding sequence
  source 1..1410: mol_type = other DNA
atggcccggggcctgggcgccccccactgggtggccgtgggcctgctcacctgggctacccttggcctactcgtggccggcctgggagggcatgacgatctgcatgatgatttacaagaggacttccatggccatagccaccgccatagccacgaagattttcatcatgggcattctcacgctcacggccacggccacacccatgaaagcatctggcatgggcacacacacgaccacgaccatggacacagccacgaagatctgcaccacggtcattctcacggctattcccacgaatctttatatcatagagggcacggacatgaccacgagcattcccacggcggctacggagagtccggagccccagggatcaagcaggacctggatgctgtgaccttgtgggcatatgccctcggggctacagtgctcattagcgcagctccctttttcgttctcttcctgatccccgtggagagcaatagcccaaggcaccggtctttgttacaaatccttttaagcttcgcatctggggggcttctcggggacgcctttctgcaccttatccctcacgccctggagccgcactcacatcataccctcgagcagcccggacacggccatagtcattccggacaaggaccgatcctttcagtgggcctgtgggtgttatccggcatagttgcttttttagtggtcgagaaattcgtcaggcacgtgaaaggtgggcatggccatagccatggtcatggacacgcgcactctcacaccagagggtcccatgggcacggaaggcaggaacggagtaccaaagaaaagcagagcagcgaggaggaagagaaggagacaaggggcgttcagaaacgtcgtggcggcagcaccgtcccaaaggatgggcccgtgaggccccagaacgccgaagaggagaaacgcggactcgatctgagggtcagcggttacctgaacctggccgctgacctggcacacaactttaccgatgggctggccattggtgcatcgttcagagggggtagggggctggggattctgaccacaatgactgtccttctccacgaggtgccgcatgaagttggagactttgccatcctagttcaatcaggctgctcaaaaaaacaggctatgagactgcagttactgaccgccgtcggggccctagccggaacagcatgtgcactgttaaccgaaggcggtgctgtggggagcgagatagctggcggtgcgggccctggctgggtgctacctttcactgcaggaggcttcatttatgtggccacagtcagcgtgctgcctgagttgctgcgtgaggcctcaccactgcaaagtcttcttgaggttctgggtttactgggaggtgtcatcatgatggtcttaattgcacacctcgaatag

SEQ ID NO: 206171 - DNA, 1125 bp, synthetic construct
  misc_feature 1..1125: note = Description of Artificial Sequence: Synthetic coding sequence
  source 1..1125: mol_type = other DNA
atggcccggggcctgggcgccccccactgggtggccgtgggcctgctcacatgggcaacattaggcctcttggtcgctgggctcggcggacacgatgatttgcacgatgatttgcaggaggatttccatggccacagccatagcgccgacctctcttcctcgattttttgtccactgccgtaccctcggggtgtggagttgtcccctgcatctctcagtacaagtgacctcgcacaattttgtttccggtgggcacccggccggtgctttttgcatctgatccctcacgcattagagccccactctcaccacacactggagcagcccggacatggacacagccattctggacaggggccaattctgtcagtgggcttgtgggtcctctctggtatcgttgccttcctggtagtcgaaaagtttgtgcggcacgttaagggtggccacggacattcacatggacacggccatgcacactcgcatacacgcgggagccacggacacggtcgccaggagcggtcaacgaaggagaaacaatcctcagaggaggaggagaaagagacccgcggggtccagaaaaggcggggcggaagcactgtgccaaaggacggacccgtgcgaccacaaaatgcagaggaagagaagcgtggactggatttgagagtttcaggatatctgaacttggcagcagatcttgcccataattttactgatgggctagccattggtgcttcgtttcgggggggaagaggtctgggtatcctcactacaatgactgtactgctccacgaggttccacacgaagtgggagacttcgccatcctcgttcagtcgggatgttccaaaaagcaggcaatgcgtctgcagctgttaacagccgtgggcgcacttgctgggacagcctgcgccctgttgactgaaggaggcgccgtgggaagtgagatagctggaggcgctgggccaggttgggtgctcccatttaccgctggcggattcatctacgtggccacggtgagtgtccttcctgagctcctgcgggaggctagcccattgcagagtctgttagaggtcctgggacttctcggaggagttattatgatggtactcatcgcccacctcgagtag

SEQ ID NO: 206172 - DNA, 1353 bp, synthetic construct
  misc_feature 1..1353: note = Description of Artificial Sequence: Synthetic coding sequence
  source 1..1353: mol_type = other DNA
atggcccggggcctgggcgccccccactgggtggccgtgggcctgttgacatgggcaactttgggcctgctggtggcagggctcggtggacatgacgatctccacgatgacctccaggaggatttccacggacatggacatactcatgaatcaatttggcatggccacacgcacgaccacgaccacggccattctcatgaagatctgcatcacgggcacagtcacgggtattcacacgaaagcctataccaccgcgggcacggccacgaccacgagcactcccatggcgggtacggcgagtctggtgcgcctggtatcaagcaagacctggatgctgtgacactgtgggcttacgctttaggcgccactgtgttaatttcagcagccccattcttcgttctgttccttattcccgtggagagtaatagtcctcggcataggtctctgttgcagatcctgctgtcgtttgcaagcggaggactgctgggagatgcatttctgcatctaattccccacgccctggagcctcacagccatcatactctggagcagcctggacatggccattcacacagtggacagggtcctatactgagcgtgggcttgtgggtgctttctggtatagtcgcttttctcgtggttgagaaattcgtccgccatgtcaagggtggccatggccatagccatgggcacggccatgcccatagccatactcgggggtcccacggacatggccggcaggagagatcaaccaaggaaaagcaatcgtcagaggaagaggagaaagaaacccggggcgttcagaagcgtcgagggggttcaaccgtgcccaaagatggtcctgttagaccccagaatgctgaggaagagaaacgcgggcttgacctgagggtctccggatacctgaatttggcggccgatttagcccataatttcactgacggtttagctattggcgcctctttccgaggcggtcggggtttgggaatcctgacgaccatgactgtgctcctgcacgaagtgccgcatgaagtgggggactttgctatactggtgcaatcagggtgcagcaagaaacaggccatgagactgcaattactgactgcagtgggggctttagccggtactgcttgcgctctccttaccgaggggggcgctgtcggaagcgaaatagccggtggagccggcccaggttgggtgttgcccttcaccgccggtgggttcatctacgtggctaccgtgtctgtcttaccggaactgttgcgggaggcatccccattacagtccttgctcgaagtcctgggtctgctgggaggcgtcatcatgatggtgttgatcgcccatctggagtag

SEQ ID NO: 206173 - DNA, 1125 bp, synthetic construct
  misc_feature 1..1125: note = Description of Artificial Sequence: Synthetic coding sequence
  source 1..1125: mol_type = other DNA
atggcccggggcctgggcgccccccactgggtggccgtgggcctgttaacgtgggcgacgctcggcctcctggtagctggattaggggggcatgatgatctgcatgacgacctgcaggaggactttcacggacatagccacagcgccgatctatcttcctctatcttctgccctctcccatatccccggggcgtggagctcagtcctgccagcctgagcacaagtgatctagctcagttttgtttccggtgggctcctggtcgttgctttctacacctgatcccacacgcccttgagccccacagccatcacacccttgagcagcctggccacggtcattcccattcaggccagggccccatcttgagcgtggggctgtgggtcctgtccggcatcgttgcctttttggttgttgaaaagttcgtccgccacgtgaaaggaggccatggccactcccacgggcacggtcatgctcactcccacacaagggggagccatgggcacgggcgccaggagcgctctacaaaagaaaagcagtcaagcgaagaagaggagaaagaaacacgcggtgttcaaaagcgaagaggcggctcaacggtgccaaaagatggtccagtgaggccccagaacgccgaggaagaaaagcgtggactggaccttagggtttccggatatcttaacctggccgcagacctcgcgcataatttcactgacggactagccatcggggccagttttaggggcgggcgcgggctgggtattctcacaaccatgactgttctgctccacgaggtgccccacgaggttggggactttgccattctggttcagtccgggtgctccaagaaacaggcgatgaggctgcagttgttgacagcagtgggcgcccttgcggggactgcatgtgcgctcctcacagaggggggcgcggtggggagcgagatagctggaggggctgggcccggctgggtgctgccctttacggctggaggattcatttatgtcgccacagtgtccgtcctccccgaactcctgagagaggcatctcctctgcaaagtctcttggaggtgctgggacttttaggaggggtgattatgatggtacttatcgcacacttggaatag

SEQ ID NO: 206174 - DNA, 1125 bp, synthetic construct
  misc_feature 1..1125: note = Description of Artificial Sequence: Synthetic coding sequence
  source 1..1125: mol_type = other DNA
atggcccggggcctgggcgccccccactgggtggccgtgggcctgctgacctgggccaccttaggcctgctggttgctgggctgggggggcacgacgatttgcatgacgacctacaggaggattttcatggccacagtcatagcgctgatctgtcttcgagcattttttgcccactgccatacccaagaggcgtcgagctgtcaccagccagcctttccacttcagatcttgcccagttttgctttcgatgggccccaggcaggtgctttctgcatctgatcccccacgcattggagccgcattcgcaccacacgctggaacaacccgggcatggccattcacacagtggacagggtcctattctgagcgtgggactgtgggtacttagcggtattgttgcgtttttggtggtggagaaatttgttcgccacgtgaagggtggtcacgggcattcccatgggcatggccatgcccactcacatacccgcggtagccatggccatgggagacaagagaggagtaccaaggaaaagcagtccagcgaggaggaggagaaagaaacaagaggagtacagaaaagacgcggagggtcaactgtgccaaaagacggccctgtgagaccacaaaacgccgaggaagagaaaagaggcttggaccttagggtgagcggttatctcaatttagccgctgatctggcccataacttcacagatggccttgctataggtgcctccttccgcgggggacgcgggctcggcattttgacaaccatgactgtactactccacgaggtcccacacgaggtcggggatttcgctattctcgttcagtctgggtgcagcaagaagcaggctatgcgtcttcaactcctgaccgcagttggcgccctggccgggaccgcgtgcgctctgctcactgaggggggtgcagtcggttcagagattgccggtggcgctggcccgggctgggtattgcccttcactgccggagggttcatttatgtggcaaccgtctcagttctgcctgaactgctgagagaagcaagcccccttcagagtcttctggaagtgctgggtttgcttggcggagtgattatgatggtccttatcgcccacctcgagtag

SEQ ID NO: 206175 - DNA, 1353 bp, synthetic construct
  misc_feature 1..1353: note = Description of Artificial Sequence: Synthetic coding sequence
  source 1..1353: mol_type = other DNA
atggcccggggcctgggcgccccccactgggtggccgtgggcctgctgacatgggccaccctcggtcttctagtcgctggtctgggggggcacgatgaccttcacgatgacttgcaggaagattttcacgggcacgggcacacccacgaatctatttggcacggccacactcatgatcatgatcacggacactcacatgaagatctgcatcacggtcacagtcatggttattctcatgaatccttataccatagaggacacggtcacgatcacgagcatagtcacggaggctacggggagtccggagctcccggtatcaaacaagatttggacgcggttactctgtgggcctacgccttgggcgcaaccgttctgatcagcgccgctccttttttcgtgctgttcctcataccagtagagtccaactctccccgccacagaagcttactgcagatcctgttgagctttgcctctggaggactgctgggcgatgcctttcttcatctcattccccatgcgttggagcctcattcccatcatacattagagcaaccaggccacgggcactcccactccggccaaggtcctatcctttccgtaggtctgtgggtcctcagcggcattgtggcctttcttgttgtggaaaagtttgtgaggcacgtcaaaggtggacacggccactctcatgggcatggacatgcccatagccacactagggggagtcatggacacggcagacaggaaaggtctactaaagaaaaacagtcttccgaagaggaagagaaagagactaggggcgtgcaaaaaaggagaggtggaagcaccgtaccgaaggatggacctgtgcggccacaaaatgccgaggaggagaaaagaggtttggacctacgggtgtccggataccttaacctcgctgcagacctggctcacaattttaccgatggcctggcaataggggccagcttcagggggggtcggggcctcggcatattgaccaccatgaccgtgcttctccacgaagttccccatgaggtgggggacttcgccattctcgttcagagtggatgctctaagaagcaggctatgaggctccaacttctgacagccgtgggggcactagccggcactgcatgtgctctgctcaccgaggggggggccgtggggagcgagattgctggaggcgccggcccgggctgggtgctgccatttactgccggtggcttcatttatgtggcaactgtctccgtattaccagagctgttgcgagaggcgtctccacttcaaagcctgcttgaggtacttgggcttcttggaggagttatcatgatggtcttgattgcccacctagagtag

SEQ ID NO: 206176 - DNA, 1353 bp, synthetic construct
  misc_feature 1..1353: note = Description of Artificial Sequence: Synthetic coding sequence
  source 1..1353: mol_type = other DNA
atggcccggggcctgggcgccccccactgggtggccgtgggcctgctcacttgggctaccttagggcttctggtggctgggctgggcgggcacgacgatctgcacgacgacctccaagaggactttcatggacacggccacacacacgaatcgatatggcacggacatacacacgaccacgaccacggacatagtcatgaggacctacatcacgggcactcacacggttattctcatgaaagcctataccaccgaggacatggacacgaccacgaacacagtcacggaggttatggcgaaagcggcgctccggggatcaaacaggacctggatgctgtgaccttgtgggcgtatgccctgggagctaccgtcctgataagtgccgcccccttttttgtgctgttcctaattcccgttgaatcaaattcgcctcggcacaggtccctactgcagattctgctgagtttcgccagcggcggtttgctgggcgatgccttcctgcatttgattcctcacgccttagagcctcacagccaccacacgttggagcagcccggccatggccacagccattctggacagggtccaattctttcagttggcctctgggtactctctggcattgtcgcattcctggtggtcgagaagtttgtgcgccacgtgaagggagggcacgggcactctcacggacatgggcacgctcatagtcacacccgcggttcccacgggcacggacggcaggagcgatctaccaaggagaagcagtcttccgaagaggaagaaaaagagactagaggcgttcagaagagaaggggtgggtccacggttccaaaagacgggccagttcgcccccagaatgccgaggaagaaaagagagggctcgacttgagggtgtcaggatatctcaaccttgccgccgacctcgcacataatttcactgatggactagccatcggggcttcttttcggggcgggagagggctgggcattctaacaactatgaccgttctgctccatgaagtaccccacgaggttggcgattttgcaatcctggtgcagagcggatgcagcaaaaagcaggctatgcgcctgcagcttctgacggcagttggggccctcgctgggactgcttgtgccctcttgacggaggggggggctgtgggaagcgaaatagccgggggagctggtcccggctgggtgctgccttttaccgccgggggattcatctacgtcgccacggtgtccgtgctccccgagttactccgcgaggcgagtcctctgcagtctctgctggaggtgttgggcctcctgggcggtgtcataatgatggtactcatcgctcatctggagtag

SEQ ID NO: 206177 - DNA, 1125 bp, synthetic construct
  misc_feature 1..1125: note = Description of Artificial Sequence: Synthetic coding sequence
  source 1..1125: mol_type = other DNA
atggcccggggcctgggcgccccccactgggtggccgtgggcctgttgacttgggcgactctgggtctgctggtcgctggtctgggaggacatgacgatctgcacgatgatctgcaggaggactttcatggacacagccattcggccgatctgagttcgtcaatcttctgtcccctgccttatcctcgtggggtggaactgagcccagcgtctcttagtacgagtgacttggcacaattctgcttccgctgggcccctggtagatgcttcctgcaccttatcccacatgccttggaaccacactcacaccacactcttgaacagcctggccatgggcattcacatagtggtcagggccccatactgtcggtggggctctgggtgctgtcagggatcgtggcatttctggtggtggaaaaatttgtccgccatgttaaaggggggcatggtcacagccatggccacggtcacgctcactctcacacaagaggtagccacggccacggcagacaggagcgtagcactaaggaaaaacagagttccgaagaggaagagaaagagacaaggggagtgcagaagcgcagaggcggctccacggtgccaaaagatgggcccgtgagaccgcaaaatgccgaggaggaaaaacggggactagatctgcgggtgtccggctacctgaacctggccgctgacctggcccataacttcaccgacggtttagcaatcggggcctcttttcggggcggccgggggctgggcatactgactacgatgaccgtgttactgcacgaggttccacacgaagtcggggactttgcgatcctggttcagtctggatgttcgaagaagcaggctatgaggcttcaactgttaactgcagtgggtgcccttgccggaacggcgtgtgctctcctcacagaaggcggagcagtggggtcagaaatcgctggcggagcgggtcccggatgggtgctcccgttcactgccgggggttttatctatgtggcgaccgtgtctgtgttgccagagttgctgcgagaagcaagtcctttacagtctctcctggaggtgctgggcttgctggggggcgtgattatgatggtcctgatcgcacatcttgagtag

SEQ ID NO: 206178 - DNA, 1353 bp, synthetic construct
  misc_feature 1..1353: note = Description of Artificial Sequence: Synthetic coding sequence
  source 1..1353: mol_type = other DNA
atggcccggggcctgggcgccccccactgggtggccgtgggcctgctgacctgggcgaccttgggtctgctggtggctgggctcggcggacatgacgatctgcatgacgaccttcaggaggattttcatggtcatggccacacacacgaatctatctggcatggtcatacacatgaccacgaccatggacacagtcatgaagatctccaccatggccactcacacggatacagccacgagtctctttaccatagaggacatgggcacgaccacgagcactctcatggagggtatggagagtcaggagcaccaggcattaaacaggacctggacgcggtgactttatgggcttatgctcttggggccacagtcctaatctcagccgctcccttctttgtgcttttcttgatccccgtggagagcaactctccgcgccaccgttccctattacagattctcctgagcttcgctagcggtgggttgctgggcgacgcttttctgcatctgatcccccacgcacttgagccgcactcccaccacaccctggagcagcccggacacgggcactcccatagcggccaggggcctatcctctctgttggcctgtgggttctcagcggcatcgtggcgttcttggtggtagagaagtttgtaagacatgttaaaggaggtcatggtcactcgcacggccacgggcacgcccatagccatacgcggggcagccatggtcacgggcgccaggaacggtccaccaaagaaaagcagtcctctgaagaggaggagaaggaaacaagaggagtgcagaaaaggcgcggaggatccaccgtccccaaggacggacccgtgcggccccagaatgccgaggaggagaaacgcggtctcgacttacgcgtgagcgggtacctgaacctcgcggccgaccttgcacataatttcactgacggtttggctataggagcatccttcaggggaggaagagggctcggtattctgacaaccatgactgtgctgctccatgaggtgccccacgaagttggagactttgccattctggtgcagtctgggtgctcaaagaagcaagccatgcggctccaacttctaacagcagttggcgcccttgctggaactgcgtgcgccctgttgactgagggcggggccgtgggtagtgagatagccggaggcgccggccccggctgggtgcttccattcaccgcagggggcttcatctacgtcgcaacagtctcggttctgcccgaactgctccgggaagcttccccgctccagagtctgctggaagtgctgggcctgctgggcggagtcatcatgatggtgctgatcgcacatctggagtag

SEQ ID NO: 206179 - DNA, 1353 bp, synthetic construct
  misc_feature 1..1353: note = Description of Artificial Sequence: Synthetic coding sequence
  source 1..1353: mol_type = other DNA
atggcccggggcctgggcgccccccactgggtggccgtgggcctgctcacatgggcaacactcgggctgttggtggcgggtctgggcgggcacgacgacctccatgatgatctgcaagaggatttccatggccacggacatacacatgaaagcatatggcatggccacacgcacgatcacgaccacggtcattctcacgaagacctgcaccatggccattcccacggttacagccacgagagcctgtaccaccgaggacacgggcacgatcatgagcatagtcacggaggctacggggagagcggtgctcctggcatcaagcaggatctggatgcagtgacactgtgggcatacgcactgggcgctacagtgttaatctctgccgctccttttttcgtgcttttcctcatcccagtggagtctaatagtccacgccacaggtcactactgcagattttgctgtcatttgcatccggaggcctccttggcgatgcgtttctgcatttgataccccatgccctggagcctcacagtcatcatacacttgaacagcctgggcacggccacagtcactctggtcagggacctatactttctgttgggctgtgggtgctctccgggatcgtcgctttcctagttgttgaaaaattcgtgaggcacgtgaaaggtgggcatggacactcccacggccacggccacgcgcacagccacacgagggggtcccacggccacgggcgacaggagagaagcaccaaggagaaacagtcttcagaagaagaggaaaaagaaacacggggcgtacaaaaaaggcggggtggttcaaccgtccccaaagacggccctgttcgcccccagaatgccgaggaagagaagcggggcctggacctccgcgtgtctggatacctaaacttagcagccgacctggcacataattttacagatggactggcgatcggcgcttcctttaggggcggtagaggacttggcattttgacaacgatgactgtacttttgcacgaggttccccatgaagtaggggatttcgcgattttagtgcagtccggctgctctaaaaaacaggccatgcggttacaacttctgaccgccgtgggtgccctggccggtaccgcttgcgctcttctgacagaggggggggctgtcgggtcggaaatagccggtggcgccggtccaggctgggtcctcccttttaccgcaggcggatttatttacgtagctaccgtctctgtgctaccagaattgctgagagaggcctccccactgcagtccctactcgaggtccttggcctcctgggcggggttataatgatggttctaatagcgcacctggaatag

SEQ ID NO: 206180 - DNA, 1125 bp, synthetic construct
  misc_feature 1..1125: note = Description of Artificial Sequence: Synthetic coding sequence
  source 1..1125: mol_type = other DNA
atggcccggggcctgggcgccccccactgggtggccgtgggcctgctgacctgggccacgctcgggctattagtcgccggcctgggagggcacgacgatctgcacgacgatctccaggaagattttcatggtcattcccatagcgccgatctgtccagctctatcttctgcccccttccatacccaagaggcgtggagctatcaccagcttctctcagtacctctgacttagctcaattctgtttccgctgggcccctggaaggtgttttctccacctaattccccacgctctcgaacctcacagccaccatacgcttgaacagcctgggcatgggcatagccattcagggcagggacctattttgtcagtcgggctgtgggttctgagtggtatcgtcgcctttctcgtagtcgagaagtttgtgcgccatgtgaagggcggacatggacactcacacggccacggtcacgctcattctcacacacgtggctcacatggtcacgggaggcaagagaggtctactaaggagaagcagtcaagcgaagaggaggaaaaggaaaccaggggggtgcagaaacggcgtggcggcagtacagtgcctaaggatggcccggtgcgcccccagaacgccgaagaagaaaagcgcgggcttgatctgcgggttagcggatatcttaatctggcagccgatctggctcataatttcacggatggcctggcaatcggagctagcttccggggaggacgcggactggggatactcacaacgatgacggtcttgcttcatgaggtaccccacgaagtgggagattttgccatactggtgcagtccggctgcagtaaaaagcaagccatgagactccaactcctgacagcagtgggcgctcttgccggcactgcatgcgccctcctgacagagggcggcgcggttggatctgagatcgcagggggagccggacctggatgggtgctgcctttcaccgcaggtggattcatttacgtggccactgtgagcgtgcttcctgaattactcagagaagccagtcctctgcagtcactattggaagtactgggcctcttgggtggcgtaataatgatggtgttgatcgcccacctggagtag

SEQ ID NO: 206181 - DNA, 2391 bp, synthetic construct
  misc_feature 1..2391: note = Description of Artificial Sequence: Synthetic coding sequence
  source 1..2391: mol_type = other DNA
atgctggcccccctgcggaacgcccccggccgggagggcgccacctctccaagccccccgaccgacgccaccggctcactaggcgaatgggatgtcgatcggaatgtaaaaacggaggggtgggtctcgaaagagagaatctcaaaactgcataggttgcggatggctgatattttgagccagagcgagacactggcttctcaagacctatctggggacttcaagaagcccgcgcttcccgtgtcccctgcagcccggtctaaggcaccagcctcctcatcttctaaccccgaggaagtccagaaggagggtcccacggctttgcaggattcaaacagtggcgaacctgatatacctcctccgcagcccgactgtggcgattttcgctctctacaagaggagcagtctcgcccaccaacagcggtctcttcaccagggggtcctgcgcgagcaccgccataccaggagcccccctggggtggcccagccactgcaccatactccctggagactcttaagggagggacaattctgggcactagatctttgaaggggacgtcatattgcctgtttggacgattatcgggttgtgacgtatgtcttgagcatcccagtgtgtctaggtatcatgccgttcttcagcatcgggcttccggcccggatggtgaatgtgatagtaacggacccggcttctacctgtacgatctggggtccactcacggtacgttcttgaataagacgcggatccctccaagaacatactgccgagtgcatgtgggacacgtcgtgcgtttcggaggttcaactcgcttgttcatccttcagggtcccgaggaggaccgggaagcagaatctgaacttacagtcacgcagttgaaggaactacgtaaacagcagcagattttgctagagaaaaaaatgctgggagaagactccgatgaggaggaggagatggatacttccgagcgaaagattaacgctggaagtcaggatgacgagatggggtgcacatggggcatgggagaggacgccgttgaagatgatgcagaggagaaccccattgtgttagagttccagcaagagcgagaagcgttttatatcaaggacccaaaaaaagccctacaggggttcttcgatcgcgaaggggaggagctggagtacgagttcgatgagcaaggacattccacatggctctgccgcgtcagactcccagtagacgatagcactgggaagcagctggttgccgaagccatacatagtgggaaaaaaaaggaggccatgatccagtgctcactggaagcctgccgcattctggacaccctaggcctactgcgccaagaagcggtctctcgtaagcggaaggctaagaattgggaagatgaagacttctacgactccgacgacgacacttttttggatagaactggacttatcgagaaaaaacgtctgaatcggatgaaaaaggcggggaaaatagatgagaagcctgagacttttgaaagcctcgtagctaagcttaacgacgctgaacgcgagttatctgaaataagtgaaaggttgaaagcaagttcacaagtgctgtccgaaagcccgtctcaagactcattagatgctttcatgtcggagatgaaatccggtagtactctggatggcgtctccaggaaaaaactgcacctgagaactttcgagctcagaaaagaacaacagaggcttaaaggtctgataaagatcgtcaagccagccgagattccagagttgaaaaaaaccgaaacacagactaccggagcagaaaataaagcaaaaaagctcacgctgcccctcttcggagctatgaaaggggggagcaagtttaagctcaagaccggcactgtggggaagttgccacctaaacgacctgagctgccacctaccctcatgagaatgaaggacgagcccgaggttgaggaagaggaggaagaggaagaggaagaagaaaaggagaaggaggaacacgagaaaaagaagctcgaggatggctcactctcaagaccccaacccgaaatcgagcccgaggcggccgtgcaggagatgcgcccacccaccgacttgacgcacttcaaggaaacacagacacacgagaatatgtctcagttgagtgaagaagagcagaataaggactaccaggactgtagcaagaccacgagtctctgcgcaggcccaagtgctagtaagaacgagtacgagaagtccagaggagaattgaaaaaaaaaaagacaccggggccagggaaactgcccccaactctcagcagcaaataccccgaggacgatcccgattattgcgtgtgggtgcctcctgaaggccagagcggcgatggtcggacacacctcaacgataaatacggctattag

SEQ ID NO: 206182 - DNA, 3699 bp, synthetic construct
  misc_feature 1..3699: note = Description of Artificial Sequence: Synthetic coding sequence
  source 1..3699: mol_type = other DNA
atggacttcctgctgcggccccagcccgagcccgagagcctgggcccaggaacacccggctttccagagcaagaggaagatgaactgcatcgaaccctgggcgtcgaaagatttgaggaaatcttgcaagaggcgggcagtaggggtggcgaggagcccggacgttcctacggggaggaggacttcgaataccacagacagtcgtcccaccacatccaccacccactctccacccaccttcccccggatgcgagaagaagaaagacccctcagggcccagggcgcaagccccggagaaggccgggagcctctccaaccggagagaccccgaccatcgaggagggcgaggaggacgaagacgaagcctccgaggctgagggggctcgggccctgacccagccatcaccagtaagcacgccgtcctccgtgcagttcttcctgcaagaagatgattcggcagatcgaaaagccgagaggacatcgccatctagtcctgcgcccctgcctcaccaggaggctacacctcgggcgtctaaaggcgcccaggcaggaacacaagttgaggaggccgaagctgaagccgtggcggtcgctagcgggacagcaggaggtgatgatggcggcgcaagcggccggcctttaccaaaagcgcagccagggcaccggtcttataacctgcaggagagaagacggatcggcagcatgacaggagccgaacaggccttgcttcccagagtgccaaccgatgagattgaggcccaaacactggctaccgctgatctggaccttatgaagagccataggtttgaggatgtgccaggtgtgaggagacatctggtgcggaagaatgcaaaagggtctacacaaagtggtagagaagggagggagcctggtccgaccccccgggccaggcctcgggctccccataaaccgcatgaggtgtttgtggaattgaacgaactgctgctcgacaaaaaccaggagccacaatggagggagacagcaaggtggatcaaattcgaagaagacgttgaggaagagactgaaagatggggcaagccccacgtggcatccctttctttcaggtctctgctggagctgaggcgcaccctcgcccatggagccgtccttctggaccttgatcagcagactctgccgggagtggcgcatcaggtagtggagcagatggtcatctcggaccagatcaaagccgaggatagagccaatgttctgcgggcgctactgttgaagcatagccatcctagcgacgagaaagatttctccttccccaggaacatatcagccggttcgcttgggagcttattggggcatcatcacgggcaaggggccgagagtgatccacatgtgactgaaccactgatgggaggtgtacctgagacgcgactcgaagtggagcgcgagagggagctgcccccacccgcaccccctgccggcatcactcggtctaagtctaaacacgaactgaaactgttagaaaagattcctgaaaacgccgaagcaacagtggtgcttgtgggttgcgtggaattcctatccagacctacaatggccttcgtgcgcctgagagaggcagtggagctggatgctgttttagaggtgcccgtgcccgttagatttttatttcttctgctcggtccgtcctccgccaacatggactatcacgagatcggccggtccataagcactcttatgtccgacaaacagtttcacgaagctgcatatctggccgacgaaagagaagacctgctgacagctatcaatgcgttcctggattgctcagtggtgctgccgccctctgaagtccagggtgaagaactgctaaggtccgtcgcgcacttccagcgccaaatgttgaagaaacgcgaagagcagggacggctcctgccgaccggagccggtcttgaacctaagtctgcgcaggacaaagcattgctacagatggtggaggccgcgggagccgccgaagatgatcctctgcggcgaacaggacggccattcggggggcttattcgggacgttaggcgaagatatccacactacttgagcgactttagggacgccttagacccgcaatgcctggctgctgtgatttttatttacttcgctgctttatctcctgccattacttttggaggcctgctgggcgaaaagacccaggatttgatcggtgtgagcgagctcatcatgtcaaccgctctgcagggcgtagtcttttgcttgttgggagcccagcccctgctcgtgatcgggttctcaggcccactgctagtgtttgaggaagccttcttttctttttgttcatctaatcatctagaatacttggtgggtcgcgtgtggattgggttctggttagtgttccttgcactgttaatggtggctctggaaggctcatttctggtcaggttcgtatcccgttttacgcaagaaatcttcgccttccttatctcactgatttttatctacgaaacattctacaaactggttaaaattttccaggagcatcctctgcacggctgcagcgcctctaatagttctgaagtagacgggggcgagaacatgacttgggctggcgctagaccaacccttggaccgggcaataggtcattagccggccagagtggccaagggaaaccaagggggcagccaaataccgcgttgctctcgctagttctgatggccggcacattttttattgccttttttctcagaaaattcaaaaattccagatttttccctggcaggatccggagagttattggcgatttcggcgttccaatcgccatcctgataatggtgctggtagattattctatcgaggacacttatactcagaagctgagtgttccaagcggattctccgtaaccgcacccgaaaagaggggatgggtcattaacccactgggggagaaatccccattccctgtgtggatgatggtggcttctctactgcccgccatccttgtgttcatccttattttcatggagacccagattaccactctcatcattagcaagaaagaaaggatgctccaaaaaggctcaggcttccatcttgacctgctgctcattgtggcaatgggcgggatctgtgcccttttcggcttgccctggttagcagcagcaactgttcggtccgtaacccatgccaatgccctcaccgtcatgagtaaggctgtggccccaggagacaaaccaaaaatccaggaggtcaaggaacaacgtgtgacaggacttttggtggcccttctggtaggattgtctattgttattggcgacttgctgcgtcagattccactcgctgtgctcttcgggatatttttatatatgggggttacaagtctaaatggaattcagttctacgaacggctacacctgcttttgatgccaccaaaacaccatccagacgtgacttatgttaaaaaggtaaggaccttacgtatgcatctcttcaccgcactgcagcttctgtgcttggccctcctctgggcagtaatgtccacggcggcttccctcgccttccccttcatcttgatcctaactgtgccactgcgcatggtggtcctgacccggatctttacagatagagagatgaagtgcctggacgccaacgaggccgagcccgtctttgacgaacgggagggggtcgacgaatataacgaaatgcccatgcccgtgtag

SEQ ID NO: 206183 - DNA, 3684 bp, synthetic construct
  misc_feature 1..3684: note = Description of Artificial Sequence: Synthetic coding sequence
  source 1..3684: mol_type = other DNA
atgacccagcccgagcccgagagcctgggccccggcacccccggcttcccagaacaggaggaggacgagttacatcgcacgcttggagtcgagcggttcgaagaaattttgcaggaagcaggctcccgtggcggcgaagaacccggcagatcttacggcgaggaagacttcgagtatcataggcagtcttcccaccacatccaccatcctctatctacgcacctgccaccagatgcaaggagaagaaaaactccccaggggccaggacgtaaacccaggaggcgccctggagcctctccaactggtgagacacctactatcgaagagggtgaggaggacgaggatgaagccagcgaagcagagggggcccgcgcactcacacagccatcacctgtgtcaaccccttctagtgtacaatttttcctgcaggaagatgactctgcagataggaaggccgaaagaacatccccttctagtcccgcccctctgccacatcaggaagcaacgccacgcgcttccaaaggggcacaagctggtacgcaggtggaagaagctgaggcagaggctgtcgcggtagcatctgggacagcgggcggcgacgatggaggtgcgtctgggaggccattgcccaaagcgcagcctggtcaccgcagctataatttgcaggagagacggcggatagggtctatgaccggggctgagcaagccctgctcccgagggtccccacagacgagatcgaggcccagacgctggcgaccgccgatctggatctgatgaagagccacaggtttgaagatgtgcctggagttcggcgtcacctggttaggaaaaacgccaaggggtcaactcagagcggcagagagggccgggagccaggtcctaccccacgtgcccgcccgcgggctcctcacaagccccacgaggtgttcgttgagctgaatgaactgctactcgacaagaatcaggagccacaatggcgagaaaccgccaggtggataaagtttgaagaagatgtagaggaggagacggagaggtggggcaaaccacatgtcgcgagcctgagcttccgatcattgttagagctgagacgcactttagcacacggtgctgtacttcttgaccttgaccagcagaccctgccaggagttgcacaccaggtggtcgagcaaatggttatctccgatcagataaaggccgaggatagagcaaacgtgttgcgcgccctattgctgaagcactctcatccttctgatgaaaaggacttttccttcccccggaatatctccgcaggatcactcggttctctgctggggcaccaccacggccagggtgcagaatctgatccacacgtcacagagcccctgatgggcggcgtgccggagacacgcctggaggtggagcgggagagagaattgccgcctcccgcgccccctgccggcattaccagaagtaagagtaagcacgaattaaaactcctggagaaaattcctgaaaacgcggaggccaccgtagtgctcgtcggctgcgttgagttccttagccggcctacaatggcatttgtgcgtctgcgtgaagcggttgaactggacgcagtactcgaggtacctgtccccgtcaggttcctttttttgctcctggggccgtctagcgccaacatggattaccacgagatcggacgttccattagtactctgatgagtgacaaacagttccacgaagccgcctacctggccgacgagcgggaggatctccttactgcaatcaacgccttcttggactgtagcgtagtcctgcctccatccgaggttcagggggaggagctgctgcgaagcgttgctcattttcagcgacagatgcttaagaagagggaagagcaggggagacttctgcctacaggagcagggttagaaccgaaaagtgcccaagacaaggctctgcttcagatggtggaagctgccggcgctgccgaagatgacccgcttcggaggaccggccggccatttggcgggctcatccgcgatgtgcgacggcgctatccgcattacctgagcgattttagagatgctctagaccctcagtgtttggccgccgtgatatttatctattttgcagctctgtcgcctgccatcacctttggaggactgctgggagaaaagacacaggacctcataggagtgtctgagctgattatgtccactgcactgcagggagtggtgttttgcctccttggggcccagcccttgctcgtcattggattttccggaccactgttagtgtttgaggaggccttttttagtttttgtagcagtaatcatctcgaatatttagtgggaagggtgtggatcggcttctggttggtgttcctcgccctgttaatggtggcgcttgagggtagtttcttagttcggttcgtgtcacgtttcacacaggagatttttgcatttctgatctcactcatctttatatatgagactttctataagctggtaaaaatatttcaggaacacccgctccatgggtgctccgcatcaaattcatctgaagtggacgggggcgagaatatgacatgggccggagctcgcccgaccctggggcccggcaacaggtccttagccggacagtctggccaaggcaagccaagaggccagcctaataccgctctcctgtccctcgtgctcatggcgggaacatttttcattgcttttttcttaagaaagttcaaaaattcccggtttttcccagggcgtattcggagagtcatcggcgacttcggcgtacccattgccatcctgatcatggtccttgtagattacagcatagaggacacttacacccagaagctgtctgtgccgtccgggtttagcgtcaccgctccggagaagagagggtgggtgattaaccctctcggggagaagtcgccctttccagtgtggatgatggtcgctagcctgctgccagccattctcgtcttcattttgattttcatggaaactcaaatcaccactttaatcatctcaaaaaaggaacgcatgcttcagaaaggaagcgggtttcaccttgatctgctgttgatcgtggcaatgggcggcatatgcgccctattcggattaccttggttagcagcggccaccgtcaggtcagtgacccacgcaaacgcactaacagttatgtccaaagctgtggctcccggagataaaccaaagatacaggaagttaaggaacagcgcgtgactggcctgttggttgccctgctggttgggctgagcattgttataggggacctgctgaggcaaattcccttggccgttctgtttgggatattcctttacatgggtgtgacctccctcaatgggatccagttctatgaacgacttcatttgctgctcatgccgccgaagcatcaccctgacgtgacttacgtgaaaaaagtgcgcactttaaggatgcacctttttaccgcccttcagctgctgtgtctcgccctcctgtgggcggtgatgtcaacagccgcgagcttggcatttcccttcattctcatattaactgtccctctgcggatggtggtgctgaccaggattttcaccgaccgtgaaatgaagtgtctggacgctaacgaagccgagcctgtgttcgacgagagggaaggtgtggatgaatataatgaaatgcccatgcctgtatag

SEQ ID NO: 206184 - DNA, 2406 bp, synthetic construct
  misc_feature 1..2406: note = Description of Artificial Sequence: Synthetic coding sequence
  source 1..2406: mol_type = other DNA
gtgatggaggtggtggaggccgagaagatcgtgctgctgaccagcgctcgcttcctgttccttcttctgggaccagccggcaaggccccccaatatcacgagatcggaaggtcaatagctacccttatgactgacgaaatattccatgacgtagcttataaggcgaaagataggaacgaccttctgagcggaatcgacgagttcctcgaccaggtgaccgtgctgccccccggtgaatgggatccatcaatacggattgagccaccaaaaagcgttccttctcaggaaaagcgcaagattcccgtgttccacaatggatcaactcccaccttgggcgagactccaaaggaggccgcacaccatgccggcccagagctccaacggactggcagactattcggcggactcattctcgacattaagcgcaaagctcccttttttctgtccgattttaaggatgccctctctctgcagtgcctggctagcatcctgttcctatactgtgcatgtatgtcacccgtgataaccttcgggggcctactgggagaggcgactgagggaaggatcagtgccatcgagagcctttttggggcttctctcactggtattgcctactcattgttcgctggacagcctctgaccatcttgggttcaacaggtccggtgctggtgttcgagaaaatactttataagttctgtagggattaccagcttagctacctcagtctgcgaacgagtattggactctggacttctttcctctgcatcgtgctcgtggccaccgatgcttccagccttgtttgttatatcactcggtttacagaagaagccttcgcagccctgatctgcattatattcatttacgaagccctagaaaagctattcgatttaggtgagacatatgcatttaacatgcacaataacctggataagttaactagttactcttgtgtgtgcaccgagcccccaaacccctctaatgaaaccctagcacagtggaaaaaggacaacattacggctcataacatttcatggaggaatttaaccgtgagtgagtgcaaaaagcttcggggcgttttcctgggttctgcctgcggccaccatgggccctacatcccagacgttttgttttggtgcgtaatcctgtttttcaccacattttttctgagctcttttttgaagcaattcaagacaaaacgctacttccccactaaggtgcgatcgacaattagcgattttgcggtattcctgacaatcgtcatcatggtcacaatcgactatctggttggcgtgccttcccctaaattacatgtgccggaaaaattcgagccaacacaccctgaacgaggatggatcatttccccgctaggggacaacccttggtggacattgcttatagcagcaatcccagctctgctatgtaccatcttaattttcatggaccagcagatcacagctgtcattatcaacaggaaagagcacaagctaaagaaaggggctggctatcaccttgacctccttatggtgggggtgatgctgggcgtttgcagcgtcatggggctcccctggtttgtggccgcaactgtgctatcaatttcccacgttaattcactgaaagttgagtcagaatgctctgctccaggtgaacaacctaaatttctggggatccgcgagcagagagtcactggactgatgatattcatcctcatgggactttccgtgtttatgacaagtgttttgaagtttatacccatgcccgtgttatacggcgtctttctttacatgggcgtctcctctctgaagggaattcagctgtttgacaggataaagctcttcggcatgccggcaaaacaccagcctgatctgatatacttgcgatatgttcctttgtggaaagtgcacatttttactgtaattcaattaacctgtctggtactgttgtgggtaattaaggtctctgccgccgctgtggtcttccccatgatggtgttggcactagtcttcgtacggaaactcatggatctgtgtttcacaaagagagaattgtcttggctagatgatcttatgccagagtcaaagaagaagaaggaagatgacaaaaaaaaaaaagagaaagaggaggcggagcgaatgctacaggacgacgacgatacagtccatctgcccttcgagggaggtagcttgttgcaaattcccgtgaaagcccttaaatacagcgtggatcctagtatcgttaacatctccgatgagatggcaaaaacagcgcaatggaaggcactgtctatgaatactgaaaatgccaaagtaacaagatccaacatgtcccccgacaagcccgtatccgtgaaaataagcttcgaagacgaaccccggaagaagtatgtcgacgccgagacaagcctgtag

SEQ ID NO: 206185 - DNA, 2244 bp, synthetic construct
  misc_feature 1..2244: note = Description of Artificial Sequence: Synthetic coding sequence
  source 1..2244: mol_type = other DNA
atgcccctgggccggcagagccaccggcaccaccggacccacggccagaagcacagaagacgcggacgcggcaagggggccagccagggtgaggaaggactggaggctctcgcccatgacacaccatcccagagagtgcaatttatacttggtactgaagaagacgaagaacacgtgccccacgagctgttcactgagttggacgaaatctgtatgaaagagggcgaagacgccgagtggaaggagactgcccgctggctgaaatttgaagaggatgttgaggacggaggcgagaggtggtcgaagccctatgtggccactctgagtctgcacagcctgtttgaactgaggtcatgcctgataaatgggacagtgcttctagatatgcacgccaactcaattgaggaaatctccgatttgatactcgaccaacaggaactgagcagcgatctgaacgactccatgagggtgaaggtaagggaagcactgctgaaaaaacaccatcatcagaacgaaaagaagcgtaacaacctgattcctattgtccggtcattcgctgaggttgggaagaagcagtctgatcctcacctgatggataaacatggtcaaactgtgagccctcagtccgtgcccaccacaaacctggaggtgaaaaacggcgtaaactgcgaacactcccccgtagacctgagcaaagttgacttgcactttatgaagaaaattccaacgggcgctgaggccagcaacgttttggtgggggaggtcgacattcttgatagacctatagtagctttcgtcagactgagccctgcggttctgttatccggtttaaccgaggttcctattcctaccagattcctgttcattcttctggggcctgtgggcaaaggacagcagtaccacgagattgggaggtccatggcgaccattatgaccgatgagatctttcacgatgttgcctataaagctaaagagagagatgacctgctggcagggatcgacgagtttctggaccaggtgaccgtgctgccaccaggcgagtgggacccgtccatccggatcgagcctccaaagaacgtcccatctcaggaaaagaggaagatgccaggtgtgccaaacggcaacgtgtgccatatcgaacaggaacctcacggcggccattccggacccgaactgcagcgaacgggcagactattcggcgggctggtcctcgatattaaacgcaaagccccatggtactggagcgattacagagatgctctctctctgcagtgtttagctagctttttgttcttatactgcgcctgtatgtcgcccgtgatcacatttggcggacttcttggcgaagccacagagggtagaatctcagccattgaatccctgtttggagcttcaatgaccggtatcgcttatagtctgttcgctggacaggccctgactattctaggctctactggaccagtgcttgtctttgagaagattctgttcaaattctgcaaggattacgcgctcagttacctttcactaagagcctgcataggactgtggacagcattcctctgcatcgttcttgtcgccaccgatgcttccagtcttgtgtgctatataacaaggttcacagaggaggccttcgcttctctgatttgcattatcttcatctacgaggcgatcgagaagctgatccacctggcggaaacataccctatccacatgcactcacagctagatcacctatctctttattattgcagatgcacgctgccagaaaacccgaacaaccataccttacaatactggaaagaccacaacatcgtgacggccgaggtacattgggctaatctgaccgttagcgaatgccaagagatgcacggggaatttatgggttccgcatgtggccaccacgggccatacacgccagatgtccttttctggagttgtatactgttcttcaccacttttatcctcagttcaacccttaagacatttaagacgtcacgctattttccgacaaggatggaaagttgcagtgtagcgtggctggagtgcggtggtgtaattctggcccactgcaaccttagactgctcccatcctcctgggactacaggcacgcacccccgcagcctgcgaatttctgtatttttagtagggacggtgtctcaccctgctggcccggttggagccagtcgctggatctagtgatttgccttccacggccccctaaaatgttaggactccaggcatag

SEQ ID NO: 206186 - DNA, 3135 bp, synthetic construct
  misc_feature 1..3135: note = Description of Artificial Sequence: Synthetic coding sequence
  source 1..3135: mol_type = other DNA
atgcccgccgccggcagcaacgagcccgacggcgtgctgagctaccagagacccgacgaggaggctgtggtcgaccagggcggtacctctactattctcaatatccattacgagaaagaggaactggaaggtcatcggacactgtacgtcggcgtccgcatgccgcttggacgccagtcacatagacaccaccgcacgcacggacagaagcaccggcgaagaggccggggcaaaggagcgagccagggggaggaggggttggaagcactggctcatgataccccctctcagagagttcaatttatactgggcactgaggaggacgaggagcatgtaccccatgagctctttactgagctcgacgagatttgtatgaaagaaggtgaagacgcggagtggaaggaaacagcccggtggctgaaattcgaggaggatgtagaggacggcggagagaggtggagtaagccctatgtggccaccctttcactccacagtctcttcgagctgaggtcgtgcctgataaacgggaccgtgctgctggatatgcacgctaactctatagaggaaatcagcgacctgatccttgatcagcaggaattgtcctccgacctgaacgactctatgcgcgtgaaggtgagggaggccctgttaaagaaacatcaccaccagaacgaaaagaagcgtaataatctgatcccgatcgtgagaagctttgccgaggtcggcaaaaagcagtctgatcctcacctaatggacaaacacggacaaaccgtgtccccccagtccgttcccacaaccaatctggaggtcaaaaatggcgtaaactgcgagcactcccccgtcgatctgtccaaggtggacctgcacttcatgaagaaaatcccaacaggggcagaggcgtccaacgtcctggttggggaagtggatattctcgacagacctatagtcgccttcgtgcggctcagccctgcagtgctgctgagcggcttgacagaagtgccaattcctactcggttcctgttcatactgcttggccccgtgggcaagggccaacaataccacgagataggccgtagcatggcaacgattatgacagatgagatctttcatgacgtcgcatacaaggccaaagaacgcgacgacctactggccggtattgatgaattcctggatcaggttacagtgttgcccccgggtgagtgggatccttctattcggattgagccaccgaaaaatgtgccttcccaggaaaaacggaagatgcccggagtccctaatggcaatgtttgccacatagaacaggaacctcacggtggccactccggccccgagttacagcggaccggccgattgtttggaggactggtgctcgacattaagcgcaaggcaccatggtactggagcgattacagagatgctttgagcttgcagtgcctagcaagtttcctgtttctgtactgcgcttgcatgagcccagtgattacctttggaggacttctaggggaggcaaccgaaggtagaattagcgctatcgagtcgttgtttggcgctagcatgaccggcattgcttattctctcttcgctgggcaggctctgaccatcctcggttctaccggtcctgtactcgtctttgaaaaaattctgttcaagttctgtaaagactatgccctctcttacctttctctgcgcgcgtgtattggcctgtggactgcattcttgtgtatcgtgctggtagccacagacgcatcttccctagtgtgctatattacaagatttactgaagaagcattcgccagtctgatctgcatcattttcatttatgaggctatcgaaaaactcatccacctggccgaaacttatccgatccacatgcactctcagctggaccatctgagtttgtattattgtagatgcaccttacccgaaaatcccaacaaccataccttgcaatattggaaagaccataacatagtgacggccgaggtgcactgggccaacctgaccgtgtccgaatgccaggaaatgcacggggaattcatggggtccgcctgcggacaccatggaccttatacgccggacgttctgttctggtcatgtatcttattttttacgaccttcatattgagtagtactctaaaaacctttaagactagcagatacttccctacacgggtgagatccatggtcagcgacttcgctgtgtttctaacgattttcaccatggtgattatcgactttctaatcggggtccccagcccaaaactccaagttcccagtgtttttaagcccaccagagatgaccgcggctggatcattaatccgataggtccaaacccatggtggaccgtcatcgccgccatcattccagcgttactgtgtaccatattgatcttcatggaccagcagatcaccgcggtgataatcaaccggaaagagcacaagctgaaaaagggttgcggttaccacctagatctcctgatggtagccatcatgctgggggtgtgttcaattatgggcctgccttggtttgtggctgccactgtgctctccatcacacacgtcaattctctgaagttggagtcggagtgcagtgcccccggagagcagcccaagttcctgggcattcgggagcagcgtgtgacaggcctgatgatctttgtactgatgggctgctcagtttttatgacagctattctcaagttcatacccatgccagtgttatacggcgtttttctctatatgggggtatcttccctgcagggcattcaatttttcgaccggttaaagctgttcgggatgccagcaaaacaccaacccgactttatatatctgcgccacgtgccacttaggaaggttcatctgttcaccctcattcagctgacttgtttggtgctcttatgggtgattaaggccagtcctgccgctatcgtatttcctatgatggtcctggctctggtctttgtgcggaaggtcatggatctctgtttcagcaaacgcgagctgtcatggctcgatgatctgatgcctgagtcgaagaagaagaagctcgatgacgccaaaaagaaggccaaagaggaagaagtgatcgtgctggcccccacagtttacttaggtgctagcaattaccggacctag

SEQ ID NO: 206187 - DNA, 2736 bp, synthetic construct
  misc_feature 1..2736: note = Description of Artificial Sequence: Synthetic coding sequence
  source 1..2736: mol_type = other DNA
atggaggagctgcaggacgactacgaggacatgatggaggagaacctggaacaggaggaatatgaggatccagatataccagagtctcaaatggaggagcctgcagctcacgacaccgaagcaactgctacggattatcatacaaccagccatcctggcacacacaaagtgtatgtcgagttgcaggagctggttatggatgagaagaaccaggagctgagatggatggaagctgcgcggtgggtacagctcgaggagaatctgggcgagaacggcgcctgggggaggcctcatttgagtcatctcaccttttggtcactgttagaactccgcagagtgttcaccaagggcacagtcctcctcgacctgcaggagacgtctttagcaggcgttgctaatcaactcctggataggttcattttcgaggaccagattcggccccaggatcgcgaagagcttctgagagcactcctgcttaagcactcacatgccggagagctggaagccctcgggggggtgaaaccagccgtgttgactcgaagcggggacccgtctcagcctctgctcccacagcacagcagcctggagacgcaactgttctgcgagcagggcgatggcggtacagaagggcacagtccttccgggatcttagaaaagattcctcccgattccgaggcaaccctggtcttagtgggtcgggcagatttccttgagcaaccagtgctaggtttcgtgcggctccaggaagccgccgagctggaggcagtcgagctaccagtgcctatccgcttcttatttgttctgctcggccccgaagcgcctcatattgattacacgcagttgggacgcgcagcagcaactctgatgtccgaacgcgtgtttagaatcgacgcatatatggcacagagcagaggggagttgctacactcgctggagggatttctcgattgctcactagtgctccctcccacagacgccccatctgagcaggcactgctgtctttggtgcctgtccagcgggaactgctgcgtcgaagataccaatcttcaccggcaaaacctgattcttctttttacaagggtctagacttgaacggaggacccgacgatccgctgcagcagacgggtcagttgtttggcggcctggtgcgggacatcagaaggagatacccctactatctcagcgacattaccgacgcttttagtccgcaagtcctggcagccgtaattttcatttattttgccgccctgtcccccgcaattacctttgggggccttctgggggagaagaccagaaaccagatgggagtgagtgaactgctgatttccaccgccgtgcagggaatcttatttgctctactgggagcccagcccctgctggtggtgggattctctgggccactgctggtgttcgaggaggctttcttttcattctgcgagaccaacgggcttgagtacatcgtgggtagagtctggatcggattctggctgatactactggtggtattagtcgtggcctttgagggctcctttttggtcagattcataagcagatatacccaggaaattttcagctttttgatcagcctcatctttatatacgagaccttcagtaaattgatcaagatttttcaagaccatcctctccagaaaacatacaattacaatgtcctgatggtgccaaaacctcaaggtccccttccaaacacagcccttctgtcgctggtgcttatggccgggaccttcttctttgccatgatgctgcggaagtttaagaattccagctacttccccgggaagctccgccgggtaattggcgatttcggagtcccaatttctattctaatcatggtgcttgtcgacttcttcatccaggatacatatacgcaaaaactgagcgtccctgacgggtttaaggtctcaaacagctctgcacgcggttgggtcattcacccactcgggctcagaagtgagttcccaatttggatgatgttcgcaagtgcgctccctgccctcttagttttcattctcatcttcctcgagagccagattacaactttgatcgtgtcaaaacctgaaaggaaaatggtgaaaggtagcggatttcatctggacctgctactggtggtgggtatggggggcgttgcagcgcttttcggcatgccctggctctccgccaccactgtcagaagcgtcacccatgccaacgcactcacagtcatgggcaaagcgtccactccaggagctgctgctcagattcaggaggttaaggaacaacggatatctggcttgctcgttgccgtgttggtagggttgtctatcctcatggaacccatcctctcccggattccacttgcggtcctgtttggtatatttttgtacatgggcgtgacaagcctgtccggcatccagttatttgaccgcatcctattactgtttaagccccctaagtaccaccccgatgtgccatatgtgaagcgtgtgaagacatggcgcatgcatttatttacggggatccagattatctgtcttgcagtactctgggtggtgaaaagcactcccgcatcactggccttacctttcgtgctcatcctgacagtgcccttgcgacgggtgctcttgccacttatttttagaaacgtcgaactgcagtgccttgatgcagatgacgccaaggcaacttttgacgaagaggagggaagggatgagtatgatgaggtggccatgcccgtttag

SEQ ID NO: 206188 - DNA, 3480 bp, synthetic construct
  misc_feature 1..3480: note = Description of Artificial Sequence: Synthetic coding sequence
  source 1..3480: mol_type = other DNA
atgagcagcgccccccggcggcccgccaagggcgccgacagcttctgtaccccaggcccaggtcgtaagccccgtaggcgtcctggtgcttctccgactggagagacccccaccatcgaagaaggagaagaggacgaggatgaggcctccgaagctgagggggcccgggccctgactcagccgtcccccgtgtcgacaccttcaagtgtgcagttcttcctacaggaagacgacagtgcagatcgaaaagccgagcgcacgtctccgtcctccccagcccctttacctcaccaagaggctaccccccgcgcctccaaaggcgcccaggctggcacccaggttgaagaggcggaagccgaggccgtggccgttgcctccggcaccgctgggggcgatgatggcggtgcatcaggtagacctctaccaaaggcacagccaggacacagaagctataacctgcaggagcgccgacggatcggatcaatgacaggcgcagaacaggctctcttgccaagggtccctacagacgaaattgaagcacaaaccctggccacggccgatctggacctgatgaaaagccaccgatttgaggacgtcccaggagttcgacgccacctagtgcgcaaaaacgccaaggggtctacgcagtctggtagggagggcagagaacccggtcccaccccacgcgctcgccctcgcgccccccacaaacctcacgaagtcttcgttgaactgaacgaactcctcctggacaagaaccaggaaccacaatggcgggagacggcccgctggattaagttcgaggaagacgtcgaggaagagacagagcgatggggcaagcctcacgtcgctagcctgtcgtttaggagcctgcttgagctccggcgtaccctggctcatggggccgtcctgctcgatctagaccaacaaacactgcctggggtggctcatcaagttgtagagcagatggtcatctcagaccagatcaaagccgaagacagagccaatgtgcttagggctctgctcttaaagcatagtcacccaagtgacgaaaaggacttttccttcccaagaaacatcagtgccgggtcccttggcagtctgttaggccatcaccatggccagggagctgagtcagatccgcatgtcaccgaaccccttatgggcggtgtaccagagacacggctcgaggtcgaaagggagcgagagctccctcctcctgcccccccagccggaatcacacggtcaaaaagcaagcatgaacttaaattgctggaaaagatacctgagaatgcagaggcaacagttgtccttgtgggttgtgtggaatttctgtccaggcccacaatggcttttgtcaggttgagagaggccgtcgaattggacgctgtgcttgaggttccagtaccagttcgctttctgtttctcctgctgggtccaagtagtgctaacatggactaccacgaaatcgggaggagcatctctacactgatgtcagataagcagttccacgaggccgcctaccttgcggatgaacgcgaggatctactgacggcgatcaatgctttcctggactgctccgtcgttctgccacctagcgaggtgcagggagaggagttattgcggagcgtggcccactttcagcgacagatgcttaagaagcgggaagagcagggccgcttactaccaaccggggccggactagagccaaaatctgcgcaagacaaagctctgcttcagatggtggaagctgccggtgctgcagaagacgatcctctgaggcgaactgggaggccattcggcgggctgataagggatgtgcgcaggagatacccgcattacctgtctgatttcagggatgctctcgaccctcaatgtttggctgccgtgatcttcatatactttgcagcacttagcccagcaattaccttcggcggtttactgggggagaagacacaagatttgataggagtctctgaactcatcatgtcaaccgcactgcagggcgttgtgttttgcctgctgggggcgcagccgttattagtgattggcttctccggcccactcctggtgttcgaggaggcctttttttcgttctgttcttccaaccatttagaatacctggttgggcgagtctggattgggttttggttagtattcctcgccctgcttatggtcgcccttgagggctcatttctcgtgcgctttgtttctcggtttacccaagaaatctttgctttcttgatctcgctgatatttatttacgagacgttctataagctagtgaaaatattccaggaacaccccctgcacggatgctccgcctctaacagcagcgaggttgacggaggtgagaatatgacgtgggccggagccaggccaacgctgggaccaggtaataggtccctggctggacaatctgggcaagggaagcctcgcggccagccaaacaccgctttgctcagtcttgtgctgatggccggaaccttttttatcgcatttttcctccgcaagtttaaaaactctcgtttctttccaggtcgcatcaggagagtaattggagattttggcgttcctatcgccattctgatcatggtgctggtggattactcaattgaggatacctatacccaaaaactctcagtgcctagtggcttctctgtgaccgcccccgagaagcgtggttgggtcatcaaccctttaggcgagaagtcccctttcccggtgtggatgatggtggcatcccttctgccagccatcctcgtctttattttaattttcatggagacgcagataacaacactgataatctccaagaaagagagaatgctgcagaagggttccggcttccacttggacctgctcttgatcgtggctatgggcggaatttgcgccctttttgggctgccttggctggcagctgctacagttcggagtgttactcacgcaaatgccctgacggttatgagcaaagctgtagctcctggggacaaacccaagatccaggaggtgaaggagcagcgggtgaccggcctcttggtggcactgctcgtgggtctaagcattgtcataggagacctgcttcgccagatccctctggcagtactgttcggcatctttctatacatgggagtcacctccctcaatggtatccagttttacgaacgcctgcacctacttctgatgccaccaaagcaccatcccgatgtcacttatgtgaaaaaggtgaggacactcagaatgcacctgttcaccgccctacaactactttgcctggctctgttatgggctgtcatgtccactgcagccagtctggcattccctttcattttgatcttaaccgtgccactacgaatggtcgttctaactagaattttcaccgacagggagatgaaatgcctcgacgctaacgaggccgagcctgtgttcgatgagcgcgaaggagtggacgaatacaatgagatgcccatgcccgtgtag

SEQ ID NO: 206189 - DNA, 3726 bp, synthetic construct
  misc_feature 1..3726: note = Description of Artificial Sequence: Synthetic coding sequence
  source 1..3726: mol_type = other DNA
atgagcagcgccccccggcggcccgccaagggcgccgacagcttctgcacacccgagcccgagtctctgggtccaggtactccgggattccctgaacaggaggaagacgagctccatcgcacacttggagtagaacggttcgaagaaattctacaagaggccggatcccgaggaggcgaagaaccgggtcgcagttacggagaagaagattttgaataccaccgacagtcatctcatcatatccaccaccccctgagtacccatctgcctcctgacgccagaaggaggaaaacaccgcaggggccagggcggaaaccgcgtcggcggccaggtgcctcccccactggtgagacgcccaccatcgaggagggcgaggaggacgaagacgaggcatcagaggccgaaggagcgcgcgccctcacccagccttcccctgtttcaacccccagttctgtgcaattcttcctgcaggaggacgattctgctgacagaaaagctgaaagaactagcccctccagccccgctccactgccccaccaggaagcgacaccaagggcttccaagggtgcacaggcaggaacccaagtcgaggaggccgaggccgaagctgttgccgttgctagcgggaccgctggaggcgacgacgggggcgcttctggccgtcccctccccaaagctcaacccggccatagaagctacaatctccaggaacgcagacgaattggctcaatgacaggggccgagcaggccctgctgccaagggttcctacggatgaaatcgaagcccaaactctagcaactgccgatttagatttgatgaagtctcatagattcgaggatgtaccaggcgtaagacgccacctggtgagaaagaatgccaagggtagcacacaatcgggccgtgaggggcgagaacctggccctactccacgagcccgccctagggccccccataagcctcacgaagtttttgtagaactgaacgaactcctgctagataagaatcaggagccccaatggcgggagacggctaggtggatcaaattcgaggaggatgtggaagaagaaaccgaaagatggggaaagcctcacgtagctagtctgtcgttccgtagcttactcgagctccgcaggaccctcgcgcacggtgctgtgctcctggatcttgaccagcagacattgcctggtgtggcccaccaggttgtggagcaaatggttatatcggaccagataaaggccgaggacagagcgaatgtgctgagggcactcctgcttaaacattcacacccaagcgatgaaaaggactttagctttcccaggaatatcagcgccggatccctgggcagcctgcttggccaccatcacgggcagggagccgagtctgatccacatgtcacggaacccctgatgggtggcgtgccagaaacgaggctcgaagtcgagcgcgagagagagctccccccgccggcgcctcctgccgggatcacccgctccaagtcaaagcatgaactaaagttgctcgagaagatccccgaaaatgccgaggctactgttgtactggtggggtgcgtggaattcctatctcggccgactatggcctttgttcgactccgggaggccgtcgaacttgatgctgttctagaagtccctgtcccagtgcggttcctgtttctgctgctgggcccatcttcagctaatatggactaccacgagatcggtagaagcatctccacattgatgtccgacaaacagttccacgaagctgcatacctcgcggatgagcgggaagacctgctgactgcgattaacgcctttctggattgctccgtggtgctccctccctctgaagtgcagggagaagaactactccggagcgtggcccatttccagagacagatgctgaagaagagagaggaacaaggtaggctcctgcctaccggtgcaggtcttgagcctaagagcgcacaagataaggccctcttgcagatggttgaggcagctggcgccgcggaagatgatccgttgagaaggaccggccggccatttggggggctcatccgcgacgtgaggaggcgttacccacactatctgtccgactttagagacgcactggatccacagtgcctggcggctgttatctttatctacttcgccgcccttagtcccgcaattacatttggagggctccttggtgaaaagacacaggatctgattggcgtctccgaactgatcatgagcacggctcttcagggggttgtattttgcctgctcggagcccagcccttacttgtgatcggcttcagcggacctctcctcgtgttcgaagaggcctttttttctttctgcagttctaaccacctggaatatctcgtcggccgagtgtggatcggattctggctggtatttcttgctttactgatggtcgccttggagggctccttcctggtgcgcttcgtgtcgaggttcacccaggaaatttttgcttttttgataagcctcatttttatctacgagaccttctacaagctggtgaaaatcttccaggaacacccgctgcatggctgctcagccagtaatagttccgaggtggatgggggagagaacatgacctgggcaggagctagacccactctggggccaggaaataggagcctggccggtcagagcggacagggcaaacccaggggccagcccaataccgcattgctgtctctggttttaatggccggcacctttttcatcgccttcttcctccgaaagttcaagaactctaggttttttcctgggcgtatccggcgggtgatcggcgattttggcgtcccaatcgcaatcctcatcatggtcctcgtcgactactcaatagaggatacttacacacagaagctgtctgtgccttcgggtttcagtgttactgctccagaaaagcgcgggtgggtcattaaccctctgggggagaagtcaccctttccagtgtggatgatggtagcctccctgctgcccgccatcctggtgtttatcttgatttttatggagacacagataacgaccctaatcatctctaaaaaggaaaggatgctgcagaaaggtagcggttttcacttagacctgctgttgatagtggcaatgggaggtatctgtgctctgttcggcctcccatggctcgcagcagctaccgtgagatctgtgactcacgcgaatgccctcacagtgatgtccaaggctgtggcccccggcgataagcctaagatccaagaagtgaaagaacagcgcgtgactggcctgctagtagcacttcttgtgggcctgtcaatcgtgattggtgacctacttcgacaaatacctctggctgttctgttcgggatttttctgtacatgggggtaaccagtctcaacggcattcagttttatgagcggcttcacctgctgctcatgccccctaagcaccacccggatgtcacctacgtcaaaaaggtccgaacccttcggatgcacctgttcacagcactgcagcttctctgtctcgctctgctctgggcagtgatgtctacggcagcttccttagcatttcccttcatcttgatactgactgtgccgttacggatggttgtgttgaccaggatcttcactgacagagaaatgaagtgtctggatgccaacgaagcagaacccgtgtttgacgaaagggaaggggtggacgaatacaacgagatgcccatgcccgtctag

SEQ ID NO: 206190 - DNA, 456 bp, synthetic construct
  misc_feature 1..456: note = Description of Artificial Sequence: Synthetic coding sequence
  source 1..456: mol_type = other DNA
atgagcagcgccccccggcggcccgccaagggcgccgacagcttctgcacccccgaaccagaaagtctcggccctgggactccaggattccccgaacaagaggaagacgagctccatcgaaccctgggcgtcgaacgatttgaagagattctccaggaggccggaagccgcggcggcgaggaacccggccgctcttacggggaagaagactttgaatatcatcgccagtctagccaccacattcatcacccactgagcacccatctcccacctgacgcacgcagacgcaagacacctcaaggcccaggtagaaagccaaggcgaaggcctggcgcaagccctacaggcgagacacctaccatcgaggaaggagaagaagatgaggatgaggccagcgaggcagagggcgcaagagcgcttacccagccgagtccagtgtccaccccatcttcatag

SEQ ID NO: 206191 - DNA, 384 bp, synthetic construct
  misc_feature 1..384: note = Description of Artificial Sequence: Synthetic coding sequence
  source 1..384: mol_type = other DNA
atgagcagcgccccccggcggcccgccaagggcgccgacagcttctgcactcccgagcccgagtcactaggcccaggaacccctgggtttccagaacaggaagaggacgagctgcacaggacgctgggcgtggagcggtttgaggaaatcttgcaggaagcggggtctcgaggaggcgaagaaccgggaaggtcttatggagaagaggacttcgagtaccacagacagagttctcatcatattcatcaccctctgagtacccatctgcctcctgatgcgaggcggcgaaagactccacagggacctgggcgcaaaccacgaagaaggcccggggccagccccacaggggagaccccaacaatcgaagagggggaagaagattag

SEQ ID NO: 206192 - DNA, 438 bp, synthetic construct
  misc_feature 1..438: note = Description of Artificial Sequence: Synthetic coding sequence
  source 1..438: mol_type = other DNA
atgagcagcgccccccggcggcccgccaagggcgccgacagcttctgtacaccggagccagagtctcttggacccggcaccccaggattccctgagcaggaggaagatgagctgcacaggacactgggtgtggagagattcgaggagattctccaggaagcaggaagccgcggcggagaagagcctggccggtcttatggtgaagaggacttcgaatatcatagacagtccagccaccacatccaccatcccctctctactcacttgcctcccgacgctagaaggcgaaagacgccccaaggcccgggacgcaagccaaggagacggcccggggcaagccctaccggggagacccctactatcgaagagggcgaggaggacgaggacgaggccagcgaggccgagggagctcgagctctgacccaacccagtccctag

SEQ ID NO: 206193 - DNA, 3726 bp, synthetic construct
  misc_feature 1..3726: note = Description of Artificial Sequence: Synthetic coding sequence
  source 1..3726: mol_type = other DNA
atgagcagcgccccccggcggcccgccaagggcgccgacagcttctgtacccctgagcccgagtccctagggccaggtacgccaggatttccagagcaggaagaagatgaactccaccgcacactgggcgttgaacgctttgaggagatccttcaagaggcaggttcacggggcggcgaagaaccggggcgctcctacggcgaagaagattttgagtatcatcggcagagctcacaccacatccaccaccctctgagcacccacctgccccctgacgccagacgcagaaaaacacctcaaggacctggacgaaagcctagacgccgtcctggggcttcacccacaggcgagactcccaccattgaggagggtgaggaggatgaagacgaagccagcgaggcagaaggcgcacgggcactaacacagccttcacctgttagcactcctagcagcgtccagttttttctccaggaggacgatagcgcggacaggaaggcagagcgcacttctccctccagtcccgctccgctgccacatcaggaggcaacccccagagcttccaagggggcgcaggctggcactcaggtggaagaggccgaagcggaggctgtcgctgtggcttcagggacagctggcggtgatgatggcggtgccagtggccgacccctcccaaaagcccagccaggacaccgcagctataatttgcaggagaggagacgcatcggttctatgaccggggctgagcaggcactgctgccacgagtgcctaccgatgagattgaagcccagactctggccacggctgatctcgacctgatgaaaagtcaccgattcgaagacgtgccaggcgtacggagacacctcgtccgtaagaatgccaaagggagtactcagtcgggccgtgagggccgcgaaccagggcctacccctcgtgcccgaccccgagctccgcacaagcctcatgaggtatttgtggagctcaacgaacttctgcttgacaagaaccaggaacctcagtggagggagacagcacggtggatcaagttcgaagaagacgtggaggaagagactgaacgctggggcaagcctcatgtggccagtctctccttccgtagcttattggaactgcgccggacactcgcacatggtgcagtgctcctggacctggatcagcagacactcccaggagtagcccaccaagttgtggaacagatggtgatttcggaccagatcaaggctgaggatagagccaacgtgttacgcgccctgctcttgaagcactctcatccaagcgacgagaaagacttttccttcccccgaaatatctctgccggctccctcggatccttgcttggccatcaccacggtcagggtgccgaatcggacccacacgtgaccgagccactgatgggcggagtccccgagacgcgcctggaagtcgagcgagagagagaattgcccccacctgcgccgccagccggtattaccaggagtaaaagcaagcacgaattaaagctcctggaaaagatccctgagaacgcagaagcgacagtagtcctggtcggctgcgtagaattcctgtcccgccctacaatggcctttgtgcgtctgcgagaggccgtggagttagacgccgtgttggaggtccccgtaccagttaggtttctgtttctcctgctaggcccatcttcagctaatatggattatcacgaaatcggccggtctatcagcaccctcatgtctgacaagcaatttcatgaggctgcatacttagcggatgagcgagaagatctcctgactgccatcaatgcattcctagactgctctgtggttcttccaccttccgaagtccagggtgaggagcttttgagatccgtggcacactttcagcgacagatgctcaaaaagagagaggagcaaggcagactgcttccaaccggggcggggctggaacctaagtccgcccaggacaaggcactgctccagatggtggaggccgcaggggcagccgaagacgaccccctcaggagaactggaaggccttttggaggactgataagggacgtgcggagaaggtacccacattatctaagcgatttcagagatgctctggatcctcaatgcctagccgccgttatttttatatatttcgctgcactatctcccgccatcacattcggaggcttgctgggagagaagactcaggatttgatcggggtatcagagctgataatgtctaccgcactgcaaggggtggtattttgtctgctgggtgcccaaccccttctcgttataggcttttccggtcccctcctggtattcgaggaggcgttcttctccttttgttcctccaatcatctggaatacctggtggggagagtgtggatcggcttctggctggtgtttctggccctgcttatggtcgccctagaaggctctttcctcgtgaggtttgtgtctcggttcacccaggagatctttgcgttcctcatctccctgatcttcatttatgagacgttctacaaactggtgaagatcttccaggagcatcccctccatgggtgcagtgctagcaattcctctgaagtcgacggtggtgagaacatgacatgggcgggagccagacccacattagggcccggcaaccgcagcctggccggacaaagtggacagggaaagcctcgtggacaacctaatactgccctgctttctctcgtgcttatggctgggaccttctttatcgccttttttctccggaagttcaagaactcaaggttttttcccggcaggataaggcgggtcattggcgactttggagtacccattgccatccttatcatggtgctggtggattacagtatcgaagatacttatacgcagaaactgtcagtgccctcaggttttagcgtgacagccccggaaaaacgaggttgggtaattaatcccctcggagagaagagccccttcccagtgtggatgatggtcgcgagtctgttgccggcaatcttggtgttcatcctgatttttatggaaacacaaataacgaccctcatcatcagtaagaaagagagaatgctgcagaaaggcagcgggtttcacctagatttgttgttaattgttgctatgggaggtatctgcgccctcttcggactgccctggctcgccgctgctacagtcagatctgtcacgcatgccaacgcgttgacggtcatgtccaaagccgtggctcctggggacaagcccaagatccaggaggtcaaggagcagagggttactggcctgttggttgccctgctagttggcttatctattgttatcggcgacttattgcgacagatcccacttgccgtgctattcggaatcttcttgtacatgggagtgactagcctgaacggtatccagttctatgagaggttgcatcttttgctcatgccacccaaacaccaccctgacgttacctacgtgaagaaggtcagaactttgcggatgcacctgttcactgccttacagttactgtgtctggctctgctgtgggccgtcatgagcacagcagccagcctggcgttccccttcatccttatccttactgtgcccctccgcatggtagtgcttaccagaatttttactgatcgggaaatgaaatgcctagacgccaatgaagccgagccagtatttgacgaaagagagggggtggatgagtataacgagatgccgatgcctgtctag

SEQ ID NO: 206194 - DNA, 213 bp, synthetic construct
  misc_feature 1..213: note = Description of Artificial Sequence: Synthetic coding sequence
  source 1..213: mol_type = other DNA
atgagcagcgccccccggcggcccgccaagggcgccgacagcttctgtacacctgaacctgagagcttggggcccggcacccccggtttcccagaacaggaggaggatgaactccatcggaccctgggcgtggaacgttttgaggaaatactgcaggaagccggttccagggggggggaggagccaggacggagctacggtgaggaagattag

SEQ ID NO: 206195 - DNA, 510 bp, synthetic construct
  misc_feature 1..510: note = Description of Artificial Sequence: Synthetic coding sequence
  source 1..510: mol_type = other DNA
atgagcagcgccccccggcggcccgccaagggcgccgacagcttctgtacccccgagcctgagtccctgggccccggtaccccaggcttcccagagcaggaggaggacgaactgcataggaccctaggggttgaaaggttcgaggaaattctgcaggaagccggttcccgaggaggggaagaaccggggcgctcttacggcgaggaggattttgagtaccaccggcaaagcagccaccacatccaccaccccctgagtacacatttgccccccgatgcacggaggcgcaaaacaccccagggacctggcagaaagcccaggcgcagacccggggcaagtcctaccggggagactccgacaatcgaggagggagaagaagatgaagacgaggcttccgaggcagagggggctcgcgctctgactcaaccctctcctgtgtccacaccctcgtccgtgcagtttttcctgcaggaagacgacagcgcagatcgtaaggccgagagaacgtag

SEQ ID NO: 206196 - DNA, 3240 bp, synthetic construct
  misc_feature 1..3240: note = Description of Artificial Sequence: Synthetic coding sequence
  source 1..3240: mol_type = other DNA
atggaggacgaggccgtgctggaccggggcgccagcttcctgaagcatgtatgtgatgaggaggaagttgaaggacaccatactatctacattggggtgcatgtacctaaatcatacagaaggcgccggaggcacaagaggaaaacgggtcataaggaaaaaaaggagaaggagcggatctcagagaactattccgataagtccgatatcgaaaacgccgacgagtcatcttcctccatccttaaacctctcatttccccagccgcggagcggattagatttatccttggggaggaagacgactcacctgcccctccacagctgtttactgagcttgatgagctgcttgccgtggatgggcaggagatggagtggaaggagacggctagatggatcaaatttgaagaaaaggtagagcaggggggggaacggtggtccaaacctcacgttgccacactcagccttcactccctctttgaactccggacgtgtatggagaaaggctcaatcatgctggaccgggaagccagttcattacctcagctggttgagatgatcgtggatcaccagatcgaaacagggttgctcaaacctgagctcaaagataaggtgacatatactctgctcagaaagcatcgccatcagaccaagaagagcaacctgagatcactcgctgatatcggaaaaaccgtttcatctgctagtcggatgtttactaaccctgataacggttcgccagccatgacacatagaaacctgacatcaagtagcctcaacgatatctccgacaaacccgaaaaggaccagctgaaaaataagttcatgaagaaattgcctcgcgacgctgaagcaagcaacgtactggttggggaggtggatttcttagatacaccgtttattgcgtttgttcgcctgcagcaggccgtcatgctcggagccctgaccgaggtacctgtacctacacgctttctatttattcttctgggcccaaaggggaaagccaagtcgtaccatgaaattggaagagccattgccacactaatgtcggacgaagtcttccatgacatcgcatacaaggctaaggaccgtcacgacctgattgcagggatcgacgaattcctggacgaagtgattgtcctgcccccaggcgagtgggaccccgccatccgcattgaaccacctaagtcgctgccgtcgtccgataaaagaaagaatatgtactctggcggggaaaacgtccagatgaacggagatactccccatgatggcggccatggtggaggaggacacggcgactgcgaggagttgcagaggacaggccgcttttgcggcggattgatcaaggatattaaaagaaaggcccctttctttgcctccgacttttacgacgctcttaacatccaagccctgtctgccattcttttcatttatctggccacggtcacgaatgccattacgttcggagggttgttgggagacgccacggataacatgcagggcgtgctggagtcatttctgggaaccgcagtaagtggtgcaatattttgcctgtttgctggacagccccttactatcttgtcatcaaccggtcccgtcttggtgttcgagcgccttttgttcaacttcagcaaggacaacaacttcgattacctggagtttcggttgtggataggcctttggtcggcctttctgtgccttatcctagtggccacggacgccagcttcctggttcaatacttcactaggtttacagaagaagggtttagtagcttaattagcttcatcttcatttacgacgcattcaaaaagatgatcaaactggccgattactatcccataaacagcaacttcaaagtgggatacaacactctgttctcttgtacatgcgtgccacccgatcctgccaatatttcgataagcaacgataccacactggccccagaatatctccccactatgagcagtacagatatgtaccataataccacatttgactgggctttcctgagtaagaaagagtgcagcaagtatggcggaaatctggtggggaataactgtaatttcgtccctgacataaccctaatgtcttttatcctctttctaggaacctacaccagctcaatggcattgaaaaagttcaaaacctcaccctacttccctacgactgccagaaaactgatttctgattttgctatcatcctgagcattctgatattttgcgtgatcgacgcactcgtcggggtggataccccaaaattaatagtgcctagtgagttcaaaccaacttcacccaacagaggctggttcgttcccccattcggtgaaaatccttggtgggtgtgtctggccgccgccatccccgccctccttgttaccattctcatttttatggatcagcaaattacagccgtaattgttaaccgcaaagagcataagctgaagaaaggagctggctaccatctggacctgttctgggtggccatcctgatggtgatttgctccctgatggctctcccctggtatgttgctgcaacagtcatctctatcgcacacatcgactcacttaaaatggagaccgaaacctccgccccaggagagcagcccaaatttttaggggtaagagagcagcgggttacagggacgctagtgttcattctcacaggcctgtctgttttcatggcacccatccttaaatttattcctatgcctgtgctttacggggtctttttgtacatgggggtcgcttctctcaacggcgtgcagtttatggaccggctaaaactcctcctaatgcccctgaagcaccaacccgactttatctatctccgacatgtgccgctccggcgggtccacttgttcacattcttgcaagtgctgtgcctcgccctgctgtggattttgaagtccactgtggccgccataatcttcccagtgatgatactggccctggtcgctgtgaggaaaggaatggattatctctttagccagcatgatctgagctttctggacgacgtcattcccgagaaagacaaaaagaagaaggaagacgagaaaaagaaaaagaagaaaaaggggtcgttggacagtgataacgatgattcagactgtccatacagcgaaaaagtcccatccattaagatacccatggatattatggagcagcagccatttttgtccgatagcaagccaagtgatcgtgaaagatcccccacgtttcttgaacgccacacgtcctgttag

SEQ ID NO: 206197 - DNA, 3108 bp, synthetic construct
  misc_feature 1..3108: note = Description of Artificial Sequence: Synthetic coding sequence
  source 1..3108: mol_type = other DNA
atgagcaccgagaacgtggagggcaagcccagcaacctgggcgagcgcggccgcgcccggtcctccacctttctgagggtggtacagccaatgttcaatcactcgatcttcacatcagcagtctcgccggcagcagagcgcatccgatttatcctgggcgaggaagacgattctccggcccctccgcaactttttactgagctcgatgagctactggccgtcgacggtcaggagatggaatggaaagaaaccgctcggtggatcaaatttgaggagaaagtggagcaggggggcgaacgctggtccaaaccacacgttgccacactctcactgcattctctgtttgaattgagaacgtgcatggaaaagggatcaataatgctcgatcgagaggcgtcctcattgccacagctggtcgaaatgatcgtggaccatcagattgagacaggtctcctgaaaccagagttgaaggataaagttacttataccctgcttaggaagcacagacatcagaccaaaaaatctaacttgcggagcctggctgatatcggcaagacggtgagttccgcgtcaaggatgtttaccaatcccgataacggtagccccgccatgactcatcgcaacctgacatccagctctctgaacgatatatccgataagccggaaaaggatcaactgaaaaataagttcatgaagaagctccctcgcgacgccgaggccagcaacgtgctggtgggcgaagttgacttcctagacaccccttttattgcctttgtccgcctccagcaggccgtcatgctcggcgccctgacagaggtgcccgtgccaaccaggtttctctttatcctcctgggccctaagggcaaggcgaaatcttatcacgagatcggccgcgctattgccacgctcatgtcagacgaggtttttcacgatattgcctataaagccaaagatagacacgatctgatcgccgggattgatgaatttctggatgaggtaattgtcctccctccgggtgagtgggacccagccatccggattgagccacctaagagccttcctagttcagacaaaaggaagaacatgtacagcggtggagagaatgtccagatgaatggcgacactccgcatgacggcggccatggtggcggtggtcatggggattgtgaggagctgcagcgcaccggtcgtttttgcggcgggctcataaaagacatcaagaggaaagccccattcttcgcaagcgacttctacgacgctctgaacattcaggcactgtctgctattctatttatatacttggccacagtaactaacgcgattaccttcggggggttgttgggtgacgcgacagacaacatgcagggcgtgttagagtcctttctgggaactgctgtctctggagctatattttgtctgttcgccggacagccactaacaatcctcagcagcaccggccccgtccttgtgttcgagcgcctactatttaatttttcaaaggataacaatttcgactatctggaatttcgcttatggataggattgtggagcgcgttcctgtgcctgatactggtggccactgacgcctcattcctcgtgcaatatttcactcgcttcacagaggaaggttttagttcactgatcagctttatttttatctacgacgccttcaaaaagatgattaagctggccgactactaccctataaactcaaactttaaggtcgggtacaacactctgttttcatgtacctgtgttcctcccgaccctgcaaacatcagtatcagcaatgatacgacactggccccagagtaccttccgacaatgtctagcaccgacatgtatcacaacacaacattcgattgggcttttctctccaagaaggaatgctctaaatatggaggaaacctggtaggaaataactgcaatttcgttccagatattacccttatgagtttcattttatttctggggacatacacatcaagtatggcattaaagaaatttaagacatctccatatttcccaactaccgcgagaaaactgatctcagatttcgccatcatactgtctatactgatcttctgtgtgatagatgccctggtcggcgtagacacacccaagctcatcgtgccatccgagtttaagcccaccagtcccaaccgcggctggttcgtcccacctttcggcgagaacccctggtgggtatgtctggcagccgctattcctgcattactggtgaccatactgattttcatggatcagcagatcactgccgtgatcgttaaccggaaggagcacaagctcaagaaaggggcaggctaccatctggaccttttttgggtggccattttgatggtgatttgctctctgatggcattaccatggtacgtggccgccacagtgattagcattgctcacatagatagtcttaagatggagacagaaacctccgcaccaggggagcaacctaagttcttgggtgtcagagagcagcgagtcacaggtacgctggtatttatacttacaggcctctccgtgttcatggcccccattctgaagtttattcctatgccagtgctctacggagtctttctgtacatgggcgtggcgagtttgaacggggtgcagttcatggacaggttgaagttgctcctcatgccactgaagcaccagcctgattttatctatctcaggcacgtcccactaaggcgtgtccacctgtttacgttcttgcaggtactgtgtctagctctgctgtggatcctgaagtctacagtcgctgccattatctttccagtgatgattttggccctggtggctgtgcggaagggcatggattatttgttctcacagcatgacctatcttttctggatgacgtcataccagagaaagataagaagaagaaggaagatgaaaagaaaaagaaaaagaagaagggaagtctggactccgacaatgacgactccgattgtccatattctgaaaaggtgccttctatcaagattcccatggatattatggagcagcagcccttcctgagtgactcaaagccatctgacagagagcggagtccaacctttctcgagcggcacacctcttgttag

SEQ ID NO: 206198 - DNA, 2988 bp, synthetic construct
  misc_feature 1..2988: note = Description of Artificial Sequence: Synthetic coding sequence
  source 1..2988: mol_type = other DNA
atggaggacgaggccgtgctggaccggggcgccagcttcctgaagcacgtctgcgacgaagaggaggtcgagggacaccacacaatttacatcggggtccatgtgcccaaaagctaccgccgtagacgaaggcataaacgaaagacaggacacaaggagaaaaaagagaaggagcgtatctcagaaaattactctgataaatcagatattgagaacgcggacgaaagtagttcctccatcctgaaaccactgatctccccagccgcagaaagaataaggttcattttaggagaagaagacgactctccagctccacctcagctattcactgagctcgacgagctgctggccgtcgacgggcaggaaatggagtggaaagagacagcgaggtggataaagtttgaagaaaaggtggaacagggaggcgaacgatggagtaaaccacacgtggccaccctcagtcttcattccctcttcgaattgcgcacgtgcatggagaagggctctatcatgctggaccgagaagcttcctccctgccgcaactggtggaaatgatagttgaccaccagattgagacggggttgctgaaaccggagcttaaggataaggtaacatacactcttctgcggaagcacagacatcagaccaagaagtctaacctacgtagtctcgccgacatcggaaagacagtgagcagcgcaagccgtatgtttacaaatccggacaacgggtcacctgcaatgactcataggaatctaacgagcagtagtcttaatgacatctcagataagcctgagaaagaccagttaaaaaataaattcatgaagaagttgccaagagatgctgaagcctcgaacgttctggttggcgaggtcgattttctggacacaccctttatcgcctttgtgcgcctgcagcaggccgtcatgctgggagccctgacggaggtgccagtcccaactagattcttatttattctgttgggaccaaaggggaaggcaaagtcctatcacgaaatagggagggccatcgcaaccctgatgagtgacgaggtattccacgatatcgcctataaagcgaaagaccggcacgaccttattgccggaatcgacgagttcttagacgaggtgattgtgctgcctccaggggagtgggatcccgcaattcggattgaaccacctaaatctctgccctcaagcgataaacggaagaacatgtactcaggaggcgagaacgtacagatgaatggtgacactcctcacgacggaggacacggaggcggaggccatggtgattgtgaggagctccagcggactgggaggttctgtggcgggctgattaaggacatcaagaggaaggcaccattctttgcctcggatttttatgacgcgctgaacatccaggccttatcagctatcctgtttatatacttggcaaccgtaacaaacgccattacgtttggggggctgctgggggatgcaacagacaacatgcagggagtactggagtctttcctgggcacagcagtgtctggagctatcttttgcctgttcgccggacagcctttgacgattctttcctcaaccggtcccgttctagtgttcgagcggctcctttttaacttcagcaaggacaataactttgactatctggagttcagactgtggattggactgtggtccgcattcctgtgcctgattctcgtagccaccgatgctagtttccttgtgcaatactttacaagattcacagaagagggcttctcttctttaatctctttcatatttatctatgacgccttcaaaaaaatgatcaagctggccgactactacccaatcaattctaacttcaaagtgggttataacacattattcagctgcacatgcgtgcccccagacccagccaatatttctatttccaatgacacaacgctggccccagagtatctgccgacgatgtcatctaccgacatgtatcataacacgacttttgattgggccttcctgagcaagaaggaatgttccaagtacggcggaaacctcgtgggcaacaattgcaattttgtgcctgatattactctcatgtctttcatcctgtttctcggcacgtacacatcttcgatggcgttgaagaaatttaaaacctccccctacttcccgacaaccgcccggaagcttatttcagactttgccatcattctaagcattctgatcttctgtgtgattgacgcccttgttggcgtggacacccctaaactgattgtgccaagtgagtttaaacctacttctcctaacagaggatggttcgtgcctccctttggagagaatccttggtgggtgtgcctcgccgctgccattcccgcattactggtgaccattctgatcttcatggaccagcagattacagcggtaattgtgaatagaaaggaacacaagctcaagttcatcccgatgcccgtgctctacggcgtgtttttgtatatgggcgttgctagcttaaatggcgtacagtttatggacagactgaaactcctgttgatgccactgaaacaccaacctgatttcatctatttgcgacatgtcccactgcgaagagttcatctgtttacttttttacaggtcctctgcttggctctgttatggattctcaagagtacagtcgcggcaatcatcttcccggtgatgattttagctttggtcgcagtcaggaaagggatggactatctcttttcacagcatgacctgtcattcctcgacgatgtcattcctgagaaagataagaaaaagaaagaagatgagaagaaaaaaaagaagaagaagggttctcttgacagtgacaacgatgacagcgactgtccatactctgaaaaggtgccctccatcaagatcccaatggacataatggaacagcagccctttctaagcgacagtaaaccttccgatagggagaggagtccaacttttctggaaagacacactagttgctag

SEQ ID NO: 206199 - DNA, 3285 bp, synthetic construct
  misc_feature 1..3285: note = Description of Artificial Sequence: Synthetic coding sequence
  source 1..3285: mol_type = other DNA
atggaggacgaggccgtgctggaccggggcgccagcttcctgaagcacgtatgcgatgaggaagaggtggaaggccaccacacgatatacataggcgtccacgtacctaaatcctaccggaggcgccgtaggcataaaaggaaaaccggacacaaggagaagaaagagaaagagagaatctctgaaaactattcggacaagtccgacattgagaacgcagatgagagctcgtcttccatcctgaaaccactgatcagtcccgccgcagaacgcatcaggtttatactgggggaggaagacgactctccagctccacctcagctgtttactgagctagatgaactcctagcagttgatggccaggaaatggagtggaaagagaccgccaggtggatcaaattcgaagagaaagtggaacagggcggagaacggtggagtaagccccacgtggcaaccctcagcttgcattccctttttgaacttaggacgtgcatggagaaaggctcaattatgcttgatcgagaagcctcttcccttcctcagctcgttgagatgatcgtagatcaccagatagaaacggggctcctgaagccagagttgaaagacaaggtcacctacaccctgttgaggaagcaccggcaccagacgaaaaagtctaatctccggtcactggccgacattggcaagaccgtgtcttcagctagccgtatgtttacaaaccccgataatggcagcccggcgatgacacacaggaaccttacatcatcttcactgaatgatatcagtgacaagcccgagaaggatcagttgaaaaataaatttatgaaaaagcttcccagagacgctgaggcttccaatgtgctggtgggtgaggttgatttcctggacacaccattcatcgcctttgtgaggctacagcaggccgtgatgcttggcgcattaaccgaagtgcccgttccgacccggttcctgtttatactcctaggaccaaagggaaaagctaagtcataccatgagatcggcagagccatcgccaccttgatgtccgatgaggtcttccacgatatagcctacaaagccaaagatcgtcatgatctgattgctggaatcgacgaatttttggacgaggtgatcgtgctgccgccgggagaatgggatccagcaattcgcatagaaccccctaagagcctcccatcttccgataagagaaagaatatgtactcaggtggcgagaatgtacagatgaacggcgacactccacatgatggaggtcatggcggcgggggtcacggtgattgtgaagagctgcagaggaccgggaggttctgcggcggacttattaaagacatcaaaagaaaggcccctttctttgcgtctgatttctatgacgctttgaatatccaggcccttagcgccattctgttcatttacttagcaactgtcactaacgccattactttcggaggcctgctaggagatgcgacggataatatgcagggagtattagagtccttcctcgggactgccgtctccggtgcgatcttttgtctcttcgctggacaaccattaaccattctcagcagcaccgggcctgttctggtgtttgagaggctgctctttaactttagcaaggacaacaatttcgactatttagaatttaggttgtggatcggtctctggtccgcttttctgtgcctcatcttagtggctacggacgccagcttcctggtccaatatttcactagatttactgaagagggtttcagtagtttgatctcttttatctttatctacgacgccttcaagaagatgatcaaattggccgactactatccaattaacagcaattttaaggtcggctacaacacacttttctcatgcacctgtgttccacctgacccagcgaatatttccatttccaacgacacgactttggccccagaatatctgcctaccatgtcatctactgatatgtatcataacaccacgtttgactgggcatttttgtctaagaaggaatgctccaagtatggtggaaatctcgtcggtaacaactgcaatttcgtccccgacattaccctgatgtccttcattttgttcctgggaacctacacatcttctatggcacttaagaagttcaaaaccagcccctatttccctaccaccgcccgtaagttgatttccgacttcgcaattatcctgtccatcctcattttttgtgtgattgacgccctcgttggcgtcgacacacccaaattaatcgtcccatcagagttcaagcccacaagtcccaatcgggggtggtttgtccctcctttcggtgagaatccatggtgggtttgcttggccgctgccatcccagctctactagtgacgatcttgattttcatggaccagcaaatcactgccgtgatcgtaaatagaaaggagcataagctgaaaaaaggcgctggataccatctcgatctcttttgggttgcaatcctgatggtgatctgtagcttgatggcactgccatggtacgtcgccgccactgtgatttcaatcgcccacatcgactctctgaaaatggagaccgaaacttctgcacccggagagcagccaaagtttctgggtgtgcgggagcagcgagtgactggcacactcgtattcatcctgactgggttatccgtttttatggctccgattttaaaattcattccgatgcctgttctctacggggtgtttctatatatgggggtggccagcctgaacggcgtccaatttatggatcggctgaaactccttctgatgcccctaaagcatcagcctgactttatctatttacgtcatgtgcccctgcgccgtgtgcatctctttacgtttttacaggtcttgtgcttagcccttttgtggattctgaagagcaccgtagctgccattatttttcccgtgatgatcttagccctggtcgctgttagaaagggaatggattatctctttagccaacacgacctcagctttctcgacgacgtaataccggaaaaggacaagaaaaagaaggaagatgagaaaaaaaaaaagaagaagaagggctcactggattccgataatgatgatgagaaagaccaccaacatagcctgaacgcaacacaccacgcagacaagatcccttttcttcagtcactcggcatgccgagcccgccaagaacacccgtaaaagtggttcctcagattagaatagaactggaaccggaagataatgattacttttggaggtccaaaggcaccgaaactaccctctag

SEQ ID NO: 206200 - DNA, 3123 bp, synthetic construct
  misc_feature 1..3123: note = Description of Artificial Sequence: Synthetic coding sequence
  source 1..3123: mol_type = other DNA
atgaaggtgaaggaggagaaggccggcgtgggcaagctggaccacacaaaccaccgaaggagattcccggatcaaaaggagtgcccccctatccatataggtctgccagtccctacatatccacaacgtaagaccgatcagaaaggacacctcagcggcctccaaaaggtgcactggggcctgcggcccgatcaaccacagcaggagttgacagggcctgggagcggtgcttcctctcaagatagctcaatggacctcatttctcgaacacgcagtcctgcggccgaacagctccaggatattcttggcgaagaagacgaagcccccaatcctacactgttcacagaaatggacaccttacagcacgatggtgatcagatggagtggaaagaaagtgcccgctggataaagttcgaggagaaggtggaagagggaggagaacgctggtcgaagcctcacgtcagtactttgtccttacactctctgttcgagctacgcacctgtctgcagacgggcaccgtcctgctggacttggactccggctctctcccccagataatcgacgacgtaattgagaagcagattgaagatggtctccttaggcctgagctgagggagcgggtgagctatgttctcctcaggcgccatcgccaccagaccaaaaaacctatccacaggagcctcgccgacataggaaaatctgtgagcacgaccaaccgatctcccgctcggagcccaggagccggtccttcccttcaccactctacggaagatcttcgaatgaggcaatcggcaaactacggcaggctctgccatgctcaatcccgctccatgaatgacatatccctgacacccaacaccgatcagcgcaagaacaagtttatgaagaaaatacctaaagattcggaggctagcaacgtgctggttggtgaggtggacttcctggatcagcctttcattgccttcgtacgccttatccagtccgctatgctgggaggcgttaccgaagtccccgttccaacccgtttcttgttcattctgttaggaccaagcggaagggctaagagctataatgagattggcagggcgatagctacgctgatggtggatgatctctttagtgatgtcgcttacaaggcccgtaatcgcgaagatctcatagccggaatcgacgagtttctggatgaggttatagtgctgcctccaggcgagtgggatccgaacatccgcatcgagccaccgaaaaaggtaccatctgcagataaacggaagagtgtcttcagtttggcagaactgggccagatgaacggttccgtcggtggcgggggaggggccccaggcggaggaaacggtggcggcggaggtggaggctcgggtggtggagcaggctcaggcggcgcaggtggtactagtagtggcgacgacggggagatgcctgcgatgcacgaaattggagaagagctgatttggacgggaaggtttttcgggggtctctgcctggatataaagcggaaactcccctggttcccgtccgacttctatgatggtttccacatccagtccatttctgccatcctgtttatttatctgggatgtatcaccaacgcaattacttttggcggtctgctgggtgatgccacagataattaccagggtgtgatggagtcattcttagggaccgctatggccgggtcactgttctgtcttttttccggacaacccctgattatcttgagctctaccggccctatccttatcttcgagaaactgctcttcgattttagcaaaggcaatgggttagactatatggaattccgcctttggattggcctccattccgccgtccagtgcctgatccttgttgccacagatgcaagtttcatcataaaatacattacaaggtttacagaggaggggttttccaccctcatatcttttatcttcatttacgatgctattaaaaaaatgattggggcatttaagtattatcctattaacatggactttaaaccaaactttatcactacatacaaatgcgaatgcgtggcgcctgacactgtgaatacaacagtctttaacgcgtccgccccactagcccccgatacaaacgcttcactctataacctgctgaacttaacagccttggattggtccctccttagcaagaaggagtgcctatcttacgggggcagactgctggggaactcgtgcaaattcattcccgacctggctttaatgagcttcatactgttcttcggcacctacagcatgactctcaccctcaagaagttcaagttcagcagatacttccccaccaaggtgcgggccctcgtggcggatttttctatcgtctttagcatccttatgttttgtggcatcgatgcatgtttcggcctggaaacacccaagctccacgtgcccagcgttattaagccgacgcgacccgatcggggctggtttgttgccccattcggaaaaaatccatggtgggtgtacccggcatctatactaccagcactgctagtgacaatcctgatctttatggatcaacaaatcacagctgtaatagtcaacagaaaagagaacaaactgaaaaaggccgccgggtaccacctggatctcttttgggtgggcatccttatggccctttgcagctttatgggcctgccctggtacgttgctgcgacggtgatctctatagcgcacatcgactccttaaaaatggagaccgaaacctccgcccctggagaacaaccccagttcctgggagttcgtgagcagcgcgtgaccggcataattgttttcatccttaccggaatctcagtattcctcgctcccatcctgaaaatccttggcctgattatcgtgcgcaggctactcgactttatattctcccagcacgacctggcgtggatcgataacatcctgccagagaaagaaaaaaaggaaacagacaagaaaaggaaacgaaagaagggggcgcacgaagactgcgatgaggagccgcagtttccgcccccatccgttatcaaaatccctatggaatcggtccaatccgatcctcagaatgggatccactgcatcgcaagaaaacgaagcagtagttggtcctactctctgtag

SEQ ID NO: 206201 - DNA, 3414 bp, synthetic construct
  misc_feature 1..3414: note = Description of Artificial Sequence: Synthetic coding sequence
  source 1..3414: mol_type = other DNA
atgaaggtgaaggaggagaaggccggcgtgggcaagctggaccacacgaaccatagaaggcggtttcctgatcaaaaggagtgcccccccattcacataggactgccagttccaacttaccctcagcgcaagaccgaccaaaagggccacctctcggggttacagaaggttcattggggacttcgaccagaccaacctcagcaggaactgacaggccccggctccggcgcctcatctcaggacagctccatggatctaatttccagaacccggtctcccgcggccgagcaacttcaggatatcctcggagaagaagatgaagcccccaacccaaccctctttaccgagatggatacgctccagcatgatggggaccaaatggaatggaaggagagcgctaggtggattaagttcgaggaaaaggtggaagagggcggtgagagatggagtaagccccacgtgagtacactctctctccactccctattcgagttgcgaacctgcctgcagactgggaccgtgctgctcgatctggattcgggctcactgcctcagatcattgatgatgtcatagagaagcagatcgaggacgggctgctgcggccggaactgcgtgagagggtgtcctacgttttgcttagacgccacagacaccagaccaagaagccgattcacagatctctcgcagacattggtaaatccgtgagcactacaaaccggagccctgccaggtctcctggagctggtccctctctgcatcactccacagaagacctgcggatgcgccaaagtgccaattacgggcgcctgtgtcatgcacagtctcgtagtatgaatgacattagcctcactccaaacactgatcaacgtaaaaacaagttcatgaagaaaatacctaaagactccgaagcgtccaacgtgctggtgggagaggtggactttctggaccagcccttcatagcatttgtcagacttattcaatcagccatgcttggtggagttacagaggttccggtgcccacccgattcctatttatcctcctgggcccatcgggaagggcgaaatcttacaacgagattggcagagccattgcgacattaatggtggacgacctcttctcagacgtagcctataaggcccgtaatagggaggatctgatcgcaggtattgatgaattcctggatgaagttattgtgttgcccccaggcgagtgggatccaaacattcgaatagaaccccctaaaaaagtcccctccgccgataagagaaaaagtgtcttctcactggcggaactgggtcagatgaacggctccgttgggggcggggggggcgctcccggcggaggtaacggcgggggaggcggtggcggaagcggcggcggggccggttccggcggcgcaggggggacaagctccggggacgacggggagatgcccgccatgcacgagatcggggaagagttaatttggaccggtaggttctttggcgggctctgcctggatataaagcgcaaacttccttggttccctagcgacttttacgacgggttccatatacagtccatctccgccattttgttcatttacttggggtgcataacaaatgccattacattcggggggctgttgggagacgcaacggacaactaccagggagtcatggagagttttttgggcaccgcgatggccgggtctttgttctgtttgtttagtgggcagcctctcatcattctatccagcaccggcccaattttgatatttgagaaactgctgttcgacttttccaaaggtaacggattggattatatggagttcagactttggatcgggctgcactcagctgttcagtgtttgattctggttgccaccgatgcaagctttattattaagtacattactaggttcacagaagagggtttcagcactctaatctcttttatttttatctacgacgccatcaagaagatgatcggggcttttaagtactatcctatcaacatggactttaagccaaacttcatcacaacatataagtgtgagtgcgttgcacctgatactgtgaacacaacagtgtttaacgcatctgcacccttggcccccgacactaatgcatctctatataacctgctaaacttgaccgccctggactggtcccttctgagcaagaaagagtgtctctcatatggtggacgtctcctggggaacagctgcaagttcatccctgatttagctctgatgtctttcattttattttttggcacttactcaatgacactaacgctcaaaaaatttaagtttagcagatatttccccaccaaggtcagagccctggtggctgacttctccatcgtgttcagcatcctgatgttctgcggtatcgatgcctgctttggactcgaaaccccgaagctccatgtcccctccgtgattaagcctacgcgcccagatcgaggctggtttgtggccccctttggaaagaacccttggtgggtgtaccccgcttcaattctacccgcgctgctggtcactattctgatttttatggatcagcaaatcaccgccgttattgtcaatcgtaaagaaaataagctgaaaaaagctgctggctaccacctagatttattctgggtcggcattctgatggcactctgtagctttatgggcctgccgtggtatgtagcagccactgtcatctctattgcccacatcgatagcctgaaaatggaaacagaaacttccgcccctggagagcagcctcagttcttaggtgttcgcgaacagcgtgtaacaggaataatcgtgtttattctcaccggtatttccgtttttctggccccgattctgaagtgtatcccactacccgtcctatacggcgtgttcctgtacatgggagtagccagcctaaacggtattcaaatgggtaccgggggaagcgaattcaaaattcaaaagaagttgacacctttttgggagaggtgcaagctgttccttatgcccgcgaagcaccagcctgaccatgcattcttgcggcatgtgcctttgcgccggattcatctgttcacattagtgcagatcctgtgcctcgcagtgttgtggatcttgaagtcaacggttgccgccattatttttccagtcatgatcttggggctgattatagttagaaggctgctggactttatttttagccagcacgacttagcttggattgataacattctgccagaaaaagagaagaaggagactgacaagaagcggaagaggaaaaaaggcgcccacgaagattgcgacgaggaaccccagttccccccaccctccgttatcaagattcctatggaaagcgtgcagagtgatccccagaatggaatccattgtatcgctcgaaaaaggagctctagctggagctatagcctctag

SEQ ID NO: 206202 - DNA, 3060 bp, synthetic construct
  misc_feature 1..3060: note = Description of Artificial Sequence: Synthetic coding sequence
  source 1..3060: mol_type = other DNA
atgaaggtgaaggaggagaaggccggcgtgggcaagctggaccacacaaatcatcgcaggaggtttcccgaccagaagggaagccccgctgccgagcagctccaagatatcctaggcgaggaagatgaagcccccaatcctaccctattcacggagatggacaccctccagcatgacggcgaccagatggagtggaaggaaagtgcccggtggatcaagtttgaggaaaaggttgaagagggcggggagcgctggtccaagccgcatgtgtctacactgtcactccactcacttttcgagctgagaacctgtctccagactggcacagtccttctggatttggatagcggcagtctgccccagatcatcgacgacgtgatcgagaaacagatcgaggacggcttgctacgacccgagctgcgggagagggttagctacgtactgctcagacgtcatcgtcatcagaccaagaagccgatccacagatcccttgccgatattgggaagagcgtttccacaaccaacagaagcccagcgagatcgccgggcgcggggccatccctccaccactcaacagaggacctgaggatgaggcagtcagccaattatggcagactgtgccatgcccagtcgaggagcatgaatgacatttctctgacacccaacaccgatcagaggaagaacaagtttatgaaaaagatacctaaagactccgaagctagtaatgtcttggtaggcgaggtggatttcttggaccagcctttcatcgctttcgtgcgtcttatacagtcagccatgctaggaggggtcacagaggtgccagttccgactagattcctctttatcctgctcgggccaagcggcagagccaagagctataacgaaattggaagagcaatagctactctcatggtggacgatttgttcagcgacgtggcctataaggccagaaacagagaggacttgattgcaggaatagatgagtttctggacgaggtgattgtgctgcccccaggcgagtgggaccccaacatccgcatcgagcctccaaagaaggtgccatccgcagacaaacggaaatctgtattttccctcgccgaactgggtcagatgaatgggagcgtgggcggcggcgggggggccccggggggtggcaacgggggcggaggtggagggggatccgggggcggcgcagggagcggcggcgctggggggacatcatcaggcgacgacggtgagatgccagcgatgcatgagattggagaagaattgatctggactggcaggtttttcggaggactctgcctggacattaagcggaaactgccctggttccctagcgatttttacgatggatttcatattcaatccatcagcgcaatcttgttcatttatcttggatgtattaccaacgccatcacatttgggggactcctgggagatgcaacagacaactaccagggcgtcatggagagctttctcgggaccgcgatggcgggatccctattctgtctgtttagcggacagccccttataatcctgagttcgacgggccccatactgatatttgaaaagctgctgtttgatttttccaagggaaacggattggactatatggagttccggttgtggataggcctgcactcagccgttcaatgtctaatcctggtcgcgacagacgcctcattcatcatcaaatacattacacgctttaccgaagagggattttcaacgctgatcagctttatcttcatctacgacgctatcaagaagatgatcggcgcgttcaagtactacccgataaacatggattttaaacctaatttcattactacgtacaagtgcgagtgtgttgctcccgacaccgtaaacaccacagtgttcaacgcaagtgcgcctttagccccggacacgaacgctagcctttacaatcttcttaacctgacggccctggactggtccctactcagcaagaaggaatgcctttcctatggcggtcggctcctggggaattcatgcaaattcataccagatctcgcgctcatgagtttcatcctgttctttggaacgtactccatgacgctgactcttaaaaaattcaagttctctcgatacttccccacgaagccaacacggcctgataggggttggttcgttgctcccttcggcaagaatccatggtgggtatatccagcaagtattctgcccgcactgttggttaccatcctcatatttatggaccagcagattacggctgtgatagtgaacagaaaggaaaacaagctaaaaaaagcagcgggatatcatctggatttgttttgggttggcattctcatggctttatgttcattcatgggtctcccatggtatgttgcagctaccgtcatcagcatcgctcacattgactctttgaagatggagacggagacttctgctccaggcgaacagcctcagtttctgggcgtccgtgagcagagggttacaggcatcatcgtattcatcttgacaggtatttctgtgtttctggccccgatactgaaatgcatccccttgcccgtgctctacggcgtgtttctgtatatgggagtagcttccctgaacgggatccagttctgggagaggtgcaaactttttctcatgcccgctaagcaccaaccggatcatgccttcttacgacatgttccactgagaagaatccacctgttcaccttggttcagattctgtgtctcgctgtcttgtggatactgaaatccaccgtagcagctataatcttcccggtgatgatcctcgggttgattatcgtccggcgcctactagattttattttcagccagcacgacttggcatggatcgacaatattttgcccgaaaaagaaaaaaaggagactgacaaaaagcgcaagcgcaagaagggggcacacgaagattgtgatgaagagccacaattcccccccccatcagtgattaaaatacccatggaatccgtgcagtcagatccccagaacggaatccactgcattgcgagaaaacgcagtagctcttggtcctatagcctatag

SEQ ID NO: 206203 - DNA, 3060 bp, synthetic construct
  misc_feature 1..3060: note = Description of Artificial Sequence: Synthetic coding sequence
  source 1..3060: mol_type = other DNA
atgaaggtgaaggaggagaaggccggcgtgggcaagctggaccacactaaccatcgacgccgctttccagatcagaagggcagtcctgccgcagaacaattgcaagacatattgggagaagaggacgaagcccctaaccctacgttgttcacagagatggatacgctgcagcatgacggagatcagatggagtggaaagaatcggccaggtggattaaattcgaagaaaaggtggaggaaggcggggagcggtggagcaagccccacgtgagcactctgtcattacactctctattcgagctgagaacatgcttgcagactggcacagtgcttctagacctcgacagcgggagcctgccccaaattatcgacgacgtcatcgaaaaacagattgaggatgggctgctgcggcctgagctgagggagcgagtgtcttacgtgctgctcaggagacaccgtcatcagaccaaaaagcctatacatagatccctggccgatatagggaaatccgtgtctacaactaacagatctcccgcaagatctccaggtgccggaccctccttgcaccattccaccgaggaccttagaatgagacaatccgcaaattacggcagactgtgtcatgcccagtccagaagcatgaacgatatcagtcttacccccaataccgatcaacggaagaataaatttatgaagaagatcccgaaagatagcgaagctagcaacgttttggtgggagaggtggatttcctggaccaacccttcatcgcgtttgtgaggttgattcagtccgccatgctaggcggggtcacggaggtccctgtgcctacacggtttctgttcattctcctgggtccgtcaggaagagccaagagctacaacgagattggcagagctattgccactctgatggtcgacgacttgttttctgatgttgcttataaagctcgcaatcgagaagacttgatcgctgggattgacgaattcctggatgaagttatcgtgctgcctccgggagagtgggatcccaatatcagaatcgagccacctaaaaaggtcccctctgctgataaaaggaaatccgtgttttctttggcagagttaggtcagatgaacggcagcgtgggtggcggcgggggcgctcctggtgggggcaacggcggaggcggcgggggaggatccggagggggcgcaggctcgggcggagcgggaggtacttcaagcggggatgacggggagatgcccgcaatgcatgaaatcggagaggagcttatatggacggggaggtttttcgggggattatgcctggatataaagaggaaactgccctggtttccgtcggatttctatgacggattccatatacaaagcatttctgcaatcctcttcatctacctcggttgcataaccaatgctattacatttggaggcctgctgggagatgccacagataactatcagggggtcatggaaagttttttggggacggcaatggccgggagcctcttctgcctgttcagcgggcagcctcttatcattctgtcctctacgggtccgatcttaatttttgagaaattattgtttgatttcagtaagggaaatggcttggactatatggagttccgtctctggatcgggcttcattcagccgtgcagtgccttatactggtggctaccgatgcaagtttcattattaagtacattacacggtttactgaagagggattctcaacactcattagttttatcttcatctacgatgcgatcaagaaaatgattggggcctttaaatattaccctatcaacatggactttaaaccgaatttcattaccacatataagtgtgaatgtgtggcccccgacactgtgaacaccaccgtctttaatgcatctgcccccctggcacctgacactaacgcctctctgtacaacctcctcaacctgacagcgcttgactggagcctgctgagcaagaaagagtgtctgtcttacggcgggcggctgctgggcaactcttgcaagttcatcccagatcttgcacttatgagctttattctcttcttcgggacctatagtatgactctgactctcaaaaagttcaagttctctcggtacttcccaaccaagcccacccggccagaccgaggatggttcgtagctccgttcggtaagaacccttggtgggtgtaccccgcgagtatcctcccagcactcttagtaaccatcttgatcttcatggatcagcaaattacagcggtgatcgtcaatcgcaaggaaaacaagctgaaaaaagcggccgggtatcatctggatctgttctgggtgggaatcctgatggccctgtgcagctttatggggttgccctggtatgtggcggcgacggtcatctccatcgcccacattgacagcctcaaaatggaaaccgagacatctgcacctggggagcaaccccaattcctgggcgtgagggaacaaagggttacaggcattattgtatttatcctcactgggatatcggtgttcttggccccaatcctcaaatgtattccacttccggtcttgtatggagtttttctgtacatgggagtggcctcattaaatggcatacaattctgggaacggtgcaagctctttttgatgcctgctaagcatcagcccgatcacgcctttctaaggcatgtgcctttacggaggattcacctgttcaccctcgtccaaattctgtgcctggccgtgctctggatattaaagtcaaccgtggcagcgattatctttcctgtcatgatcttaggattgataatcgtccgcagactactggacttcattttttctcagcacgacctggcctggatcgataatattttgccagaaaaagaaaagaaggaaactgataaaaagcggaaacgcaaaaagggggcgcacgaggactgcgacgaggagccccagtttcccccgccgtccgtgataaagattcctatggagagcgttcagtcggacccccagaatggcatccactgcattgctagaaaacgctctagctcgtggtcttactccctgtag

SEQ ID NO: 206204 - DNA, 3123 bp, synthetic construct
  misc_feature 1..3123: note = Description of Artificial Sequence: Synthetic coding sequence
  source 1..3123: mol_type = other DNA
atgaaggtgaaggaggagaaggccggcgtgggcaagctggaccacactaatcatcgcagacggttcccggatcagaaggaatgccctcctatccacatcggactgcccgttccaacttaccctcagcggaagacagaccagaaagggcatctgagtgggctgcagaaagtacactggggtttgagaccggatcagccacagcaagagctgaccggtccaggttccggcgcatctagccaggatagcagtatggatctcatatcaagaacccgctctccagcggccgaacaactccaggacatcttaggagaagaggatgaagcacccaacccgacattgttcacagaaatggacacacttcagcacgatggcgatcagatggagtggaaagaatccgcccggtggattaaatttgaagagaaagtcgaggaaggcggagagaggtggtccaagcctcatgtaagtactttatcattgcactctttgtttgagctgaggacatgcctccagacaggaaccgtcctcctcgacctggattccggctctctgccacagatcatcgacgacgtgatagagaaacaaatcgaagacggactcctccgcccagagcttagagaacgagtgagttatgtgctgctccggagacacaggcatcagacaaagaagcccattcataggagccttgccgacataggaaagtccgtcagcactactaatcggtcccctgccagatctccaggagccgggccgtcactccaccactctacagaggatctgcggatgcgccagagcgcaaactacggacgtctgtgccacgcccagtctcgatcaatgaatgatatctcgctcacccctaacactgaccagcgaaaaaataagtttatgaaaaaaatcccaaaagactcagaggcatccaacgtacttgtgggagaggtcgatttcctggatcagccctttattgcctttgtaagacttatccagtccgcaatgctcggcggggttacagaagtgcccgttcccactagatttctgttcattctcttgggtccaagtggccgggccaagtcttacaacgagattggccgtgccatcgccaccttgatggttgatgatctttttagcgacgtggcatataaggcccgtaaccgggaggacttgatcgcgggtatagacgagtttctggacgaggtgatcgttctacccccgggggagtgggatcctaatattcgcatcgaacctccaaagaaagtaccctcagccgacaagcgcaagtccgttttctcattggccgagttaggacagatgaacggatccgtcggcggaggcgggggagccccagggggcggaaacggagggggcggaggcggtggatcgggcggcggagccggctcaggaggcgcgggaggaaccagcagtggggacgatggcgaaatgccggccatgcatgagatcggtgaagagctgatttggaccggcagatttttcgggggactgtgcctggatataaagcggaagctgccatggttcccatcagacttttatgatgggtttcatatccaaagcatctctgccatcctatttatctatctgggctgtattacaaatgccattacattcggcggcttgctcggggatgccacggacaattatcagggtgtaatggaaagcttcttaggcacagctatggccgggtcactattctgcctgttttctggacagcctctcattatactgagtagcacaggccctattctcattttcgaaaaacttctgtttgacttctctaagggcaatggactcgattacatggaattcaggctttggattgggctgcactccgctgtccagtgcctgatcctggtggccaccgatgccagctttattatcaaatacatcacacggttcaccgaagaaggattcagcaccctgatctcattcatcttcatttacgatgctattaagaaaatgatcggcgcctttaagtattacccaatcaatatggacttcaaacccaacttcattactacatacaagtgcgagtgtgtcgccccggacacagtcaataccactgtgtttaatgccagcgccccactggctcccgacacgaatgcttcgctgtataatctcctgaatttgacggccctcgactggtctctgctcagtaagaaggaatgcctcagctatgggggaaggcttctgggtaacagctgtaagtttatacctgatctggctctgatgtcattcatccttttttttgggacctactcaatgacgctgaccctgaagaagtttaagttttcccgctactttccgaccaaagtaagggcgctggtggcagattttagtatcgtgttttctatcctgatgttctgtggtattgacgcctgctttggacttgaaacccctaagcttcacgtcccaagcgttatcaaacccaccagaccagatcgtggatggttcgtggctcccttcggcaagaacccgtggtgggtgtatccggcttccatactccccgccctgctggtgacaattttaattttcatggaccagcaaatcacagccgtgatagttaaccgtaaggaaaacaagctgaaaaaggccgccggctatcatctggacttgttttgggtagggatacttatggcactatgctcgtttatgggactgccttggtatgtagcagcaacagtgatctcaattgctcacattgactccttgaagatggaaacagaaactagcgcccccggcgagcagccacaattcctgggtgtccgagaacaaagggtgacaggaattatcgtgtttatactcacagggatttccgtcttcttggccccaattttaaagattctggggctcataatcgtaaggaggctcctggatttcattttctcccagcatgacctagcctggatcgacaatattctgccagaaaaggagaagaaagaaacagacaagaagcgaaaacgaaaaaagggagcgcatgaagactgtgacgaggagcctcagtttccccctcccagcgtcattaagatacccatggaatcagttcagtcagaccctcagaacggaattcactgtattgccaggaaacgcagttcctcgtggagttattcattgtag

SEQ ID NO: 206205 - DNA, 3414 bp, synthetic construct
  misc_feature 1..3414: note = Description of Artificial Sequence: Synthetic coding sequence
  source 1..3414: mol_type = other DNA
atgaaggtgaaggaggagaaggccggcgtgggcaagctggaccacaccaaccaccgccgtcggtttccagatcaaaaagaatgtccaccaattcatatcggcctgcccgtcccaacttatccccagagaaaaacggatcagaaaggccacctgtctggccttcagaaggtgcattgggggttgaggcccgatcaaccccagcaggagctgactgggcctggttccggggcgtcctcccaggattcctcaatggatctgatttcacgtacacgctcgcccgccgctgagcagttacaagacatactgggagaggaggacgaagcccccaacccaaccttattcaccgagatggacaccctgcaacacgatggagaccagatggaatggaaagaaagcgcccgatggattaaatttgaggagaaggtagaggaagggggggagcggtggagcaagcctcatgtgtcaaccttaagccttcacagcctgttcgaactgcgtacctgtctgcagaccggaacagtcctacttgatcttgactccggcagcctgcctcagatcattgatgacgtgattgagaagcaaatcgaagacggactcctgaggcctgaactgcgtgagcgcgtgagctatgtgttgttgcgaaggcacaggcatcagacgaaaaaacctatacatagaagcctggctgatattggcaagtctgtgagcaccaccaatcggtcgcctgcacgcagccctggtgctggtcccagcctccaccactcaaccgaggacctcaggatgcggcagtcagccaactatggccgattatgccacgcccagagccgcagcatgaatgacatttccctgacaccaaacaccgaccagagaaagaataagttcatgaagaagatccctaaagactctgaggcctccaatgtgctggttggtgaagtggacttccttgatcaaccttttatcgcattcgtacgtctcattcagagtgctatgctgggtggggtgacagaagtccccgtgccaacgcgctttctgttcatcctgctgggtccatctggccgggctaagagctacaatgaaatcggacgagcaatcgccaccttgatggtggatgatctgttcagcgatgtggcgtataaggcgcggaatcgcgaagatctcatagcagggatagacgagtttctggacgaagtgatcgtcctcccacccggggagtgggacccaaacatacggattgagccccctaagaaggtgcctagcgccgataagaggaaatcagtgttttctctggctgagctgggccaaatgaacggctccgtcgggggtggcggcggtgctcccggcggcggaaatggcggaggcgggggagggggcagcggaggcggcgcgggatccggaggcgcaggaggtacatcttccggggacgatggagagatgccggccatgcacgaaatcggagaggagctaatatggacaggaagattctttggcgggctttgtcttgatattaaaaggaagctaccgtggttcccttctgatttctacgacgggtttcacatccaaagcatcagcgccatactcttcatctacctgggatgcattacaaacgcaatcacctttggtgggctacttggcgacgcaaccgacaactatcagggggtgatggagtccttccttgggaccgccatggcaggctcactgttttgcttgttctccgggcaacccctgattattctgagttcaactggcccaattctcatcttcgagaaactgctctttgatttcagtaaagggaatggccttgattacatggagttcagattatggatcgggctccattccgcagtccagtgcctgattctggtggctacagacgctagcttcattattaagtatatcacgagatttactgaagagggcttctccactctgattagcttcatatttatatatgatgccatcaagaaaatgattggcgccttcaaatattatccgatcaacatggacttcaaacctaatttcataaccacctacaagtgtgaatgtgttgcccctgatacagttaatactacggtctttaatgcctctgctccactggcaccagacacaaacgcctctttgtacaacttactcaatctgaccgctttagactggtcactgctttctaaaaaggaatgcctctcttacggtggcagattgctgggcaattcatgtaagttcatccccgatctggcccttatgtccttcattctgttcttcgggacctattccatgacattgacactgaagaaattcaagttttcccggtactttccaacaaaggttcgagctctggtggcagatttctcaatcgttttctctattctcatgttttgcggcattgacgcttgctttgggcttgagacaccaaagcttcatgtcccctccgttatcaaacccacacgccccgatcgaggctggttcgtagccccattcgggaagaacccctggtgggtctatccagctagcatattgcctgctttgctggttacgattttaatttttatggaccagcagataacggcggtaattgtaaatcggaaggagaataagcttaaaaaagccgctggttatcacctcgatctcttctgggtgggaatcctgatggccctatgttcctttatggggctcccatggtatgtagcagctacagttatttctatagcgcacatcgacagtctgaagatggagactgaaactagcgcaccaggcgagcagccccagttcctaggggtgagggaacagcgggtaacagggatcattgtgtttatccttactggtatctcagtctttctggcccccattttgaaatgcattccattgccggtactatatggcgtgttcctatacatgggcgtcgccagcctgaatggcatacagatggggacgggcggaagcgagttcaagattcagaaaaagctcacacccttctgggaacgatgcaagctgttcctcatgcccgccaagcaccaacccgatcacgccttcctccggcatgtcccattgagacgcatccacttattcaccctggtccaaattttgtgtctggccgtcctttggatcctgaagtctactgtggctgcaattatattcccagtgatgatcttagggttaattatcgtgcgccgtctcctggactttatcttttctcagcacgacctggcttggattgataacatcctccctgaaaaggagaaaaaagaaacagacaagaaacgtaagagaaaaaaaggtgcccacgaagattgtgacgaagagccacagttccccccaccttctgttattaagattccaatggaatctgtgcagtcggacccacaaaatggaatccactgtatcgctagaaaacggagttcttcttggagctacagtctgtag

SEQ ID NO: 206206 - DNA, 3366 bp, synthetic construct
  misc_feature 1..3366: note = Description of Artificial Sequence: Synthetic coding sequence
  source 1..3366: mol_type = other DNA
atgaaggtgaaggaggagaaggccggcgtgggcaagctggaccacacaaatcatagaaggcgcttccctgaccagaaggaatgtcccccgattcacatcggacttcctgtgcccacttacccacagcggaaaacagatcagaaggggcatctgagtggactgcagaaagtgcactgggggttgcgtccagatcaaccccagcaggaattgaccggtcctggcagcggtgcgtctagtcaggacagcagcatggacctgatctcaaggacgcggagcccagctgcagagcagcttcaggacatcctcggagaagaagatgaagctcctaatcccactctgtttacagagatggacacgcttcagcacgatggagatcaaatggagtggaaagaatctgctcgctggatcaagttcgaagagaaagtcgaggaaggtggcgagcgttggagcaaaccacacgtatcaacgctaagcctgcacagtctgtttgaacttcgcacttgcctgcaaaccggtaccgtcctgctggatctagattctggttcgctacctcagatcattgatgatgtgatcgaaaaacaaatagaggatgggctgcttcgtcctgagttgagggagcgggtgtcatatgtccttctcagacgccatcgccatcagaccaagaagcctattcaccgttcactggcggacatcggcaaaagcgtgtccaccaccaaccggtcgcccgccaggtcccctggggctggtccctcacttcatcactcaaccgaggacttgcggatgcggcagtcggccaattatggcaggctgtgtcatgctcaatccaggagcatgaatgatattagtcttacccccaatactgatcagcggaagaataagtttatgaagaaaatcccaaaagactcggaagcatctaacgtccttgtgggagaagttgactttcttgatcagccatttatcgcctttgtgagactcatccaaagtgctatgctgggtggcgtgacggaggtgccggtccccaccagattcttgttcatcctgctgggcccctcaggaagggctaagtcatacaacgagatcggccgggcaattgcaactctcatggtcgatgatttgttctctgatgttgcttacaaagctcgcaaccgtgaggacctcattgccggaatcgatgaatttctggacgaggtcatcgtgctccctcctggggaatgggatcccaatatcaggattgagccccctaagaaagtcccttcagctgacaaacgcaagtcggttttctcgttagccgaactgggccagatgaatggaagtgtcggaggtggcggaggagcaccaggtggggggaatggagggggcggcgggggcggcagcggaggaggcgcgggtagcggtggggctggtggtacgtcttcaggggacgatggtgagatgcctgctatgcatgagatcggcgaagagctcatttggactggacgctttttcgggggattgtgcctggacatcaaacgtaagctgccctggtttcctagcgatttctacgacggttttcatatccagagcatctccgcgatccttttcatttatctgggctgcattaccaatgcaatcaccttcgggggcctgctgggagatgctacagacaactatcagggagttatggaaagtttcctgggtacagcgatggcaggatcactgttttgcctgttttccggccagcccctgattattctcagttctaccggtcccatacttatcttcgaaaagttactgtttgatttctcaaaaggcaacggactggattacatggagttccgcctctggatcggcctccattcggctgtgcagtgccttattttggtcgctacagacgcaagcttcatcatcaagtacatcacaagatttactgaagaagggtttagtaccctgatttcctttatattcatctacgacgctatcaagaaaatgattggcgcatttaaatactacccgattaatatggattttaagcctaatttcatcacaacgtacaagtgtgaatgcgttgcgccagatactgttaataccactgtattcaacgcctccgcaccactcgctcctgacaccaatgcaagcctgtataacttactgaatcttactgccctcgactggtccctgctatccaaaaaggagtgtctgtcatacgggggccgtctactggggaactcgtgcaagttcattcctgatcttgccctcatgtcctttattttgttcttcggcacctactcaatgacgctcacactaaagaaattcaagttctcacgctattttccgacgaaagtaagggctctcgttgccgatttcagcatcgtgttctcgatcctgatgttctgcggtatagacgcctgttttggcctcgagacaccgaaattgcacgtacccagtgtgataaagcctacacgtcctgacagaggctggttcgtggcccccttcggcaaaaacccctggtgggtgtatcctgcctcaattctgccagccctcctggttaccatcctgatattcatggaccaacagattaccgccgtcatcgttaatcggaaagaaaacaaactgaagaaggcagccgggtaccacctggacctgttctgggtgggcatactgatggcactgtgctctttcatgggcctcccatggtacgtcgcggccacagtgatcagcatcgctcatattgacagcctcaaaatggaaaccgaaacgtctgcacccggagaacagcctcagtttttgggtgtgagggagcaaagggttaccggaatcatcgtgtttatcctaactggtataagcgttttcctcgccccgatcctgaaatgtattccactgcccgtgctgtacggcgtctttctgtacatgggcgtagccagcttgaacgggatccaattctgggaaagatgcaagctctttctcatgcccgccaagcaccagcccgaccatgccttcctccgacacgtgcccttaaggcgaatccacttgtttaccctcgtacagattctatgcctggctgtactttggatcttgaaatccacagttgctgcgattatattcccggttatgatcctggggcttatcatcgtgcgccgcctgctggactttattttcagtcagcatgatctggcttggatagataacatcctccccgagaaggaaaaaaaggagacagacaagaaaaggaagcgtaagaagggcgcccatgaagattgcgacgaggagccccaattcccgcctcccagcgtcatcaaaattccaatggaaagcgttcagagcgatccgcagaatggcattcattgtatagctagaaagcgaagtagctcctggtcctattcactgtag

SEQ ID NO: 206207 - DNA, 2982 bp, synthetic construct
  misc_feature 1..2982: note = Description of Artificial Sequence: Synthetic coding sequence
  source 1..2982: mol_type = other DNA
atgaaggtgaaggaggagaaggccggcgtgggcaagctggaccacacaaatcatcgcaggcggttccccgatcagaaagagtgtccgcccatccacattgggcttcctgtcccaacatatccccagcgcaagaccgaccaaaaaggtcatctgtcagggctccagaaggtacactggggcttgaggccggaccagccccagcaagaactaacaggcccggggtccggcgcttcttcccaggactcttccatggacctgatttcaagaacacgcagccctgcggccgaacagctgcaagatattctcggggaggaggacgaggcccctaaccctactctgttcactgagatggatacactccagcacgacggcgatcagatggaatggaaggaaagcgctcgttggattaaattcgaggagaaagtcgaagagggaggcgaaaggtggagtaaaccacatgtgagtacactgagccttcacagcctgttcgaactcaggacctgcctccagactggcaccgttctgctagatctcgactcagggagcttgccgcagataatcgatgatgtgattgagaagcagatcgaggacggcttgcttagacctgaactaagggagagggtatcgtatgtgttactgagacggcaccgtcaccagacaaaaaaacctatccacagatccctcgcagatatcggaaaatctgtctctactacaaaccggagcccagcccgcagcccaggtgcggggccatctctccaccatagcacagaggacctgaggatgcgacagagcgctaattatggaagactctgccacgcccagtctaggagcatgaatgacatctcattgacaccaaataccgatcagagaaaaaataaattcatgaagaagatccctaaggattcagaagcaagtaacgtcctggtgggggaggtcgactttctggatcagccattcattgccttcgtgaggttgattcagtctgcgatgttgggcggcgtgactgaggtgcctgtgcccactcgcttcctgttcattctgcttggcccgtctggtagagccaagtcctataatgaaattggaagagctatcgctaccctgatggtggacgatctgttttcagacgtcgcttacaaggccagaaatagggaggacctgattgccggtatcgatgagtttcttgacgaggtgatagtgcttcccccaggtgaatgggatcctaacatacgcattgagcctccgaaaaaagttccctccgccgacaagcggaagagcgtattttccctggctgaactcgggcagatgaacgggtccgtcggcggcggcggaggcgcccctggcggcggaaacggaggaggcggcggcgggggaagtgggggtggcgcaggctccggcggagctggcggaacctccagcggcgatgatggtgaaatgccagctatgcacgagattggtgaagaactcatttggacggggcggttttttggcgggctttgtctggatatcaagcggaagctaccgtggtttccgagtgatttttacgatgggttccacatccaatctatttctgccatcctgttcatctatctgggctgtatcaccaatgccataacctttggcggcctgttgggggacgccactgacaactaccagggggtgatggagtcgttcctcggcactgctatggccggatcactgttctgcttgtttagcggccaacccctgattatactctctagtaccggtcctatactcatattcgaaaagctgctttttgacttcagcaagggcaacgggctggactatatggaatttaggctctggattgggctgcattccgccgtccagtgtctaatcttggttgccacggacgcctctttcattattaaatacatcacaaggtttactgaggaaggctttagtactctcatctcctttatcttcatttatgacgccatcaagaagatgattggcgcatttaagtactacccaatcaacatggattttaaaccaaacttcattacgacttataagtgcgaatgcgtcgcgcctgataccgtcaatacaactgtgtttaatgcctccgctcctctggcgcccgacactaacgcttcactgtacaacctcttgaatctgaccgccctggattggagtttactgagcaagaaagaatgcttgtcttacgggggtagacttctcggtaattcgtgcaagtttataccagatctggctctaatgtcctttatcctgttcttcggtacctattctatgacactcactctcaaaaagttcaagttctctaggtacttcccaaccaaggtacgtgcccttgtagccgacttctctattgtattcagcatattgatgttttgtggaattgacgcgtgtttcggccttgaaacccccaaacttcacgtgccatctgtgatcaagccaacaaggcctgacagagggtggtttgtggctccatttgggaaaaatccttggtgggtctatcccgcttctatcctccctgctctgctggttaccatcctgattttcatggaccagcagatcaccgccgtgatcgtcaatcgcaaggaaaacaagcttaagggcacagagtccaaccgccaccatcggctgcaccctgacggcaacctgtgtctgcctggttctcatcccaaggtgtatcctcctgcaggcgccgttaggtctttgccgttgcacgggaggggcttgcccgagtggcacccagttttaggtacactgcaggcactgccggatgcttcccaggctcccgccggtccttgcctaccagctgctcgggccgccgccccagatcccccgttacaccccggtgctgatcccctacccggtggcgccttagacccgcagatccacggcggctgccaccacctgccaggccatgaccccggaccccatcataggagcaaggccagcggcttccaccttttccctgcgcgcccaggccttgactag

SEQ ID NO: 206208 - DNA, 2895 bp, synthetic construct
  misc_feature 1..2895: note = Description of Artificial Sequence: Synthetic coding sequence
  source 1..2895: mol_type = other DNA
atgaaggtgaaggaggagaaggccggcgtgggcaagctggaccacacaaatcatcgtcgcaggtttccggaccagaaagagtgcccaccgatccacattggcttgccggttcccacctacccgcaaagaaagactgaccagaaggggcatttgtctggactgcagaaggtgcattggggcctgagacctgaccagcctcagcaggagctgactggccccggttccggcgcgtcgagccaggactcctcaatggacctcatatctcgtactcggtcccccgcagcagagcagctccaggatatccttggagaggaggacgaggcccccaatccgaccctgttcacagagatggatacactgcagcacgacggcgatcagatggagtggaaagaaagtgcaagatggatcaagtttgaggagaaagtagaggaaggaggcgagcggtggagtaagccccacgtttcaaccctgtccctccacagtttgttcgaacttcgaacctgtctgcagacggggacagtgctgctcgacctggactccggttccctgccccaaatcattgacgacgttattgagaaacagatcgaagatggcctcctcaggcctgagctccgggagagagtgagctacgttctcctgagaagacatcggcaccagaccaaaaagcctattcataggagcctggccgacattggaaaatctgtttccaccacaaaccgatcccccgcccggtctcccggagcggggccatccctgcaccactcaactgaagacctccgcatgaggcagtccgcgaactacggcaggttgtgccatgcccagagcaggagcatgaacgatattagtctgacacccaataccgaccaaagaaagaataaatttatgaagaagattcccaaagattccgaggccagcaacgtgctggtcggagaagtggacttcttggaccagccctttatagcgtttgtgagactcattcagagtgcgatgctggggggcgtcacggaggtgcctgttcctactaggtttctgttcattttgctaggcccttccggcagagctaagtcctataacgaaattggccgtgctatagcaacactgatggttgacgatctgtttagcgacgtcgcctataaagcccgtaacagagaggatttaatagccgggatagatgagtttctggacgaggtgatcgtacttcccccgggagaatgggacccaaacatcaggatcgaaccccccaaaaaagtgccctcagctgacaaacgaaaaagtgtgttctctctcgctgagctcgggcagatgaacgggagtgtcggcggcggaggcggagctcccgggggcggcaatgggggcggtgggggtggcgggagtgggggcggggccgggtccggcggggctggcggtactagttctggggatgacggggaaatgccggctatgcacgagatcggggaggagctgatctggacgggaagatttttcggggggctctgtctggatatcaaaaggaaattaccatggtttccatctgacttttacgatgggtttcacattcagtccatttcggcaatcctgttcatatatctgggttgcattaccaacgccatcacgttcggcggactcctcggagacgccactgacaactaccagggtgttatggaaagcttcctcggaacggccatggccggatccctcttctgtctttttagcggacagccactgatcatcctttcctctaccggacccatcctgatttttgaaaaactgctgttcgacttctccaagggcaatggcctagactatatggagttcagactttggattggactccacagcgctgtacaatgtttgattctggtagccaccgatgcatctttcataattaagtacatcacgcgtttcaccgaagaagggtttagcacccttattagttttattttcatctacgacgccattaaaaaaatgattggagcgttcaagtactacccaatcaatatggatttcaagcccaacttcattaccacttacaagtgtgaatgcgtggcccctgatacagtgaatacgaccgtttttaacgcgagtgcccccctcgctccggatacaaacgctagtctgtataatctgctgaatctgactgccctggattggtctctgttgagcaagaaggaatgcttatcctatggcggaagactcctgggaaattcatgcaagttcataccggacctggccctgatgagtttcatcctattttttggcacttattccatgacacttaccctgaaaaaatttaaatttagtcggtattttccaactaaaccaacccgcccagatcgcgggtggtttgtggcacccttcggcaagaacccctggtgggtctatcccgcctcaattctcccagctctgctcgtcacaatcttgattttcatggaccagcagataacagcagtgatcgtaaaccggaaggagaataagctcaaaggcacagaaagcaaccggcatcatcggttgcatccggacgggaatctgtgtttgcctggctcccaccctaaggtgtatccaccggccggggcagtccgaagcttacctctgcacggccgcggtctgcccgaatggcacccagttctcgggacgctgcaggctctgcccgatgcctcccaggcaccggccggtccatgtcttcccgccgcccgtgccgccgcacctgacccccccttacatcctggcgcggatcctctccctggaggcgcccttgatccacagatccatggcggatgccaccacctgccgggccatgtttccctgcatcatagaagctgggcatctagctcatttgaagggttttggatttcctcctttccctccactacttggcccggtttgacgacttcctag

SEQ ID NO: 206209 - DNA, 390 bp, synthetic construct
  misc_feature 1..390: note = Description of Artificial Sequence: Synthetic coding sequence
  source 1..390: mol_type = other DNA
atgaaggtgaaggaggagaaggccggcgtgggcaagctggaccacaccaatcaccggcggcgatttcctgaccagaaggaatgccctcccatccatatcgggctgcccgtccccacctatcctcagagaaaaactgatcagaaaggccacttgagcggcttgcagaaagttcattgggggctccgcccagatcagccacaacaagaactaaccgggcccggctctggtgctagcagtcaagattcgtctatggatctaattagtagaactcgctcccccgccgcggaacaattgcaggacatcctcggagaagaggacgaggcgcctaatccgacactctttactgagatggacacccttcaacatgatggcgaccaaatggagtggtag

SEQ ID NO: 206210 - DNA, 438 bp, synthetic construct
  misc_feature 1..438: note = Description of Artificial Sequence: Synthetic coding sequence
  source 1..438: mol_type = other DNA
atgaaggtgaaggaggagaaggccggcgtgggcaagctggaccacaccaaccataggagacgctttcccgatcagaaggagtgtcctcctattcatattggtctgcccgtacccacttaccctcagcggaaaactgatcagaagggacatctgagtgggctgcaaaaagtgcattggggactgcgtccagatcagccacagcaggagctcactggacctggatccggagcatcatctcaagacagttccatggatctgatctctcggacccggagccccgccgctgagcaattacaagacattctgggggaggaagatgaggctcctaaccccacgctcttcactgagatggacacgctgcaacacgacggcgaccagatggaatggaaggagtcagccaggtggattaaattcgaggagaaagtggaagagggatag

SEQ ID NO: 206211 - DNA, 3429 bp, synthetic construct
  misc_feature 1..3429: note = Description of Artificial Sequence: Synthetic coding sequence
  source 1..3429: mol_type = other DNA
atgaaggtgaaggaggagaaggccggcgtgggcaagctggaccacaccaaccacagacgacgtttccccgaccagaaggagtgccccccaattcacatcgggttgccagtgccgacttatcctcaacgcaagacagatcagaaaggacatctctctggactgcagaaggtgcattggggattacgtccagaccaaccgcagcaggaactgacaggacccggtagtggcgcatcttcccaagatagtagtatggatctgatcagtagaactaggtctcccgccgccgagcaactccaggacattctgggagaggaagacgaggcgcccaaccctacactgtttacagagatggacacactgcagcatgatggagaccagatggaatggaaggagtcagcgaggtggatcaaatttgaagaaaaagtcgaggaaggcggggaaaggtggtccaagccccacgttagcaccctgagtcttcactctcttttcgagctgcgcacttgcctgcagaccggaaccgtgctgttggacctggactccggcagcctgcctcagatcatcgacgacgtgattgaaaaacagatcgaggacggactgctgaggcctgagctccgtgagcgggtgtcttatgtcctgctacggcgccacagacatcagaccaaaaagccgatccaccggtccctggccgatatcggcaagagcgtgtctaccacaaataggagcccagcgcgcagccccggggccgggccatccttacaccacagtacagaggacttacgcatgagacagtctgccaactacggtcggctgtgtcatgcccagtcacgcagtatgaacgatatcagcctgacccctaacactgaccagcgcaagaataagtttatgaaaaagatcccgaaagatagcgaggcctccaatgtgctagtgggtgaagtcgacttcctggaccaacctttcattgccttcgttaggctaatccagtctgctatgttgggcggcgtgaccgaggtccccgttcccacaagattccttttcattctcctagggccttcagggcgggccaagagctataacgaaattggacgagccatcgccaccctcatggtagatgatttattctcagatgtcgcttataaggctcggaacagggaggatctaatcgctggtattgacgagttcctggacgaggtgatagtcctgccacctggggagtgggaccccaatattagaattgagccaccaaagaaagtgccttctgcggacaagaggaaaagtgtgtttagtctcgccgagttaggccagatgaatgggagcgtgggcggaggaggtggagcacctggtggagggaatggggggggaggcggagggggatccgggggcggggctggctctgggggagccgggggtactagctctggagacgacggggagatgccagctatgcatgagatcggcgaggaattaatttggacgggccgttttttcggaggtctgtgtcttgatattaaaaggaaactcccatggtttccgagcgatttctacgatggattccacattcagagtattagcgcaattttatttatttatctcggatgtatcacgaatgctatcacattcggaggattgttgggcgacgccacagataactatcagggcgtaatggagtctttcttgggaactgctatggcaggttctctcttctgcctgtttagcggccagcctctgatcatactttcatccaccgggcctatcttaatttttgaaaaactgctgtttgatttttccaagggcaacgggttggactatatggaatttcggctctggattggcctgcacagcgctgtgcagtgcctgattctcgttgcaactgacgcttcctttatcatcaaatacatcactaggttcactgaggaaggcttcagtaccctgatcagttttatctttatttatgatgcaattaaaaagatgataggggcctttaaatactacccaattaatatggattttaagcccaatttcataactacctacaaatgcgagtgcgtggcgccggatactgtgaacacaacagtattcaatgcttctgcgcctctggccccggataccaatgcatctctctacaacctcttaaacctcaccgcactggattggagtttgctctcaaaaaaagaatgcctctcctacggtggtaggctccttgggaactcgtgcaagtttatcccagatctggcattgatgtcgttcattctgttctttggaacatattccatgaccttgacactcaaaaaattcaaattttcccgatactttcctacaaaggtacgggccctcgtggcagacttttctatcgtgttctctatccttatgttttgtggtatcgacgcctgtttcggcttagagacaccaaaactgcatgtgccaagtgttataaaaccaaccaggccagaccgggggtggttcgttgctccttttggaaagaatccctggtgggtctatccagcttccatcctgccagccctgctggtaacgatcctgattttcatggatcaacagattacagctgtgattgttaatcgcaaggaaaacaaattgaagaaggcagctgggtaccacctcgacctgttttgggtcggcattcttatggcactgtgttcgtttatgggcttgccttggtatgtcgctgctactgttatcagcatcgctcatatcgactccctcaagatggagactgagaccagcgcccctggcgaacagccacagtttctcggcgtgagagagcagagagtcaccggcatcattgtattcatcttgaccggcatctccgtgtttcttgccccaattttgaagtgcattcccttgccagtgctctatggcgtttttctctatatgggcgttgcaagcttgaacggaatccaaatgggaaccggcgggtctgagtttaaaattcagaagaagctgacgccgttctgggagcggtgcaaactatttctgatgccagcaaagcatcaaccggatcatgcattcttaagacatgtgcctctccgccgcatccatttgtttacactggttcagatcctatgcctggccgtgctatggatcctgaaatctactgtggccgcaataatctttcccgttatgagcctgagcacgacagacctgggccttatcatcgtacgtcggctcctagacttcatctttagtcaacatgacctggcttggatagataatatcctgccagagaaggaaaagaaggagacagataagaaacgaaagcgtaagaagggggcccacgaagattgtgacgaggagcctcagttcccgccgcccagtgtcattaaaatccctatggaatccgtgcagtctgatccccagaatggcatacattgcattgctaggaaaaggtcaagttcttggtcctattccctgtag

SEQ ID NO: 206212 - DNA, 3645 bp, synthetic construct
  misc_feature 1..3645: note = Description of Artificial Sequence: Synthetic coding sequence
  source 1..3645: mol_type = other DNA
atggagcggttccggctggagaagaagctgcccggccccgacgaggaagcagtggttgacctcgggaaaacctcaagcaccgtcaatacaaaattcgaaaaagaggaactggagagccatcgggccgtctatataggggtgcatgtgcctttttctaaggaaagccggagaagacaccgccacagggggcacaagcatcaccaccgacggcgaaaggacaaagaatccgacaaagaagacgggagagagagtccctcctatgatacacctagccaacgggtacagtttatcctgggcactgaggatgatgacgaggagcacatcccacacgatctctttaccgagatggacgagctctgctatagggatggcgaagaatacgaatggaaagagacggcccgctggctgaagtttgaggaggacgtggaggacggaggagacaggtggagtaaaccgtacgtcgctactctgtccctgcactccctttttgaactgagaagctgcattctgaacggcacagtcatgctcgatatgagagccagcactctggacgagatcgcagacatggtgctcgacaacatgatcgcctccggacagctcgacgaatctattcgagaaaacgtcagagaagccctcctcaagcgccaccaccatcagaatgagaaaagattcacaagccgaatccctcttgtccggtcatttgcagatattggcaaaaagcattctgacccccacctccttgagaggaatggtgagggcctgtccgcctctcgccactcactcaggacggggctgagcgcatcaaacctaagcttgcggggcgagtctccattgagtctgctgcttggtcacttattgcctagctctcgagccggcacacctgcaggaagtcgctgtaccaccccggtgccgaccccccagaactcacccccaagctcaccgtcaataagccgcctgactagtcggtctagccaggagtcccagaggcaagcacctgaactgcttgtctccccagcgagtgacgacattcccaccgtggtcatacatcccccagaggaggatttggaggcggctctcaaaggggaagagcagaagaatgaggaaaacgtggaccttacgcctggaattctcgcgagccctcaaagtgcacctggaaatctcgacaattccaagtctggagaaattaaaggtaacggctcaggtggatcgcgtgagaattccaccgtggacttttctaaagtggacatgaacttcatgaggaaaattcctactggcgcagaggcttcaaacgtcctagtcggggaagtcgatttcctggaacgtcctataatcgccttcgttcgcttagcaccggcagtcctgctcaccgggctcaccgaggtgcctgtccctacgcggttcttatttctgcttctcggccctgctggaaaggccccgcagtaccacgagatcggcagaagcatcgctacactgatgaccgacgagatatttcacgatgtcgcctacaaggcaaaagataggaacgacctattgtccggaatcgacgaatttcttgaccaggtcacggtacttcccccaggagagtgggatccatcaatacggatcgagccccccaaatccgttccctcacaagaaaagaggaaaatcccggtcttccataacggtagtaccccaacactcggcgaaacccctaaagaagcggcacaccacgctggccctgaattacagaggactggtcggttattcggaggcttgattctagacatcaaacgtaaagcgcctttttttctgtcagatttcaaagacgctctcagtttacaatgtctggcgtccattcttttcctgtactgtgcctgcatgagccccgtcatcacctttgggggtctgctcggcgaggctacggagggcaggatctccgcaattgaatctctgttcggcgcaagtctaactgggattgcttacagtttattcgcagggcagccgctcacaatattaggcagcaccggaccagtactggttttcgagaagattctgtataaattttgcagagattaccagctgtcctacctcagcctgcgcacctctatcggtctgtggacaagttttctttgcatagtgcttgtggccacagatgcctctagcctggtctgctacataactaggttcaccgaagaggcttttgccgccttgatctgtatcatctttatttacgaagccctcgagaagctatttgatcttggggagacttacgcgtttaacatgcataacaacttggataaactcactagttattcctgcgtctgcaccgaacccccaaacccgagtaacgagacccttgcacaatggaagaaagataatatcactgctcataatatctcttggcgaaatctgacggtatctgagtgcaagaaattgcgcggcgtttttctcgggtccgcgtgtgggcatcatggaccatacattccagacgtcttgttctggtgtgttatactgttttttacaacattctttctgtcttcatttttaaagcaatttaagactaaacggtacttccctacaaaggttagaagtacaatttctgatttcgcagttttcctaactatagtcattatggtcacaatcgattaccttgtcggcgtgccatcacctaaattgcatgtaccagagaaatttgaacctacgcaccccgagaggggatggatcatttcacctctcggcgataacccttggtggacattgctgatcgccgcaattcccgcactgctgtgcaccattttaatcttcatggaccagcagattacagcagtcataatcaataggaaggagcacaaactgaagaagggggccggctaccacctcgacttgctgatggtgggcgtgatgctgggcgtgtgttcagtaatgggtcttccctggtttgtcgctgctaccgttctcagtatcagccatgttaattcacttaaggtcgaatctgagtgctctgctccgggcgaacagcctaagtttctgggaatccgtgagcagcgtgtgacggggctgatgattttcatcttgatgggcttgagtgttttcatgacatcagtgctaaaatttatccccatgcctgtactgtatggagtgttcctgtacatgggagtgagttcccttaagggcattcaactgttcgacaggatcaagctgttcggaatgccagcaaagcatcagcctgatctcatttacctgagatatgttcccctgtggaaggtgcatatctttactgtcatccaattaacttgtctagtgctcctatgggtgataaaagtgtctgccgctgctgtggtgtttcccatgatggtcctggcactcgtgtttgtacggaaattaatggatctgtgtttcactaagcgcgaattgtcgtggctggatgacctaatgcctgaatctaaaaaaaagaaagaagacgataagaagaaaaaagagaaggaggaagccgagagaatgctccaggatgacgacgacaccgtgcacctcccatttgaaggcggatcattgcttcaaatccccgtaaaagccctcaagtattcacctgacaagcctgtaagcgttaagatctcattcgaggatgaacccagaaaaaaatatgtggatgccgagacttctctctag

SEQ ID NO: 206213 - DNA, 2403 bp, synthetic construct
  misc_feature 1..2403: note = Description of Artificial Sequence: Synthetic coding sequence
  source 1..2403: mol_type = other DNA
atggaggtggtggaggccgagaagatcgtgctgctgaccagcgccagattcctgttcctgttgctgggtcctgccggcaaggctccacagtatcatgagatcggtcgtagcattgccactctaatgacagacgaaattttccacgatgtcgcgtacaaggcgaaggatcggaacgacctattgagcggcattgacgagtttttagatcaggttacagtgctgccacccggagaatgggatccctcgattagaatcgagccgccgaaaagtgtcccaagccaagagaagcgaaaaataccggtattccacaacggtagtaccccaactcttggggagactccgaaggaggcggcccatcacgccggacctgaacttcagcgtactggacgtctgtttggaggtctgattctcgatattaagcgcaaggcgcctttctttctttctgatttcaaggatgctttgtcgctccagtgtctggcctcaatccttttcctgtattgcgcatgcatgtcacccgttattacatttggtggcttgctgggggaggcaactgagggacggatctccgccatcgagagtctctttggggcctcgctaactgggatcgcttactcgctgtttgcaggacagccgctgacaatcctgggatcaaccggccccgtcctggtttttgaaaaaatcctctataagttttgtagggactaccagctgagctatctgagcctacggaccagcattggcttgtggaccagttttctgtgtatcgtgctcgtcgccaccgatgcctcttctctcgtgtgttacattaccaggttcacagaggaggcttttgctgcattaatctgcataatttttatctacgaggctttggagaagttgttcgatctaggagaaacctatgcgtttaatatgcacaataacctggataaactgacatcttactcgtgcgtatgtacagaacctcccaacccctctaacgaaacactcgctcagtggaagaaggacaacatcaccgctcacaatatcagttggagaaatctcacggtgagcgaatgcaagaagttacgaggggtgtttctcggatccgcttgtggacatcacggtccctatattccagacgtgctcttttggtgtgtcatcctgttttttacaacattctttctgtcttcattcctcaaacagtttaagaccaagcgctacttcccaacaaaggtgcgcagcacgatctccgatttcgccgtcttcctgaccatcgtgattatggtgacgattgattatttggtgggcgtgcctagcccaaaactccatgtgcccgaaaaattcgagcctacacatcctgagaggggctggatcattagtccccttggagataatccctggtggacactccttattgctgcaattccggctttgctgtgcactattttgatattcatggatcagcagattaccgccgtgattatcaataggaaggagcataaattgaagaaaggcgccggctatcacctggatctccttatggtgggagttatgctcggcgtgtgctccgtaatgggactgccttggttcgtggcagccaccgtgttgagcataagccacgtgaacagtcttaaggtcgaatctgaatgctcagcgcccggagagcagcccaaattcctgggtatccgagaacagagggtcaccggcctgatgatctttatcctcatgggactcagtgtcttcatgacaagcgtgctgaagttcataccgatgcctgtcctgtacggagtttttctttacatgggagttagctcgctcaaaggtatccaactgttcgacaggattaaactgttcggaatgcccgcaaagcatcaaccggacttgatctatttgcggtatgtgccactgtggaaggttcacatattcacagtgatccagcttacctgtctggtgctgttatgggtcatcaaagtctcggctgccgctgtggtgttccctatgatggtgcttgctcttgtctttgtgcgcaaactcatggatttgtgcttcacaaagcgtgagttaagctggctcgacgatctcatgccagagtccaagaaaaaaaaggaagatgataaaaaaaagaaagagaaagaagaagccgagcgcatgttgcaggacgacgacgatactgttcatttgccatttgagggcgggagcctcctgcagatccctgtgaaggctttgaagtattcagtagacccctcaatagtcaacatttccgatgagatggccaagacagcccagtggaaagccctatcaatgaacaccgaaaatgcaaaggtgacaaggtcaaacatgtctcctgataaaccggtcagcgtgaagatcagttttgaggacgagcctaggaagaaatacgtcgatgctgagacctctctctag

SEQ ID NO: 206214 - DNA, 1725 bp, synthetic construct
  misc_feature 1..1725: note = Description of Artificial Sequence: Synthetic coding sequence
  source 1..1725: mol_type = other DNA
atggaggccgacggcgccggcgagcagatgcggcccctgctgacccggggtcctgatgaagaggcggtagtggacctcgggaagacaagcagtacagtgaacacaaaattcgagaaggaggaactagagtcacacagagccgtatacataggggttcacgtgcccttctccaaagaaagtcgacgcaggcatcggcatcgcggacacaagcatcaccatagaagacgcaaggacaaagagtcagataaggaggatggtagggaatcgccatcctacgacacccctagtcagcgagttcagtttatcctcgggacggaggacgacgatgaggagcacatccctcacgatctgtttactgagatggacgaactatgctaccgcgacggcgaggaatacgagtggaaggagactgcgcggtggctgaaatttgaggaggacgtggaggacggcggggacagatggagcaaaccctatgtcgccaccttaagcttacacagcctctttgagttgcggagttgtatcttaaatggtactgtcatgttagacatgagggcgtccacattggatgagatcgccgacatggtgctggataatatgattgctagtgggcagctagacgagtccattagagaaaacgtgcgcgaggccttgttgaagcgacaccaccaccagaacgaaaaacggttcacgagccggatccctctcgtgcgctcttttgccgacattggagaaggtctgagcgcctctagacacagtctgcgaaccggcctgtcagctagtaacttgtcccttaggggggaatcacccctgagcctgctcctgggccatctgctgcccagtagcagagcaggcacccctgccgggagcagatgtactacccctgttcccacgccgcagaactcccccccaagctccccaagcatctccagactcaccagtagaagctctcaagagagtcaacggcaggcaccagagcttctcgtgtccccagcctctgacgacataccaactgtcgttatccacccacctgaagaggacctcgaggccgcgcttaaaggtgaggaacagaaaaatgaggagaatgtggatctgacccccggaatcctggccagcccccagagtgcccccggtaacttggataattctaaatcaggagaaattaaggggaatggctctggcggttctcgagaaaactccactgtggacttcagcaaggtggacatgaatttcatgagaaagattccaaccggagccgaagcgtcaaatgtccttgtcggcgaagtggactttcttgaaagacctattatcgcattcgtacgattggctccagctgtcctccttaccgggctgaccgaggttcctgtgccgaccagatttctttttctactcctgggtcccgccggcaaggctccacagtaccacgagataggcagaagtatcgcgacacttatgacggacgagattttccacgacgtcgcctataaggcgaaggaccgcaacgacttactgtccggaattgacgaatttctggaccaagtgacggtcctgccacccggggaatgggatccttccataagaattgaaccccccaagtctgtgccctcgcaggagaagagaaaaattcccgtcttccacaacgggtccactcctacattgggagagaccccaaaggaggctgcacaccacgccggacccgaactgcaaaggaccggtagggtccaatag

SEQ ID NO: 206215 - DNA, 3273 bp, synthetic construct
  misc_feature 1..3273: note = Description of Artificial Sequence: Synthetic coding sequence
  source 1..3273: mol_type = other DNA
atggagcggttccggctggagaagaagctgcccggccccgacgaggaagccgtcgtcgatcttgggaagaccagttccactgtgaatactaaatttgagaaagaggagctggaaagtcatcgtgctgtgtacatcggagtccacgtgcctttctcaaaggagagcaggcgccgccatagacacagaggacacaaacaccaccaccgccgcagaaaagacaaggagagtgacaaggaagacgggagagagagccccagctacgacactccttcacagagagtacaatttatcttaggcacagaggacgatgatgaagagcacatacctcatgacctgtttactgaaatggacgagttgtgctatagggatggggaggagtacgagtggaaggaaactgcaaggtggctgaagttcgaggaggatgtagaagacgggggagacaggtggtctaagccctacgtggccactttgtcgctccacagtctcttcgaactaagatcctgtatactcaatggcacagtgatgctggatatgagggcgtctactctggacgagatcgccgatatggtcctggataacatgatcgccagcggccagctggatgaatcaatccgagagaacgtgagggaggctctgctgaaacggcaccaccaccagaatgagaagcgatttacttctaggatacctttggtccggtcattcgccgacattggaaagaagcacagcgaccctcatttattagagcgcaacggtattctggcctcccctcaaagtgccccgggcaacctcgataacagtaagtcaggtgaaatcaaagggaacggttccggtggatcgcgcgaaaacagcactgtggatttcagcaaagtggacatgaatttcatgcgaaagataccaaccggcgccgaagcttccaatgtcctagtgggagaggtggactttttagaaagacccataattgccttcgttaggctggccccagccgtgctcctgaccggtttaacagaagtgcctgttcctacaaggttcctattcctcctgctgggtcctgccggcaaagccccccagtatcatgaaattggtcgttctatcgcgacattgatgaccgacgagatcttccacgacgtggcttataaagcaaaggatcgcaacgaccttttgtcgggaatcgatgaattcttggaccaggtgactgttcttccaccaggagagtgggacccaagcataaggattgaacctccaaaaagcgtgccgtcgcaggagaaacgaaagattccagtgtttcataacgggagtacacccaccttgggggagacccctaaggaagctgcacatcacgcagggcccgagctgcaaagaactggacgcctatttggcgggctgattctcgacataaaacggaaggctccgtttttcttgagtgacttcaaggacgctctttccttacagtgtctagcatctatactgttcctgtactgcgcctgcatgtcacccgtgattacatttggtggcttactcggggaggcgaccgaaggtagaatcagcgctattgagtctctgttcggagcctcacttacggggatcgcctactcactgttcgctggccaaccactaacaatccttggctcgaccggtcccgtgctggtgtttgagaagatcctgtacaaattctgtcgcgattatcaactgtcgtatttaagcctgcggacaagtattggtctctggaccagcttcctgtgtatcgttctggtggcgaccgacgcctctagtctcgtttgctacatcacgagattcacggaagaagcttttgccgcactcatatgtattattttcatctacgaggctttggagaagctgtttgatctgggagagacatacgccttcaatatgcataataatctggataaactcacgtcttactcttgtgtgtgcactgaacctccaaacccaagcaacgagacactggcccaatggaaaaaggacaacatcacggcccataatatatcctggcggaatctgaccgtctcggagtgtaagaaactgaggggggtgtttctgggcagtgcatgtggccaccacgggccttatattccagatgtcctgttctggtgcgtgattttgtttttcactacattcttcctctcttcctttttaaagcagtttaagaccaagcgctacttcccgaccaaggtgaggagtacgatcagcgacttcgcggtgtttctcaccattgttatcatggtaaccatagactatctagtgggcgttccaagccccaagctgcacgtgcccgaaaaattcgaaccgactcatccagaaagaggatggatcatatcacctttgggcgataatccttggtggacgctgttgatagccgctatccccgccctcctctgcacaatcttgatttttatggaccagcagatcacagcggtgatcattaacagaaaggagcacaaactgaagaagggggctggataccatttggacctgctgatggtcggagtgatgctgggggtgtgtagtgttatgggcctgccatggttcgtggccgcgaccgtgctgagcatttcgcacgttaactccctgaaggtcgaaagcgaatgtagcgcacccggggaacagcctaaattcctgggtattagggaacaacgcgtgactgggttgatgatctttatcctgatgggtcttagcgtgttcatgaccagcgttctgaagtttatacccatgcctgtcctgtacggcgtattcttgtacatgggggtgtccagcctcaagggcatccagttattcgatcgcatcaagctgtttggaatgccagctaagcatcagccggacctgatctatctcagatacgtgcctctttggaaagtccacatcttcactgtgatccagcttacatgcctggtgttgttatgggtcatcaaggtgtcggctgcagctgtggtgtttcctatgatggtgttagccctcgtgttcgtgaggaagctcatggatttatgctttaccaaaagggagctgtcctggcttgatgatctcatgccagagtccaagaaaaagaaagaggacgacaagaagaagaaagaaaaggaggaagccgaacggatgttgcaggacgatgatgacacagtgcatttgcccttcgaaggcggctctcttctgcagattcctgtaaaggccctgaaatacagccctgacaagccggtctccgtgaaaatttcattcgaagatgaaccgcggaagaagtatgtggatgcagaaacctctctgtag

SEQ ID NO: 206216 - DNA, 3408 bp, synthetic construct
  misc_feature 1..3408: note = Description of Artificial Sequence: Synthetic coding sequence
  source 1..3408: mol_type = other DNA
atggaggccgacggcgccggcgagcagatgcggcccctgctgaccagagtgacctcacgggggccagacgaagaggccgtcgttgacctcggaaaaaccagtagtaccgttaatacgaaatttgagaaggaagagctggagtcccatcgggccgtgtacataggcgttcacgtcccattttctaaggaatctcgtcgacgacaccgacatcggggccacaaacaccatcacaggcgacgaaaagataaggagagtgacaaggaggatggccgggagagtccttcttatgatactccatcccagagggttcaattcatcctgggaacagaggatgatgatgaagaacacatcccccacgacctttttactgagatggatgagctgtgctacagagacggcgaagagtatgaatggaaggagactgcccgctggctgaagtttgaggaggacgtggaagacgggggagacagatggagtaagccctacgtcgcgacattatctcttcacagtctgttcgagctgcgatcttgcattctcaacggtactgtcatgcttgacatgcgcgcgtccacactcgacgagattgcagatatggtgttggacaatatgatcgcatccgggcagctagatgaaagcataagagagaatgtccgtgaggctctgctgaaacgccaccaccaccagaatgagaaacgtttcacaagtcggatccccctcgtgaggagcttcgcagacatcggtaaaaaacattccgatccgcaccttctcgaacgaaacggtatcctggcatctccccagagtgctccaggcaatctagacaactctaagtctggagagattaaggggaatggctccggagggtccagagaaaacagtacagtggacttctccaaggtggatatgaactttatgaggaagatccccactggggcagaggccagcaacgtgctggtgggtgaggtggatttcctggagaggcctataattgcatttgtgcgcctggcacctgctgttcttctaaccggtttaaccgaagttcctgtcccaacacggttcctgtttctgttgctcggtcccgctgggaaggcacctcagtatcatgagatcgggcgatctattgccaccttaatgactgatgaaatatttcacgacgtggcctacaaagccaaggacagaaacgatcttctgtccggaattgacgaatttctggaccaggtaacagtccttccacccggggagtgggacccatccatcagaatcgaacccccaaaatctgtgccgagccaagagaagagaaagatccctgtgttccataatgggtccacccccaccctgggagagacccccaaagaggccgctcaccacgccggccctgaattgcaaagaactgggagactgttcggagggctgatcctggatataaaaagaaaagctcctttctttctctcagacttcaaagatgctctttcgctgcagtgtctggcttcaatcctgttcctgtattgtgcatgcatgagtcccgttataacattcggcggactgctgggggaggccactgagggacgcatctccgcaatcgaaagcttgtttggcgctagtttgacgggaatcgcctactctttgttcgcaggtcagcccctgaccattctaggatctaccggtcctgtccttgtttttgagaaaatactgtataaattttgtcgcgactatcagctgtcttacctgtcactcaggacctccatcgggctgtggacaagcttcctgtgcatcgtccttgtggccacagacgcatcaagcctggtgtgctatattacacgctttaccgaagaggcattcgccgcactgatctgcattatctttatctacgaagctctggaaaagctctttgatctcggagagacctacgccttcaacatgcacaacaatctcgataagctcacctcatactcctgcgtgtgcactgaaccgccaaatcctagcaatgagactctagctcaatggaagaaggataatattactgcccataatattagttggcggaacctgacagttagtgaatgcaagaagttgagaggtgtgttcctagggtctgcttgtggccatcacggaccttatattcccgatgtcttgttttggtgtgtgattctcttctttacaacattcttcttgagtagctttctaaaacaattcaaaacgaaacgttatttccctaccaaggtgagatcaaccatcagcgattttgccgtgttcctaactatagtcattatggtgacgatcgattatttggtgggcgtcccgagccctaaactgcatgtgccagaaaaatttgagccaacccatcctgagagaggatggatcatcagccccttgggtgataatccttggtggactcttctgatcgccgctatcccagccctgctctgcacaattcttatcttcatggaccagcaaattacagccgtgattatcaatagaaaggagcataagctgaaaaaaggagccggctatcacctggacttgctcatggtgggcgtgatgttaggagtgtgcagcgtcatggggctgccatggttcgttgcggcgaccgtccttagtatcagtcacgtcaacagtctgaaggttgaatccgaatgttctgcaccaggagagcagcctaaatttctgggcattcgagagcagagagtgacgggcctgatgatttttatccttatggggctgagtgttttcatgacctctgtgctgaagtttatcccaatgccagttctgtatggtgtctttctgtatatgggagtctcttcactgaagggcatccaactgtttgacagaatcaagctgtttgggatgcctgccaagcatcagccggatcttatatacctcaggtatgtccccctgtggaaggtccacatttttacggtaattcagcttacttgcctggtactgctgtgggtcatcaaagtatcagccgccgccgttgttttccccatgatggtcttagcgctggtcttcgtgcggaaattgatggatctatgtttcactaagagggaactgtcctggttagacgatttaatgcctgaaagcaaaaaaaagaaggaagacgacaaaaagaaaaaagagaaggaggaggcggaacgtatgttgcaggatgacgatgacactgttcatctacctttcgagggcggaagtctcctacagatccccgtcaaggctcttaaatactcggtggatccgagtatcgtcaacatatccgacgagatggcgaaaaccgcacagtggaaggccctgtccatgaacacggagaatgctaaagttaccaggtcgaacatgagccctgataaacctgtgagtgttaagatctcttttgaggatgaacctaggaagaaatacgtggacgcagaaaccagcttgtag

SEQ ID NO: 206217 - DNA, 3288 bp, synthetic construct
  misc_feature 1..3288: note = Description of Artificial Sequence: Synthetic coding sequence
  source 1..3288: mol_type = other DNA
atggaggccgacggcgccggcgagcagatgcggcccctgctgacccggggtccagacgaggaggccgtggtcgatctcggaaaaacttcaagcacggtaaatactaaattcgagaaagaagagctggagtcacatcgggctgtctatatcggagtgcacgtccctttctctaaggaaagcaggcggcgccatcgccacagaggacataagcatcaccaccgaagacggaaggataaggaatccgataaggaagacgggcgagaatccccgtcctatgacactccctcccaaagggtgcaattcatcctggggaccgaggatgatgatgaagagcatattccccatgacctctttaccgagatggacgagctctgttacagagatggtgaagaatacgaatggaaagaaaccgctcgttggttgaagttcgaggaggatgttgaggacggcggcgataggtggtctaagccatatgttgccactctgagtttacactcactgttcgagctgcgaagctgcattctaaatggtactgtgatgttggacatgagagccagtaccctagatgaaatagcagacatggtgctggataacatgattgccagcggccagctcgacgaaagcatccgcgagaatgtgcgcgaagccttgctcaagcgacaccatcatcagaatgaaaagaggtttactagccgaattcctttggtcaggagtttcgctgacatcggaaagaaacacagcgaccctcatctcctcgaacgtaacggtatactcgcctcacctcagtccgccccaggtaatcttgacaactccaagagcggggagataaaaggcaacgggtcagggggatcccgagagaattctaccgtggatttctccaaggtcgacatgaattttatgagaaaaatccccacgggcgctgaggccagtaacgtcctggtcggggaggtggacttcctggaaaggcctattatagctttcgtcagactagccccagcagtacttttgaccggcttgacagaggtccccgtccctacgcgatttctgttcctgctcctgggcccagcaggcaaggcacctcagtatcacgaaatcggccgcagcatagccacattaatgaccgacgagatcttccacgatgtcgcctataaggctaaagatcgcaatgacttgcttagcggcatcgatgagtttctggatcaggtgactgtgttaccacctggtgagtgggatcctagtatcagaatagagcctccaaagtcagtgccctcccaggaaaagagaaaaattccagtttttcacaacggcagtacccctactctaggcgagacgccaaaggaagctgcccaccacgctggccctgaactccagcgcacggggaggttatttggaggactcatcttggatattaaacgtaaggccccttttttcctttccgattttaaggacgccctgtccctgcagtgcctggcatctattttatttctgtattgcgcctgtatgtcccctgttatcacattcgggggcctcttaggagaggcgactgaagggcgcatcagcgccattgagagtctctttggagcctccctcacaggaatcgcctactctctttttgcaggtcagcctttaaccatccttggtagcaccggccctgtcctggtttttgagaaaatcctgtacaagttttgtcgagattatcagctatcctacctcagtttgcggacttcaattggtctgtggacatctttcctgtgtatagtgctcgtggcaaccgatgcctcttctttggtttgctatataacacgcttcacagaagaagccttcgccgcattgatatgtattattttcatatatgaggccctagagaaactttttgatttaggggaaacatatgcatttaatatgcacaataacctcgacaaactgacatcttattcctgcgtctgcacggaacctcctaaccctagcaatgagactctggcgcaatggaagaaagacaacattaccgcccataacatatcttggcggaatctgactgtgtccgagtgtaagaagctgcgtggagtcttcctgggatcagcctgtgggcaccatggtccttacattcctgatgtgttattctggtgcgtgatcttattctttaccacctttttcctctcttcgtttcttaagcagtttaagactaaaagatactttcctaccaaagtcaggtctaccattagcgatttcgccgtttttctgaccattgttataatggttacaatcgactacttggtcggcgttccctcccccaaattgcatgttcccgagaagttcgagcctactcaccccgagcgtggttggataatctcgccactgggggacaacccttggtggactttgctgatcgccgctattccggcactgctttgcacaatcttaatctttatggaccagcagatcacagccgtcatcatcaataggaaggaacataaactgaaaaagggagctggatatcacttggacctgcttatggtgggagtgatgcttggtgtgtgctccgtcatggggcttccatggttcgtagctgcaactgtgttgtcaatctcacatgtgaactcgttgaaagtcgagtcagaatgttcagcccctggcgagcagccgaaattccttggtatcagagagcaacgcgtcaccgggctgatgatctttatcctcatggggctgtcagtatttatgacctccgtgttaaaattcatcccaatgccagtgctgtacggcgtttttctgtatatgggtgtgtcttcccttaaaggaattcaactcttcgatcgcattaaactcttcggaatgcctgcaaaacatcagcccgatctaatctatctccggtacgtgcccctgtggaaagtgcacattttcactgtgatccagctaacctgcctggtcctactttgggttataaaggtgtcagcggctgcagtcgttttcccaatgatggtgctcgccctggttttcgtaaggaaattgatggacctgtgctttaccaagagagaattgtcttggcttgacgaccttatgcctgagtccaaaaaaaagaaagaagacgacaagaagaaaaaggagaaggaagaagctgagcggatgctccaggatgatgacgataccgtgcatctcccctttgaaggaggcagccttctgcagatcccagtaaaagcccttaaatacagtcccgacaaaccagttagcgtgaagatctccttcgaagatgaacccagaaagaaatacgtcgatgctgagacttccctttag

SEQ ID NO: 206218 - DNA, 1392 bp, synthetic construct
  misc_feature 1..1392: note = Description of Artificial Sequence: Synthetic coding sequence
  source 1..1392: mol_type = other DNA
atggaggccgacggcgccggcgagcagatgcggcccctgctgacccgtgggccagatgaggaagccgttgtggatcttggtaagacatcatctaccgtgaatactaaatttgaaaaagaagaacttgaatcccacagggctgtgtatatcggcgtccatgtcccgtttagcaaggaaagtcggcgacgacatcgacatcgtggacataagcaccatcaccggcgtagaaaggacaaggaatctgacaaagaagacggtcgtgaatccccatcatatgataccccatctcaacgagtgcagtttattttaggtaccgaagatgatgatgaagagcacataccacacgaccttttcactgagatggacgagctatgctatagagacggtgaggaatacgagtggaaggaaaccgcacgatggcttaagttcgaggaggacgtggaggatggcggcgacagatggtccaagccatacgtggcaactttgtccctccattcgctcttcgaacttcgaagctgcattttgaacggcaccgtcatgcttgatatgagagcctctaccctggatgagattgcggatatggtcctggataatatgatcgctagcggtcagctcgacgaaagtattcgcgaaaacgtgcgcgaggccctgctgaaaagacatcatcatcagaatgaaaagaggtttacttctcggatcccactcgttcgtagcttcgcggatattggtaaaaaacattccgaccctcatctgctggaacggaacggcatcctggcgagtccgcaatcagcgcctggaaatctagacaactcaaagtccggtgaaatcaagggaaacggcagtggcggatccagggagaatagtacagtggacttcagtaaggtggacatgaatttcatgaggaaaattccaactggggcggaggcatcaaacgtgctcgttggggaggtggattttctggaacgacccataattgctttcgtacgcctcgccccagcggtgctcttgacaggcctcaccgaagtccctgtgccaaccagattcctatttctgctgctaggacccgcaggtaaagctccccagtaccacgaaatcggaagaagtatcgccacactgatgactgatgagatcttccatgacgtggcctacaaagccaaagatagaaatgatctgttatcggggatcgatgaatttctggatcaggtgactgttctgcctccaggtgagtgggacccatccatacggatcgagcccccaaagtccgtaccctcacaggagaaacgcaagatccctgtgtttcacaatgggagcactccgactttgggcgagacacctaaggaggcagcccatcacgccggccccgagctgcagcgcactggcagggtccaatag

SEQ ID NO: 206219 - DNA, 1725 bp, synthetic construct
  misc_feature 1..1725: note = Description of Artificial Sequence: Synthetic coding sequence
  source 1..1725: mol_type = other DNA
atggaggccgacggcgccggcgagcagatgcggcccctgctgaccagggggcctgacgaggaggcggtggtcgatttgggaaagacatccagcaccgttaacacgaaattcgagaaggaggagttagagtcccatagagcagtgtacattggagtgcacgtccccttctctaaagaatctaggcgacggcaccgccatcgcggacataagcaccaccaccggaggcgtaaagacaaggaatcagacaaagaggatggtcgcgagagtcccagctatgatacccctagccaaagagtccagttcatattgggaacggaagacgatgacgaggaacacatccctcacgacctctttactgagatggacgagctgtgttatagagatggagaggagtacgagtggaaagaaactgcccgctggctgaagttcgaagaggatgtggaggacggcggcgacaggtggtccaaaccctacgtggcaacactgtcactgcactccctcttcgagctgagatcctgtatcttaaacggcactgtgatgctcgacatgagagcaagcacccttgatgaaatcgctgacatggtgctggataacatgattgcttcgggacagctcgatgagtccatacgcgaaaatgtgcgtgaggctctgttgaagcgccaccatcaccagaacgagaagcgatttacatctagaatcccactggtgcgaagtttcgcagatattggcgaggggctgtccgcatcacggcattccctgagaactggactctctgcctccaatctatctttgcgtggcgaaagcccactctcattgctgttaggacacctgctccctagctcaagagccgggacacctgctgggagcaggtgtactacccctgttccaacccctcagaactccccaccttcctctccgtcgatcagtcgcctgacatcgagaagcagccaggaatcacaaaggcaggcgcccgaactccttgtgtccccagcctctgatgatatccctaccgtggtgattcatccccctgaagaggacttggaagctgccttgaagggagaggaacagaaaaatgaagaaaatgtggacctgacccctgggattctcgcttccccgcagagcgcacctggaaatctagacaactccaagagcggcgagatcaaaggtaacgggtcaggagggtcccgcgaaaactcaaccgtcgactttagtaaagtggacatgaactttatgcgtaagattccgacaggagctgaggccagcaacgtattggtgggcgaggttgatttcctggagaggccgattatcgcattcgttagactggctcctgctgttctgctgactgggctgaccgaggtgcctgtaccaacaaggttcctgtttctgctgctcggcccagcgggcaaggccccgcagtaccatgagatcggcaggagcatcgcaacccttatgaccgacgagatcttccacgacgttgcctacaaggccaaagacaggaatgacctgctgtccgggatcgatgaatttctggatcaggtcactgttctgcctcccggggaatgggacccctcaatcaggatcgagccaccaaagtccgtgccatcacaggaaaagaggaagatacctgtgtttcacaatggctccacccctaccctcggagagactcccaaagaagccgcccatcacgctggcccggagctacagaggaccgggagggtacagtag

SEQ ID NO: 206220 - DNA, 3741 bp, synthetic construct
  misc_feature 1..3741: note = Description of Artificial Sequence: Synthetic coding sequence
  source 1..3741: mol_type = other DNA
atggaggccgacggcgccggcgagcagatgcggcccctgctgaccagagtgacgagcagaggtcccgatgaagaggccgtcgtggacctcggcaagacaagtagcacagtgaatacaaaatttgaaaaggaagagctggagagccacagggctgtatacattggtgtgcatgtacccttctcaaaggagagcagacgccgacatcgccatagagggcataagcaccaccatcgccgaaggaaggacaaagagagcgataaggaggatgggcgggagagccccagttacgacaccccttctcagcgtgtgcagttcatcttaggcaccgaggacgatgatgaagaacatatcccacacgacctgttcaccgagatggacgagttgtgctaccgcgacggggaggaatacgagtggaaggagaccgcaagatggctgaagtttgaggaggatgtcgaggacggaggtgacagatggtcaaagccctatgtagctaccctgtctctacattccttgttcgaactgcgatcctgcatcttaaacggcacagtgatgcttgacatgcgggcgtccaccttggacgagatcgccgacatggtgttggataacatgatagcttcgggtcagcttgacgaatccattcgtgaaaatgttagagaggcactgctaaagcggcatcatcaccagaatgaaaaacgatttaccagccggatacctctggtccgatcattcgccgatatcggagaagggctgagcgcaagccggcactctctcagaactgggctctctgcatcaaatctcagtctgcgtggggaatctccattgtctctcctacttggccatctactgcctagctcaagggccggcacccctgctggctcaaggtgcactactcctgtgcctaccccccagaattcccccccatcctccccatcgatctccaggctgaccagccgctcgtcccaggagagtcagaggcaggcccctgaattgcttgtcagcccagcaagtgatgacatacctacagtggttatccatccacccgaggaggacttagaggcggcactgaagggtgaggagcaaaagaacgaagaaaatgtagatctgacgcccggcattctggcatctccacaatcagcccccgggaatctcgacaacagtaagtcgggcgaaattaaagggaatggatcaggcggcagtcgcgagaatagtacggtggatttcagcaaagttgacatgaactttatgagaaaaattcctaccggcgcggaagcctctaatgtgctggtgggcgaggtggatttcctggaaagacctatcattgcctttgtgaggttggcgcccgccgtcctgttgactgggctgaccgaagtgccggtccccacaaggtttttattcctgctgttgggcccagccggcaaagctccccaataccacgagatcggcagaagtattgcaacgcttatgacagatgaaatcttccatgacgttgcctataaggcaaaagacaggaacgacctgctgtccggcatcgacgagtttctggatcaagtgacagtgttgcctccaggcgaatgggaccccagcattcggattgaacctcccaagtctgtgccgagccaggagaaacgaaagatccctgttttccacaatggatcaacaccaaccctcggggaaacccccaaggaggccgcacatcacgcaggccctgagctgcagaggaccggccgtctgtttggtggacttatcctggatattaagcgtaaagctccatttttcctgagtgattttaaagacgcactttctctgcagtgtctggcctcgattctgttcttatactgcgcctgtatgagtcccgtaattacattcggtggactcttaggggaagctacggaaggacgtatctccgctattgagtccctgttcggggcatccctcaccgggattgcgtactctcttttcgccggtcaaccccttacaatcctcgggtcaacaggcccagtgctggttttcgagaaaatcctgtataaattctgccgtgattatcagttgtcatacttgagtctgcgcacttctattggcctgtggacatcatttctttgtatcgtccttgtggcaactgatgcttcatccctggtttgttacattacccgttttactgaagaggcattcgctgcactgatatgtattatttttatctacgaagcgctcgaaaagctgtttgatctgggcgaaacttacgcattcaatatgcacaacaatctcgataagctgactagttactcctgcgtgtgtactgaacccccaaacccatccaacgagacgttggcgcagtggaaaaaggacaacattaccgcccataatatctcctggaggaacctgactgtgtctgagtgcaagaagctacgcggcgtgtttctcgggtcagcttgcgggcaccatggaccatacattccagacgtgctgttctggtgtgttatcctattttttactacgttcttcctgtcaagctttctgaagcagtttaaaacaaagcggtactttcctacgaaagtcaggtctaccatttcagactttgcagtctttctcactatcgtgatcatggtgacaattgattaccttgtgggtgtcccaagtcccaagctgcacgtgccagaaaagttcgagcccacacatccagaacgggggtggattataagtcctctgggcgataacccttggtggacactgctgattgcagccataccggccctcctgtgcacaatccttatttttatggatcagcaaataaccgcagtgattattaaccgcaaagaacacaaactgaagaagggcgctggttatcacctcgacttgctgatggttggggtcatgctgggggtctgtagtgtgatgggactgccatggttcgtggccgctaccgttctgtccataagtcacgtgaactcactcaaggtggagagtgagtgtagtgcccccggagaacaacccaagtttctaggaatcagggagcagcgagtcactggacttatgatcttcatactaatgggactctccgtgtttatgacctccgtgctgaagttcatcccaatgccagtactgtatggagtcttcctgtatatgggggtctcctcccttaagggtatacagctgttcgacagaatcaagttattcggaatgccagccaagcatcaacccgatctgatttatttgaggtatgtacctctgtggaaggtgcatatcttcactgtgattcagctgacatgcctggtgctgctgtgggtcatcaaggtttccgctgctgcagttgtgttcccaatgatggttctggccctcgtctttgtccggaagctgatggacttgtgctttaccaagcgtgagcttagctggctggatgatctgatgccggagagcaaaaagaaaaaggaggacgacaagaagaagaaggagaaggaagaagcagagcggatgctgcaggacgatgacgacacagtccacttgcctttcgaaggggggtccctgctgcaaatcccagtcaaggccctgaaatactccgtcgacccgtcaattgtaaacatctctgatgaaatggccaaaaccgcccagtggaaagctctgtccatgaacactgagaatgccaaggtcacacgcagcaacatgtccccagacaagcctgtttccgtaaagatttcttttgaagacgagccccgcaaaaaatatgtcgacgccgagacttccctgtag

SEQ ID NO: 206221 - DNA, 3780 bp, synthetic construct
  misc_feature 1..3780: note = Description of Artificial Sequence: Synthetic coding sequence
  source 1..3780: mol_type = other DNA
atggaggccgacggcgccggcgagcagatgcggcccctgctgacccgcgtcaccagtagggggcccgatgaagaggccgtggtggatttaggtaagacgtccagtactgtgaatacaaaattcgagaaggaagagctggaaagccacagagccgtgtacatcggagtgcatgtgcccttctcaaaagaaagcagaagacgccacaggcacaggggccacaagcatcatcacaggagacgaaaggataaagaatctgacaaggaggacggcagggagagcccatcatatgacacacccagccagcgagtgcagttcatcctcggaactgaggatgacgatgaagaacacattcctcatgatctgttcaccgaaatggacgagctgtgttatcgcgatggggaggagtatgaatggaaagagactgccaggtggcttaaattcgaagaggacgtcgaggatgggggagacagatggagtaagccttatgttgcaactctttccctgcacagcttgttcgagcttaggtcatgcatactgaatggcaccgtgatgctcgacatgcgtgccagtactctggacgagatcgctgacatggtgctggacaatatgatagcgtcaggccagctggacgagagtatccgggaaaacgtgcgggaggcactgctgaagaggcatcatcatcagaacgagaagagatttacgtccagaatcccgctggtacgctcctttgccgacattgggaagaagcattccgacccccacctcctggagagaaacggcgaaggcctcagtgccagtcgtcattcactcagaactgggctctcagcaagcaacctgtcgctccgcggcgagagcccactgagtcttctacttggacacctgctgccatcctccagggcagggacacctgctggaagccgctgtaccacccccgtgcccactccccagaactcacccccttcctcgccctcaatcagtcggctgacctctcggtcttcgcaggagtcgcagcgacaggcccccgaattgctggttagcccggccagtgatgacattcctacagtggtaattcaccctccagaagaagacctcgaggctgcactcaaaggcgaggagcagaagaacgaggagaatgtggatctgaccccaggcatcctggcttcgccgcagagcgccccaggcaacttagataattccaaaagtggagaaatcaaggggaatggaagtggggggtcaagagagaacagtaccgtcgacttctccaaagttgatatgaacttcatgcggaagatcccaacaggagccgaagccagtaatgtactggtgggggaagtagatttcctcgagaggccgatcatcgcctttgtgcgcctggcccctgcggtcctgctgacaggccttaccgaagttcctgtgcctacacggttcctatttttgctgctggggcctgcaggaaaggcccctcagtaccacgaaataggacgctcgatagctacactcatgacagatgagattttccatgatgtggcatataaggcaaaagaccggaacgatcttctaagtggaattgacgagtttctggatcaggtaaccgtgctgccacccggagaatgggatccttcgattcgaatagagccacctaaatctgtgccttctcaggagaagagaaagatccccgtttttcacaatgggtcaactcccacactcggggaaacacctaaggaagcagctcaccacgccggcccagagctccagcgcactggcaggctgttcggggggctgattctggatatcaaacggaaagcccctttctttctctcagacttcaaagacgccctaagcttacagtgcctggctagtattttgttcctgtattgtgcctgtatgtccccagttatcacatttggtgggcttttgggcgaagcaactgagggcagaattagcgccatcgagtcgcttttcggggccagtctgacaggtatagcctattctctgttcgcaggccaacccctgactatccttggctcaaccgggcctgtgttggttttcgaaaaaatcctgtataagttctgccgagattatcaactcagttacttgtctttgaggactagcattggactttggacttcatttctgtgcattgtacttgtggcgacggatgcctcctctctggtgtgttacataactcggtttacagaggaggccttcgccgcgctaatctgtatcatttttatatacgaggctttggaaaagctattcgatctgggcgaaacctatgcgttcaacatgcataataatctggataaactgaccagttactcttgtgtatgtacagagcccccgaatccatcaaacgagaccctggctcaatggaaaaaggataacattaccgcacacaatatttcctggcggaatctgactgtcagcgaatgcaaaaaactgagaggggtgtttctgggcagtgcctgcgggcaccacgggccctacattcccgatgttctgttctggtgtgtcatcctcttttttacaacgttcttcctgtccagcttcctcaaacagtttaaaacaaagagatattttccaactaaggtccggtcgacaatctccgattttgccgtctttctgactatcgtgattatggttacgatagattatctcgtgggtgtgccgtcaccaaaattgcacgtaccagaaaaatttgagcccacccaccccgagagaggctggattatctcacccctcggggacaacccttggtggacactgctcatcgcagccataccagccctattgtgcaccatcctgatctttatggaccagcagataacagccgtaattattaaccggaaagagcacaaattgaaaaaaggagcagggtatcacctcgacttgcttatggtgggggtgatgctgggggtctgcagcgtgatgggactgccttggttcgtggctgcaacggtcctctccataagtcacgtaaatagcctcaaagtggagtcggaatgtagtgcacctggcgagcagcctaaatttcttgggattagagaacagagagtcaccggtctcatgatctttattctgatgggactgtctgttttcatgacgagcgtgctgaaattcatccctatgcctgtgctatacggcgtcttcttatacatgggagtaagctccctaaagggcatccagctgtttgatcgcattaagttattcggcatgcctgccaaacaccagcccgacctgatatatctacggtatgtaccgctgtggaaggtgcacatcttcaccgtgatccagctcacctgcctggtgttgctgtgggtcatcaaggtgagcgccgctgcggtggtgtttccaatgatggtgctggccctcgtctttgtccgcaaacttatggatctctgcttcactaaacgcgaactctcgtggctcgatgacctcatgcctgaatccaaaaagaaaaaagaggatgacaagaagaagaaagagaaagaggaagctgagagaatgctccaggacgacgatgataccgttcaccttccctttgagggagggagcctgctgcaaatccccgttaaggccctaaagtattccgtagaccccagcatcgtgaatatttcggacgaaatggcgaagaccgcacagtggaaggccttgagcatgaataccgagaacgccaaggtcacgcgatcaaacatgtcacctgacaaacctgtgagcgtaaagatcagctttgaggacgaaccgcggaagaaatatgtagatgctgagacaagcctgtag

SEQ ID NO: 206222 - DNA, 3396 bp, synthetic construct
  misc_feature 1..3396: note = Description of Artificial Sequence: Synthetic coding sequence
  source 1..3396: mol_type = other DNA
atggaggccgacggcgccggcgagcagatgcggcccctgctgaccagaggccctgacgaagaggcagtggttgaccttggcaaaacatcgtccacagtgaataccaaatttgaaaaagaggaactggagtcccacagagccgtctatatcggggtgcacgtgcccttttctaaggagtccagacgcagacataggcaccgggggcataaacatcatcataggaggcgtaaagataaagaaagcgacaaggaggatgggagggagagtccttcctacgataccccttctcagcgagtgcaatttattctcggaaccgaggatgacgatgaggaacacattccacacgatctcttcacagaaatggacgagttatgttaccgagatggcgaggagtacgaatggaaagaaacagctagatggctcaaattcgaagaggacgtggaagacgggggcgatcggtggagtaagccctatgttgcaaccctgtccttacactcactgttcgaacttaggtcgtgcatcctgaatggcaccgtcatgctggacatgcgggcctccaccctggatgagatagctgacatggtgctggataatatgatcgcctcggggcagttagatgagtcaattcgggagaacgtgagagaagctctgctgaagcgccatcaccaccagaacgagaaacgctttaccagccgcattccgttagtgcgctcattcgcagacatcggtaagaagcactcggacccacacctactggagcggaacggcatcttagcctcccctcagtcagcccctggaaatcttgataattcaaaatccggtgagataaaagggaatggtagcggtgggtcccgcgaaaactcaacagtcgatttctctaaggtggacatgaactttatgagaaagatccccaccggcgctgaggccagtaacgttcttgtgggagaagtggactttctagaaagaccaattattgccttcgtgcgcctcgctcccgccgttctcctgactggcctaactgaagtgccagttcccacccgattcctgtttcttctccttgggcccgctggcaaagcaccacagtaccacgaaatcggtaggagcattgccacattgatgactgacgagatcttccacgatgttgcctataaggctaaggataggaacgacctgctgtctggcatcgatgaattcctggaccaggtcactgttctgcccccaggcgagtgggatcctagtatccgaatagaacctcctaagtctgtccctagtcaggagaaacgaaaaatccctgttttccataatgggtctactccgaccctcggcgagacacctaaagaagccgctcaccacgcaggcccagaacttcagaggacagggaggctcttcggcggcctcattttggatatcaaacgcaaagctccgttttttctgtctgacttcaaggatgcactgtccctccagtgcctggcttccatattatttctttactgtgcatgtatgagcccagtaatcacattcggtgggcttcttggggaggccacagaggggcgcatttctgcgattgaatccttatttggagcatcactaaccgggatcgcctacagcctgtttgccggacagcctctaacgatactgggcagtactgggccggtgctggttttcgagaagattctctacaaattctgtcgggattaccagttgtcttacctttcccttagaacatccatcgggctctggacctccttcctctgcatcgtgctggtagccaccgacgctagctctctcgtgtgctacattaccaggttcacagaagaggcattcgcagctcttatttgcattatctttatttacgaagcgctggaaaaactcttcgaccttggtgaaacttatgcattcaacatgcataataatcttgacaaactgaccagttactcttgtgtatgtactgagccccccaacccctctaacgagactttggcgcagtggaaaaaagacaatattaccgctcataatatttcttggcgcaatttgaccgtctccgagtgcaaaaagctgcgtggggtttttcttggctcggcctgcggccaccatggcccgtatatccctgatgtgcttttctggtgcgtgattctcttcttcacaacctttttcctcagtagtttcctgaagcagttcaagaccaagcgatattttcctaccaaggtgagatccaccatctccgactttgccgtttttctgactatagttatcatggtgacaatcgactatttggttggagtacccagtccaaaactccatgttcccgagaagtttgagcccacccatcccgagaggggatggatcatatccccactgggtgataatccctggtggactttgcttattgctgcaattccggccttgttgtgcaccatattgatattcatggatcagcaaataacagccgttattattaatcggaaggaacacaaactcaagaagggcgccggctaccacctagacctactgatggtgggagtgatgctcggggtgtgcagtgtaatgggcctgccttggttcgtcgcggcaacggtgctgagtatctctcacgtgaattctctgaaggtagagtccgaatgcagcgcccccggtgagcagcctaaattccttggtatcagggaacagcgtgtcaccggcctgatgatcttcattctgatggggctgtcagtgttcatgacgagcgtgctcaaatttatccccatgcctgtgctctacggcgtgtttttgtatatgggagttagctccctgaagggaatccagctgtttgatcgaatcaaattgttcggtatgcccgcaaagcaccaaccggacctcatatatctgagatacgtacctctgtggaaggttcacatattcaccgtcattcagctcacctgtctggtacttctgtgggtaattaaagtcagcgcagcggccgtagtgtttcccatgatggttctagcattagtgttcgtgcgtaaacttatggacttgtgctttaccaaacgggagctgtcgtggttggatgacctaatgccagagagtaagaagaagaaggaggacgacaagaagaagaaggaaaaggaagaggctgagcgaatgttgcaggatgatgacgataccgtgcacctgccattcgaaggtggctccctgttgcagatccccgttaaggccttgaaatacagcgtcgatcctagtattgtgaatatttcggacgagatggctaaaaccgcccagtggaaagcgctgtcgatgaacacggagaacgccaaggttaccagatctaacatgtcaccagacaaaccagtttccgtgaagatcagttttgaggacgagccccgcaaaaagtatgtggatgccgagacttctctttag

SEQ ID NO: 206223 - DNA, 1392 bp, synthetic construct
  misc_feature 1..1392: note = Description of Artificial Sequence: Synthetic coding sequence
  source 1..1392: mol_type = other DNA
atggaggccgacggcgccggcgagcagatgcggcccctgctgaccagggggccggacgaggaggccgttgtggaccttggaaaaaccagctccactgtaaataccaaattcgagaaggaagaactggagagccaccgcgccgtatacattggagtgcatgtgcctttctcaaaagaatcaagacgtagacaccgacataggggtcacaaacaccaccatagacgcagaaaggataaagagtcggataaagaggatggccgcgagtctcccagctacgatacccccagtcagcgagtgcagtttatcctcggaacggaagatgacgatgaggaacatattccccatgatctgtttaccgaaatggatgagctgtgttatagggacggcgaggagtacgagtggaaagaaacagccagatggctcaaattcgaagaggacgtggaggatgggggcgatcgctggagcaagccttacgtggccacgctgagtctgcacagcctgtttgagctccgctcttgcattctgaacggcacagtgatgctggacatgcgcgcatccaccctggatgaaatcgctgatatggtgttagacaacatgatcgcgagtgggcagctcgacgagtcgatccgcgaaaacgttagggaggctcttctgaaaagacaccaccaccaaaacgagaaacgctttactagccggatcccgctcgtcaggagcttcgccgatattggaaagaaacacagcgacccccatttgctggaaagaaatggcatcctggcctccccacagtccgcgcctgggaaccttgataattcaaagtctggagaaattaaaggcaatggctccggcggatcacgggagaattcaactgtcgatttcagtaaggtggacatgaatttcatgcggaaaatcccgaccggagccgaggcatctaatgtgttggttggcgaggtcgatttcttagaaagaccaataatcgctttcgtccgactggcgccagccgtgctcctcactggcctcactgaggttccagtaccaacccggtttctcttcctgcttctgggaccagctggcaaggctccgcagtatcacgaaatcggaaggagtatcgcaactctgatgactgacgagattttccacgacgtcgcctacaaggcaaaggacagaaacgatctcctatcgggaattgatgagtttctggatcaggtgaccgtgcttccccccggtgagtgggacccgagtattcgcatcgaacccccaaagtccgttccaagccaggagaaaagaaagattccagtatttcataatggatccacacccacccttggagagactcccaaagaggccgctcaccacgcgggcccagagttacaacgcactggaagagtgcagtag

SEQ ID NO: 206224 - DNA, 3135 bp, synthetic construct
  misc_feature 1..3135: note = Description of Artificial Sequence: Synthetic coding sequence
  source 1..3135: mol_type = other DNA
atgcccgccgccggcagcaacgagcccgacggcgtgctgagctaccagcgtcccgacgaggaggcagttgttgatcaaggtgggaccagtactatccttaacattcactacgagaaagaagagctagagggacaccggaccctgtatgtgggcgtgaggatgcccctgggacggcagagccatcgccatcatcgcacccacggccagaagcacagacgcagaggccggggtaaaggagcctcgcaaggtgaggagggacttgaggctctcgcccacgataccccaagtcaacgagttcaattcattctgggaaccgaagaagacgaagaacacgtcccccacgagttgttcacagagctggacgagatttgtatgaaggagggtgaggacgcagagtggaaagagacagctcgctggcttaagtttgaggaagacgtcgaggacggtggtgagcggtggtcaaagccatacgttgcaactctgtctctacacagtttgttcgagctgcggtcctgcctgatcaatgggacagttctgcttgatatgcacgcgaattctattgaggagatctctgacctaattctagaccagcaggagttgtcttccgacctgaatgactccatgcgggtaaaggtgcgggaagctctactcaagaagcaccatcaccagaatgaaaagaagagaaataatttgatacccattgtgcggtcttttgccgaggtcggaaagaaacagagcgatccccacctgatggataagcacggacagaccgtgagtccacagtctgtcccaactactaatcttgaggtgaagaatggagtcaactgcgaacactccccagtggacctctccaaggtggatctgcacttcatgaagaagatcccaacaggcgccgaggcgtcaaacgtgttggtgggcgaggtagatatcctggaccgtcctattgtcgcttttgtcaggttaagtcctgctgtcctcctgtccggccttacagaggtcccaatacctacccgcttcttattcattctgttaggtcctgtaggaaagggccagcagtaccatgagatcggccgatctatggcaactatcatgaccgatgagatcttccatgacgtagcttacaaagcgaaagaaagggatgacctactagccgggatagacgagtttctggatcaggtcactgtcctgccgccgggcgagtgggacccttccattcgcatcgagccccctaaaaatgtgcccagccaggaaaagcgaaaaatgcccggtgtgccaaacggaaacgtatgccacattgagcaggaaccgcacggagggcactccggccctgaactgcagcgcaccggccgcctgtttggtggactggtgctggacatcaaacggaaggccccttggtattggagcgattaccgcgatgctttgagtcttcaatgcctggctagcttccttttcctgtattgcgcttgcatgagccctgtaattactttcggggggttactgggcgaagcaaccgagggtcgaatctctgcaatcgagagtttgtttggagcttccatgaccgggattgcctacagtctttttgctggtcaggctctgaccatcttaggctcaacggggccagttttggtcttcgagaaaattctgtttaaattttgcaaggattacgccctctcttatctgagcttgcgcgcttgtatagggttgtggacagccttcttgtgtatagtcctggtggcaacagacgcatcatcactggtatgttacataaccagatttactgaagaggcctttgcttccctgatctgcattatttttatttatgaggctattgaaaaactgatccacctagccgagacatatcctattcatatgcattctcaactggaccacctgagcctgtattactgccggtgcacactacccgaaaaccccaataaccatacattgcaatattggaaggaccataacatagtgactgcagaagtgcactgggcaaacctcacggtatccgagtgtcaggaaatgcacggcgagttcatgggcagtgcatgtgggcatcatggcccatacacccctgacgtgctgttttggtcttgcattttattctttacaactttcatcctatcctccactctcaaaacgttcaagacctccagatattttccgacacgggtacgctccatggtttctgattttgccgtcttcttgacaattttcacaatggtcattatcgactttctcattggggtcccatctccaaaactacaggtgccgtctgtttttaaaccaaccagagacgatagaggatggattatcaatcccattgggccaaatccatggtggacagtgatcgctgctatcatccctgccttgttatgcactattctcatttttatggatcagcaaatcactgcggtgataataaaccggaaagagcacaaactcaaaaagggctgtgggtatcacttggacctcctgatggttgctataatgctgggtgtgtgctctataatggggcttccgtggttcgttgccgctacggtcctcagcatcacccatgtaaacagtttgaaactggagtcagaatgttcagcccctggcgagcaaccgaagttcctggggattagggaacaaagagtcaccgggctgatgatatttgtgctgatggggtgtagcgtgttcatgaccgctatcctgaagttcatccccatgcctgtgttatacggggtgtttctctacatgggcgtctcctctctgcagggaatacagtttttcgaccgtcttaagctctttggtatgccggcaaaacaccagcctgactttatatacctaaggcacgtcccactgaggaaagtccatcttttcaccttaatccagttgacctgtctggtgctgctgtgggtgatcaaggcctcccctgcggccattgtcttccctatgatggtgctggccttggtgttcgtccggaaggtgatggacttgtgtttcagcaagagggaattatcctggctcgacgatttaatgccggaatcaaagaagaagaaactcgacgacgcaaaaaaaaaggctaaagaagaggaggtgatcgttctggctcctaccgtgtatcttggggcctcgaactatagaacatag

SEQ ID NO: 206225 - DNA, 3216 bp, synthetic construct
  misc_feature 1..3216: note = Description of Artificial Sequence: Synthetic coding sequence
  source 1..3216: mol_type = other DNA
atgttcaacaagaacaacagcaacaagctgcggagcaccccccggtaccgcagaggagaccctggctatctgaactttaccgagctaggacccttgaagccggagcagaaggatcagtggagccagcataggccagacgaggaggcagtggtcgatcaaggcgggacatctacaatcctgaacatccactatgagaaggaagaactggagggccaccgcacattgtacgttggggtaagaatgccattggggcgtcagagtcataggcatcatagaacccacgggcagaagcatagaagaagaggccgcgggaaaggggctagtcaaggagaagaaggactggaagccttagcacatgacacgccatcgcagcgcgtgcagtttatattggggaccgaagaggatgaagaacatgttcctcatgagttgtttactgaactcgatgaaatctgcatgaaggagggagaggacgcggagtggaaggagaccgcaaggtggctgaagtttgaggaagatgttgaggacgggggcgaaagatggagtaagccctatgtcgcaaccctgagccttcactcactcttcgagctccgcagttgtctgataaatggcacagtgcttttggatatgcacgccaacagcatagaagagatttcagatcttatcttagaccagcaggagctatcctcagacctgaacgatagtatgcgggtgaaggtccgggaagcactgctcaagaagcatcatcaccagaatgagaagaaacggaacaacttaatacccatcgtgcgttcctttgctgaagtcggcaaaaaacaatcagatccacacctgatggataaacacggtcagaccgtatcccctcagagtgtcccgaccaccaatctggaagtgaagaacggggtcaattgcgagcacagtccagttgatttgtcgaaggtggatctgcatttcatgaagaagataccaacaggtgccgaagcttccaacgtgttggttggtgaagtcgacatcctcgatcgaccaatcgtggcttttgtgcgactgtcccctgcagtgttgctaagtgggcttactgaagttccaatcccaaccaggttcctctttattctgctgggcccagttggcaagggtcagcaataccacgagatcggcaggtctatggcaactatcatgactgatgaaatatttcatgacgttgcgtataaggccaaggagcgtgatgatcttttggcaggaattgacgaattcttggaccaggtgaccgtgcttccacctggagagtgggatccctccatccgcatcgaacccccgaagaatgtgccaagtcaggaaaaacgtaagatgcccggggttcccaatggaaacgtttgtcacatcgagcaggagccccacggaggacacagcggcccagaactacagagaaccgggcggctgtttggggggttggtcttagacattaagcgcaaggccccgtggtactggagcgactacagagatgccctgtccctccaatgcctggccagttttctgtttctgtattgcgcctgcatgtctcctgtgataacctttggcggcctgttaggagaagctactgagggacgaattagcgccatcgaatctcttttcggcgcttccatgaccggaattgcatatagcttgtttgctggacaggccctgaccatactcggcagcaccggcccggtgcttgtgttcgaaaaaatcttgttcaagttctgtaaagattatgcactcagttatctctctcttagagcttgcatcggcctatggacagcctttttatgtattgtgctcgtggcgactgacgcctctagtttggtatgttacattactcgcttcacagaggaagcctttgcctccctgatctgtattatcttcatttacgaagctatcgagaaactgattcacctcgctgagacttacccgatccacatgcacagtcagctggatcacctctctctatactactgccgttgtacactgcccgagaatcccaacaaccatacacttcagtattggaaggaccacaacattgtaactgcggaggtacactgggcgaacctgacagtttcagagtgtcaggagatgcacggggaattcatgggaagtgcttgcggccatcatggcccatacacaccagacgttctgttttggtcctgcatcctcttctttacaaccttcattctatcatcaacgctgaaaaccttcaagacatctagatacttccctactagggtccgctctatggtttcggactttgccgtgttcttgacaatcttcactatggttatcatcgatttcctgattggcgtgccaagccctaagttgcaagtaccatccgtctttaaaccaacaagggacgatagaggatggattatcaatcctattggcccaaacccctggtggaccgtgatagctgctatcattccggcgcttctgtgtacaatacttatttttatggaccagcagattaccgcggtgatcattaatcggaaggagcacaagctgaagaagggatgtggataccacttagacctgctgatggtggcaattatgctgggggtgtgttccataatgggcttaccttggttcgttgctgctacagtgctgtcaatcacccacgtaaacagcctcaaactggagtccgaatgcagcgcacctggggaacagccaaagttcctggggattcgggagcagcgtgtgacaggtctgatgatattcgtcctgatgggctgcagcgtgtttatgacagcaatcctgaaatttatcccaatgcctgtgctgtacggggtgttcctctatatgggagttagctcattgcaaggaattcaattcttcgatcgactgaaactgttcggcatgcccgctaagcaccagccagatttcatttatctgcgtcatgtgcccctgcggaaagttcacctgttcaccctgatacagctgacatgcctggtactgctttgggtgattaaagcctcacctgcagccatcgtgttcccaatgatggttctggctttggtgttcgtgcgaaaggtcatggacctctgtttcagtaaaagagaactctcctggctggacgacctcatgcccgaaagcaagaaaaaaaagctggatgatgccaaaaagaaggctaaggaagaggaggtcatagtcctggcgcccacggtgtatctcggagcatcaaactaccgcacttag

SEQ ID NO: 206226 - DNA, 2244 bp, synthetic construct
  misc_feature 1..2244: note = Description of Artificial Sequence: Synthetic coding sequence
  source 1..2244: mol_type = other DNA
atgcccctgggccggcagagccaccggcaccaccggacccacggccagaagcacaggcgccgcgggcgcggcaagggcgcatcccaaggcgaagagggcctggaggctctcgcacatgacacccccagccagcgggtccagtttatcttgggcacagaagaagatgaggaacacgttccgcacgagcttttcacagagctggatgagatttgtatgaaagagggagaggacgctgagtggaaggagactgcgcgttggctgaagttcgaggaggacgtggaggatgggggggaacgatggtcgaagccatacgtggccactctcagtctccacagtctgttcgagcttcgctcatgtcttattaatggaaccgtcttacttgacatgcacgctaatagcatagaagaaataagcgatttaattctggaccagcaggagctttcatccgatttaaatgactcaatgagagttaaggtgagagaggcactgctaaagaagcaccatcaccagaacgaaaaaaagaggaacaatcttatccccattgtgaggtcgttcgccgaggtggggaaaaaacagagcgatccccatctcatggacaaacacggccagactgtgagtccacagtccgtgcctacgactaacctcgaggtgaagaatggtgtgaattgcgaacactcaccggttgacctgtcaaaagtagatttacactttatgaaaaaaattcctaccggggcggaagcaagtaatgtgctggtcggagaggtcgacatactagaccggcctatcgtagcttttgttaggctgtctcctgccgtactgctgagtggcctcaccgaagtgcccatcccaacacgctttctgtttatcctgctgggaccagtgggcaaaggccagcagtaccatgagatcgggagaagtatggccacaataatgactgacgagattttccacgatgtcgcatacaaggcgaaggaacgtgacgatctgctggcaggtatcgatgaatttctggaccaggtcactgtgctcccgcccggcgaatgggacccaagcatccggattgaaccaccaaaaaatgtgcccagccaggagaaaagaaaaatgcccggtgttcccaatggaaatgtgtgtcacatcgagcaagaacctcacgggggccactccggccccgagctacagcgcaccggtagactgtttggtggcttggtgctggacattaaacgtaaggccccctggtactggagtgattatcgcgacgccctgagtctgcagtgcctcgcctctttcctgtttctctattgcgcatgtatgtctccggtgataacctttggcggcttactcggggaagctacagaggggcgcattagcgctatcgagagcctgttcggggcctccatgaccggaatagcctactccctgtttgctggacaggcactgaccatcttgggatccaccgggcctgttctggtcttcgaaaagatactgtttaagttctgcaaggactacgcgctttcctatttgtctctgcgagcctgtataggcctgtggacggccttcctgtgtatcgttctggttgctacagacgcttcttccctagtgtgttacatcacccgcttcaccgaggaagcctttgcttctttaatctgtataatcttcatctacgaagcgatagagaagctcatccacctggcggagacctaccccatccatatgcatagccagctagatcatcttagcctatactattgtcgctgcacactgccagaaaacccaaacaaccacactcttcagtactggaaggaccacaatattgtgactgccgaggtgcactgggctaacctcactgtcagtgaatgccaggaaatgcacggcgagttcatgggtagtgcctgcggacaccatggcccatacaccccagatgttctcttctggtcctgcatcctgttctttaccacattcattctctccagcaccttgaagacatttaagacttccagatatttccccacacgaatggaatcttgctctgtcgcatggcttgagtgtggcggagtgattctagcgcattgtaatcttaggctcttaccaagctcatgggactatcgtcacgcccccccacagccagccaacttctgtattttttctcgggatggagtttctccctgttggcctggctggtcacagtcactggacttggtgatttgcctgcctagacctccaaagatgctgggccttcaagcttag

SEQ ID NO: 206227 - DNA, 3282 bp, synthetic construct
  misc_feature 1..3282: note = Description of Artificial Sequence: Synthetic coding sequence
  source 1..3282: mol_type = other DNA
atgcccgccgccggcagcaacgagcccgacggcgtgctgagctaccaacgcccggacgaggaggctgttgtcgatcagggtgggacatcaacgatcctgaacattcactacgaaaaagaagaactcgaaggtcatcgtaccctttatgtgggggtgagaatgcctctcggccgacagagccaccggcatcatcggactcacggtcagaagcacagacgacgaggcaggggaaaaggcgcctctcaaggtgaagagggactggaggctcttgcccacgacacgccctctcaacgcgtgcaattcattctcgggaccgaggaggatgaagagcatgttcctcacgagctgttcacagaactggacgaaatatgtatgaaagagggggaggatgcagagtggaaggagaccgctaggtggttaaaattcgaagaagatgtggaggacggcggcgagcggtggtccaagccctacgtagctaccctgtcacttcatagcctgttcgagcttagaagttgcctgatcaatggaactgttctgttggatatgcacgcaaactctatcgaggaaatatcagacttaatcttagaccagcaggagctgtcaagcgaccttaatgattccatgcgggttaaagtcagggaagccctactcaaaaaacatcaccaccaaaatgagaaaaagcggaacaatttaataccgatcgttcgcagcttcgctgaggtcgggaaaaaacaaagcgatccccacctcatggataaacacggacagacggtgtcgccacaatccgtgccgacaacaaatctcgaggtgaaaaatggcgttaattgcgagcattccccagtggacttatcaaaggtggatctccactttatgaaaaagatccccacaggggccgaagcatctaacgtgctagtgggcgaagtggacatattagatagaccaattgttgcatttgtccgtctttcacccgcagtcctgttgtctgggctgacagaggttccgataccaacacggtttctctttatactgctcggacctgtagggaagggtcagcagtatcatgaaatcggccggagcatggccactattatgacagacgagatctttcacgacgtcgcctataaagccaaggaacgcgatgatttgctagccggcatcgacgaattcctcgaccaggttacggtcctgcctcccggcgagtgggacccaagcatcagaattgagccccccaaaaacgtcccttcccaggagaaacgtaagatgccaggcgtgccaaacgggaacgtttgtcatatcgaacaggaaccccacggcggtcacagcggtcctgagttgcaaagaaccggccggctcttcggcggtctagtcctcgatataaagaggaaggccccttggtactggtcagactatcgggatgccctcagcctacagtgcttggcatcattcctgttcctctattgcgcgtgtatgagtcctgtcattaccttcggagggcttctaggagaggcaacagagggccgcatcagtgcaattgagagcctctttggggcatctatgacgggcatcgcatatagcctgttcgctggccaagccctgactatcctgggatccacgggacccgtactagtgttcgagaagatcctgttcaagttctgtaaagactatgccctgagttacctttccctgcgcgcctgtatcggcctttggacagcttttctatgcatcgtcctggttgctacagatgccagttctctggtgtgttacattacaaggttcaccgaggaggcctttgcaagcctgatctgcattatcttcatctacgaggccattgaaaaattgatccatcttgctgaaacataccccatccacatgcactcacagttggatcatttgagtttgtactactgccgctgcaccttgcctgagaacccgaacaaccatacgctccagtattggaaggatcacaacattgtcacagccgaggttcactgggcgaacctaaccgtgagcgaatgccaggagatgcacggcgaatttatgggttccgcttgtggccaccatggtccatacacgcccgacgttctgttttggtcctgtatcctcttctttaccacatttattctaagttccacccttaaaacgttcaagacttccaggtattttcccacacgtgtccggtccatggtgtcagactttgctgtcttcctgactatctttacaatggtaattattgactttctgataggagtcccatcaccaaagctccaggtgcctagtgtgtttaagcccacgagggacgaccgagggtggataattaatccaatcggtccgaacccgtggtggactgtcatcgcagccataatacctgctctcctgtgcacaatacttatttttatggaccaacagatcaccgccgtcataatcaatcggaaggaacacaaattgaagaaaggctgcgggtatcatttagatctgctaatggtagcaatcatgttgggggtgtgctctattatgggccttccatggttcgtggccgctacagtgctttccattactcatgttaacagtttgaaattggagtctgaatgttcagcacccggcgagcagcccaagtttctagggataagagaacaaagggtgaccggcttaatgatcttcgtgttgatgggctgctccgtcttcatgaccgccatcttgaaatttatccccatgccagttctttatggtgttttcctgtacatgggcgtatccagtctacagggtatacagttttttgaccgcctgaaattgtttggaatgcccgcaaaacatcagccagatttcatctatctcagacacgttccactgcgcaaagtgcacttattcacgctgatccagctgacgtgcctcgtgttgttgtgggtgatcaaggcatctccggccgccattgtgttccccatgatggttctggcactcgtgtttgtacgtaaagtaatggacctgtgcttctcaaaacgcgaattgtcctggttagatgacctaatgcccgagtccaagaagaagaaactggatgacgcgaaaaagaaggccaaggaagaagaggaagctgaaaagatgcttgaaatagggggcgataaattcccgcttgagagtagaaaattgctgtcgagtcccggcaaaaacatttcatgtaggtgtgatcccagcgagataaatatcagcgacgaaatgcctaagacgacagtgtggaaagccctttcaatgaactctggaaatgccaaagagaaatcattatttaactag

SEQ ID NO: 206228 - DNA, 1917 bp, synthetic construct
  misc_feature 1..1917: note = Description of Artificial Sequence: Synthetic coding sequence
  source 1..1917: mol_type = other DNA
atgcccctgggccggcagagccaccggcaccaccggacccacggccaaaagcataggcgtcgcgggcgcggcaaaggggcatctcagggcgaggagggactagaagcactagcccatgacacgccctctcaaagggtccagtttatactcggtacggaggaggatgaagaacacgttccacacgaactgtttactgagctggacgagatctgtatgaaggaaggtgaagatgctgagtggaaagaaaccgcccgatggctgaagttcgaagaagatgtggaggacggcggagaaagatggtctaaaccctatgtcgccactttgtcgcttcattcactatttgagcttaggtcatgtctcataaatggtactgtcttactggacatgcatgccaactcaattgaggaaataagcgacttgattttagaccagcaggagctgtcgtctgatttaaatgatagcatgcgagtgaaggtacgcgaggcattgctcaaaaagcatcatcatcagaacgagaagaagcgcaataatcttatcccaattgtcaggagcttcgccgaggtgggcaagaaacagtctgacccccatctcatggataaacacggccagacagtgtctccccagagcgtcccaaccaccaatctggaggtgaaaaacggagtgaactgtgagcatagtccagtggacttgagtaaggtggacctccattttatgaagaagatccctaccggcgctgaagcatctaatgtgcttgtgggagaagtggacatcctagacaggcctattgttgcgttcgtgcgactatccccggccgtgcttctaagcggcctgacggaagtgccgattcctactaggttcctcttcatattgctgggtccagtcgggaagggtcagcagtatcacgagatcggcaggtctatggcaacgattatgaccgacgagattttccatgatgtcgcttataaggcaaaagagagggacgatctgcttgctggtatagacgagtttctggatcaagtgactgtccttcccccgggtgaatgggatccgtccatacggattgaacctccaaagaatgtcccctctcaggagaagagaaagatgccgggcgtccccaatggaaacgtttgtcacatcgagcaggaacctcacgggggacattcggggcccgaacttcaacgcactggtcggctcttcgggggactggtgttggatataaagcggaaggcaccctggtattggtccgattatagagacgccctgagcctgcaatgccttgcctcatttctgtttttgtattgcgcgtgtatgtctccagtgattacattcggtggactcttgggcgaggcaactgaggggcgcatctcagcaattgaaagcctctttggtgcatctatgactggaatcgcctactctctcttcgccggtcaggcactgactatactgggcagtactggccccgtgctggtgttcgagaagatccttttcaagttctgtaaagattacgctctctcctatctgagcctccgagcgtgcatcggactctggacagcgttcctttgcatcgttctggtcgctacggatgcatccagcctcgtgtgctacatcacgcggttcactgaggaagcttttgccagtctgatttgtataatctttatatacgaagcaatcgaaaagctaattcatttggcagagacatatcccattcatatgcatagccagctggaccacttgagcttgtactattgccgatgcacacttcccgaaaacccgaacaaccacaccttacagtattggaaggaccataatattgtcactgctgaggtccattgggctaaccttacggtgagcgtgtcacttggagccgctagatgcccttcaatagtgactactgggctgggcgggaccagcaaatag

SEQ ID NO: 206229 - DNA, 2976 bp, synthetic construct
  misc_feature 1..2976: note = Description of Artificial Sequence: Synthetic coding sequence
  source 1..2976: mol_type = other DNA
atgcccctgggccggcagagccaccggcaccaccggacccacggccaaaaacatagaaggagaggacgcggcaagggtgctagtcagggggaggagggactggaggccctggctcacgacacaccttcgcagagggttcagtttatcttagggacagaagaagatgaggagcacgtacctcacgagttgttcactgagttagatgaaatatgcatgaaagaaggcgaagacgccgaatggaaagaaacggctcgatggcttaagtttgaggaagatgttgaagatggcggggaacgctggtcaaaaccctacgtagccaccctgtctctccactctcttttcgagctgagatcgtgcctgattaatggaacggtcctcctcgacatgcacgcgaactcaatcgaggaaatttctgacttgatactggatcagcaggagctgagctcagatctgaatgatagtatgcgagttaaggttagggaggccctgctgaaaaaacaccatcaccagaatgagaagaagcggaataacctgatacctattgtgcgctctttcgccgaagttggcaaaaaacaatctgatccccatcttatggacaaacacggccagaccgtgtcccctcaatcagtgcctactaccaaccttgaagtgaagaatggcgtaaattgcgaacattccccagtggacctgagcaaggtagatctgcacttcatgaaaaagattcctaccggagccgaagctagcaacgtgctggtgggagaggtggatatcctcgacaggcccattgtagcctttgttaggttgagcccggctgttctgctgagcggattgacagaggtgccaataccgacccgcttcctgttcatcctgttgggtcccgtcgggaaggggcagcagtaccacgaaatcggacgcagtatggccactatcatgactgatgaaattttccacgacgtcgcctacaaagctaaagagcgggacgatctcctcgccggcattgacgagttcctagaccaggtcactgtactgccaccgggggaatgggacccgtctattcgaatcgagccaccaaaaaacgtccccagtcaggaaaaacgcaagatgcctggagttcctaacggaaatgtgtgtcacatcgagcaggaaccacatggcgggcactcaggacctgagctccagagaaccgggagactgtttggtggtctcgtgctggacattaagagaaaggccccatggtattggagtgattatcgcgatgctctgtcattacagtgcctggcatctttcctgtttctttactgcgcatgtatgtcccctgtcataactttcggaggactgctgggcgaggctacagaaggaagaattagcgcaattgagtccctattcggagcttccatgactgggatcgcatactcccttttcgcaggacaggccctcacaatcctgggcagcacagggccagtactcgtattcgaaaagattctcttcaagttttgcaaagattacgcactcagctatttatcgttgagagcctgcattggtttgtggactgcattcctatgtattgtgctggtcgccactgacgcttcttctctcgtgtgctatatcacaaggtttacagaggaggccttcgctagcttgatctgtattattttcatctacgaggcaatcgagaagctgatccacttagccgaaacttacccaatccacatgcactcgcaactggatcatctttccctctattactgcagatgtactctgcccgagaacccaaacaaccatactttgcagtactggaaggaccacaatatcgttacggcggaagtacactgggccaatctgaccgtctcagaatgtcaggagatgcatggggagtttatgggaagcgcgtgcggacatcacgggccctatactcctgacgtgttgttctggtcttgcatactgttttttacgacatttattctctcatcaaccctgaaaacgttcaagacttctaggtactttcctacgcgggtcagatccatggtgtctgattttgccgttttccttacaatctttacgatggtcatcatagattttctgattggggttccttcccctaaactgcaagtgccttctgtgtttaaacctactagagatgataggggctggataatcaatcccataggtcctaatccgtggtggaccgtcattgccgccatcattcctgcattgctgtgtactatccttatatttatggaccagcagataactgctgtgatcatcaaccggaaggaacacaagttaaagaaaggatgcggttaccacctggacctcctcatggttgcaattatgttgggagtgtgcagcatcatgggactgccctggtttgttgcagctaccgtcctgtctatcactcatgtcaatagtcttaagctggaaagcgagtgctcagctcctggcgaacagccgaaatttcttggtattcgggagcagagagtgactgggctcatgatctttgtgctcatggggtgctccgtgtttatgaccgccattctcaagtttattccaatgcctgtcctctatggagtgtttttgtatatgggtgtgtcatcgcttcagggtatccagttttttgaccgcctgaaactgtttggcatgcccgcgaaacaccagcctgacttcatctatctgcgacatgtgcctcttcggaaggtgcatttgttcactctcattcagctaacttgtctcgtgctcctatgggtgattaaggctagcccagccgcgattgtttttcccatgatggtgcttgcactggtgtttgtgcgcaaagtgatggatctgtgcttttcaaagcgtgaactgtcatggctcgatgacctaatgccagagagcaagaagaaaaagctcgacgacgccaagaaaaaagctaaggaggaggaagtgatcgtcttggcaccgacggtttatttgggagcctccaactacaggacttag

SEQ ID NO: 206230 - DNA, 3321 bp, synthetic construct
  misc_feature 1..3321: note = Description of Artificial Sequence: Synthetic coding sequence
  source 1..3321: mol_type = other DNA
atggagatcaaggaccagggcgcccagatggagcccctgctgcccacacggaatgatgaagaggcagtggtggaccgcgggggtaccagaagcattctcaagactcacttcgaaaaggaagatctggaaggccaccggactctctttattggtgtccacgtgcctttgggcggccggaagagccaccgaaggcaccggcatcgcggccataagcacaggaagagggaccgggagagggactcaggcttggaggacggacgtgagtccccaagctttgatactccaagccaacgggtgcagttcattctaggcaccgaggacgatgatgaggaacacattccccacgatctttttacagaactggatgaaatttgttggagagagggcgaggatgccgagtggcgggagaccgcacggtggctgaagttcgaggaggatgtcgaagacggcggcgagcgttggagtaagccatatgtcgcaaccctgtcactgcacagcttattcgagctaaggtcatgtatcctaaacgggacagtcctgctagatatgcacgctaacactcttgaggaaatcgccgatatggtgctagaccagcaagtctcctccgggcagctcaatgaggatgtaaggcaccgcgtacacgaggccctaatgaagcagcaccaccaccagaaccagaagaaactgactaaccggatcccgatagtgcgctcttttgccgacattggaaagaaacagtccgagccgaacagtatggacaaaaacgcgggccaggtggtgtctcctcagtctgcccccgcctgcgttgagaataagaatgacgtgtctcgagaaaattctactgtcgacttctcaaaggtggacctccattttatgaagaagatcccacccggggctgaagcctctaatatcctggtcggtgagctagagtttctcgatcgcaccgttgtcgcctttgtccgcttgtctccagctgtgctcctgcaggggctggccgaagtgcccatccccacccgctttctttttatcctgctgggtccattaggaaagggtcaacagtaccacgagataggacggagcatagctaccctgatgaccgatgaagtttttcacgatgtggcttataaggctaaggaccgtaacgatctagtgagcggtatagacgaattcctcgatcaggttacagtcctgccaccaggggagtgggatcccagtattagaatagagccacctaaaaatgtgccatcgcaagagaaaaggaaaatcccagctgttcccaatggtaccgccgcacacggagaggccgagccccatggcggacattccggaccagagcttcagagaacaggaagaatttttggggggttaattctggacattaagagaaaggccccctatttctggagcgactttcgcgatgctttttcccttcagtgtctggccagcttcctgtttctctactgtgcttgtatgtcacccgttattacgtttggagggcttctgggggaagcaactgaaggcaggatcagtgccattgaatcactgttcggagctagcatgactggcatagcttacagtctgttcggtggccaacccctcacaattctcggcagtacgggtcctgtgctggtttttgagaagattctgtttaaattctgtaaggaatatggactgtcgtatctgtccttacgggccagcattggactatggactgctaccttgtgcatcatcctcgtcgccactgacgcatcttcactcgtatgctacattaccaggttcacggaagaggccttcgcatctctcatttgcattattttcatatacgaagctttggagaagctgtttgagctgtccgaggcatatcccataaacatgcacaatgatttggagctgctcactcagtacagttgcaattgcgtcgaaccccacaacccctccaacggcaccctcaaagaatggcgcgagagtaacattagcgcaagtgacattatttgggagaatttaaccgtaagcgagtgcaagtcactgcatggcgagtacgtgggccgtgcgtgcggccatgaccacccctacgtgccagacgtgttgttctggagtgttatcctcttcttttcaactgtgacgctgtcagccaccctcaagcaatttaagacctcacgatattttccaactaaagtccgttctattgtatctgatttcgccgtgtttcttaccattctgtgcatggtgctcatcgactacgcaattggcatcccttcccctaaattgcaagtaccatcggtgttcaaaccgactcgtgatgaccgtgggtggttcgtcacgccgttgggccctaatccttggtggacagttatcgcagcaataattcccgcactgctgtgcaccatcctcatcttcatggatcaacagatcacagctgtcatcatcaacaggaaggagcataagttgaagaaggggtgtggctaccacctagaccttctcatggtggccgtgatgctgggcgtgtgctcaattatgggacttccctggtttgtggctgccaccgttctgagcatcacgcacgtaaactcacttaaattagagtctgagtgttcagcaccgggcgagcagccaaaattccttgggatcagagaacaaagggttacaggtcttatgatctttatcctgatgggttcttcagtgttcatgacatccatactgaagttcatccccatgcccgtgctttacggcgtcttcctgtacatgggcgccagtagtctgaaaggtatccaattcttcgaccgcatcaaattgttttggatgcctgctaaacaccaacccgacttcatttaccttcggcacgtccccctgaggaaggtgcatctgttcaccatcattcagatgtcttgcctgggactgctgtggatcattaaggtgtctagagccgccatcgtgttccctatgatggttctggccctggtgtttgtgcgcaagttaatggatcttctgttcacaaagagggagctgagctggctcgatgacctcatgcctgagagtaaaaaaaagaaactggaggatgctgaaaaagaggaggaacagagtatgctggcgatggaggatgaaggtactgttcagctgccactcgaggggcattatcgggatgacccttcagttatcaatatttctgacgagatgagcaaaacagcgctctggagaaaccttctcataactgcagacaatagcaaagataaagagtcttccttcccttccaagtccattgagagtcggaaggagaagaaggctgattctggtaaaggggttgatagagaaacatgtctgtag

SEQ ID NO: 206231 - DNA, 3300 bp, synthetic construct
  misc_feature 1..3300: note = Description of Artificial Sequence: Synthetic coding sequence
  source 1..3300: mol_type = other DNA
atgcagagcctgggcgtgagcggcaaccggaaggtgatgcagagcggcacctgcgagccctttcagagtcttagccaccagcgcaacgatgaggaggctgtggtagaccgcggaggcacacgatctatactgaagacccatttcgagaaagaggatctagagggtcaccgtacactgttcatcggggtgcatgtgccgctcggagggagaaagagccatcggcgtcatcgtcacagaggtcataagcaccgtaaacgcgatagggaacgagatagcggactggaagatgggcgggagtccccttcttttgatacgccatcccagcgtgtgcaatttattctcggcactgaagacgacgacgaagaacacattccacatgacctcttcaccgagcttgatgaaatttgttggcgcgagggggaagacgctgaatggagggagacagccaggtggctcaaatttgaggaagacgtggaagatggcggtgaacgctggagtaaaccatacgtggcaacactatctctgcattcgctgttcgaactcaggagctgtatccttaatggcactgtcctcctggatatgcatgcgaatacgcttgaggagatcgctgacatggtgcttgatcagcaggttagctcaggacagctgaatgaagacgtgcgtcaccgtgtgcatgaagccctgatgaagcaacaccatcatcagaatcagaaaaaactcactaatagaattcccattgttcgtagtttcgctgatatcggaaaaaagcagtccgagccgaatagcatggacaagaatgctggacaagtggtaagcccacagtctgcccccgcctgtgttgagaataagaatgacgtgtcgagggaaaacagtactgtggatttttcaaaagtagatttacatttcatgaaaaagattccccctggggccgaggcttccaacatccttgttggggagctggaattcctggataggacagtggtcgcctttgttcgactctctcccgctgtgttgctgcaggggctggccgaggtgccaatcccaactcgctttctgttcatcctcctgggcccgctgggcaaaggccagcagtatcacgaaattgggcgttccattgctactttaatgacggatgaggtttttcatgacgtggcttacaaggccaaggatcggaatgaccttgtcagtggtatcgacgaatttctcgatcaggtgaccgtcctccccccaggggaatgggaccccagcatcagaatagagccccccaaaaacgtgccatctcaggaaaaaaggaagatcccggccgtacccaacgggactgcggcgcacggggaagcagaaccacacggaggtcactcgggccctgagctccaacggaccggccggatcttcggtggtctgatcttagacattaaacgcaaggccccatatttctggtccgactttagggatgccttcagcctccagtgtcttgccagttttttattcctctattgtgcttgtatgtccccagtgatcacctttggcggtcttctcggcgaggccaccgaggggcggatttcggctattgagtcactttttggagctagcatgaccggcatcgcctattccctttttggtggtcaaccacttacaatcctaggcagcacggggcccgtgctcgtgttcgagaagatactgtttaaattctgtaaagaatacggccttagttacttaagcctccgagcaagtattggtctgtggacagctaccctgtgtattatccttgttgcaacagacgcaagtagtctggtgtgctacatcactcggttcacagaggaggcttttgctagtcttatttgcatcatattcatatacgaggctctagagaaactgttcgaactctctgaggcttacccgattaatatgcataacgatctcgagttgcttacacagtatagctgtaactgtgtagagccgcacaacccttctaacgggacactcaaagagtggagagagagtaatatcagcgcctctgatatcatttgggaaaatttgactgtatcagagtgtaaaagtctgcatggcgagtatgtgggtcgggcctgtgggcatgaccacccttacgttcccgatgtccttttttggtcagtcatcttgtttttctccaccgtgacattgtcagcaacccttaagcagtttaagacaagcaggtactttcccactaaggtcaggtccattgtgtcagactttgctgttttcctcacaatcctgtgtatggttctgatcgactacgcaattggaatcccctctcccaaactgcaggtgccctcagttttcaagcctactcgggatgacagagggtggttcgtgacccccctcggccccaacccatggtggacagtgattgcagctattatccccgcactcctttgtacaatcctcatctttatggatcagcagattaccgctgtcatcatcaatcgtaaggagcacaagcttaagaaagggtgtggatatcatctggatctgctcatggtggccgtgatgctgggagtttgttcaattatgggacttccttggttcgtggccgcaactgtgctgtccatcacacacgtaaacagtcttaagttggaatctgagtgctcagctccaggcgaacagccaaagttcttaggcatacgtgaacagagggtgactggactgatgatttttatattgatggggtctagtgtgtttatgacttcgatactgaagttcattccaatgcctgtgctctacggcgtattcctgtacatgggtgcctccagcctaaagggcattcagttctttgatcgcattaagcttttctggatgccggcaaaacatcaaccagactttatatatctgaggcacgtccccctgcgcaaggtgcatctctttacgatcatccagatgagttgtctgggccttctctggatcatcaaagtatccagagccgctatagtgtttccaatgatggtcctggccctcgtctttgttcgcaaactaatggacttattgttcaccaaaagagagctgagctggttggatgacctgatgccggaatctaaaaagaagaagctggaagacgctgaaaaggaggaggagcagtcaatgctggctatggaagatgaggggacagtgcaactgcctctagagggccactatcgagatgatccctcggttataaatatcagcgacgaaatgtctaagaccgcgctgtggaggaatctgctgatcactgccgacaattctaaggacaaagaaagctctttccctagcaaaagcagcccctcctag

SEQ ID NO: 206232 - DNA, 3354 bp, synthetic construct
  misc_feature 1..3354: note = Description of Artificial Sequence: Synthetic coding sequence
  source 1..3354: mol_type = other DNA
atggagatcaaggaccagggcgcccagatggagcccctgctgcccactcgcaacgatgaggaggctgttgtcgatcggggcgggactcgtagtatcctgaaaacacattttgaaaaagaagatttggaaggacaccggacgttgttcatcggagtacatgttcccctcggcggtcgaaaatctcatagacggcatagacaccgaggtcacaaacacagaaagcgggacagagaaagagattcgggcctcgaggacgggagggaaagcccgtctttcgatactccttcccagagagtacagttcatcctcgggactgaagatgatgacgaggagcacatcccccatgacctattcactgaacttgacgagatctgctggcgtgagggcgaagatgcagaatggcgggagacagctcggtggctcaagttcgaagaggacgtggaggacggaggcgagagatggagcaagccttacgtagctacgctgagcctgcattcattgttcgaattgagatcctgcatcctgaacggcacagtcttattggacatgcacgctaacaccttggaagaaattgctgatatggttctggaccagcaagtcagtagtggacagctgaacgaggatgtgcgacaccgggtacatgaagccttgatgaaacagcaccaccatcagaatcagaagaagctgacaaatagaatcccaatcgttagaagcttcgccgacattggtaagaaacagtcagagcccaacagtatggacaagaacggccaggtcgtgagtccccagtcggcaccggcttgcgttgagaataaaaatgatgtgtccagagaaaactccaccgtggatttttcgaaaggtctgggggggcagcagaagggccacacttctccctgtgggatgaagcagcggcacgaaaaggggcctcctcaccagcaggagcgcgaggtggacctccatttcatgaagaaaatccctcctggggccgaagccagcaatatactcgtgggcgagctggaattcctggatagaaccgtagtggccttcgtacgcctaagccctgccgtgcttctgcaggggctggctgaggttcccattcctacccgttttctgtttattcttctcggtccactcggaaaggggcagcaataccacgaaattggacgtagtatagccaccctgatgacagatgaagtgttccacgacgttgcatacaaagccaaagaccgcaacgatctggtgagtggaattgacgagttcctggatcaggtcactgttctcccccctggtgagtgggatccctcgattagaatagaacctccaaagaatgtgccttcccaggaaaagaggaaaattcccgccgtcccaaacgggacagccgcacacggcgaagcagaacctcacggaggccattccgggccggaacttcagcggacggggaggatcttcgggggtctgattctcgacataaagcgtaaggctccttacttctggtcggattttagggatgccttcagccttcagtgcttggccagctttctgttcctgtactgcgcttgtatgagcccagtaattacgtttgggggattgctcggcgaagcaaccgagggcaggatcagcgccattgaatctttatttggcgccagcatgacaggtattgcatacagcttgtttggcggccaacctctgacaattctggggagtaccggccccgtgctcgtgtttgagaagatcttgttcaaattctgcaaggaatatgggctctcttatctctctttgcgggcctccattggattgtggacagctacactctgtatcattctggtcgcaacagacgccagtagtctcgtttgttatatcacacgtttcaccgaggaagcatttgcaagcttgatttgcatcatttttatatacgaggccctggaaaaattgttcgaattaagtgaagcctaccccattaacatgcacaacgatctggagctgctcacccagtactcatgtaattgtgtcgagccacataacccaagcaacgggactctgaaggagtggagagaatctaacatctcagcttctgatatcatttgggagaacctcacagtgagcgagtgcaagagtctgcacggcgaatatgtgggtcgggcctgcggacatgatcatccgtatgtccccgatgtgcttttttggtctgtcatattatttttttccaccgtcaccctgagcgcaaccctgaaacagtttaaaaccagccgctatttccccacaaaggtgcggagtatcgtgtcagactttgcggtattcctcacgattctctgtatggtattgatcgactacgcaattggaattccatccccgaagctccaggtgcctagcgtcttcaaacctactcgagatgaccgcggctggttcgtgacccctctgggcccgaacccctggtggacagtcatcgctgccatcatacctgccctgctgtgtaccatcttgattttcatggatcagcagataaccgccgttatcatcaatcgcaaggagcacaagctgaagaagggatgcggttaccatctggatttgctgatggtggcagtgatgctgggcgtgtgttctatcatggggctgccctggttcgttgcggccaccgtcctgagcatcactcacgttaatagcctgaagctagaatccgagtgttcagcacctggagagcagccaaagttcttggggatcagggagcagagagtgaccggcctgatgattttcatactcatgggcagcagtgtttttatgactagcattctaaagtttatcccaatgccggttctgtatggagtttttctgtacatgggcgcctcatctctgaaaggaatccagttttttgaccgaattaagctcttctggatgcctgctaaacatcagcctgacttcatttaccttcgccatgtgcccctgagaaaagtacatctgtttactattattcagatgagttgtttaggcctgttatggatcatcaaggtctcacgtgcagcaatcgttttcccaatgatggtactggccctcgtgttcgtgcggaagcttatggatctgctgttcactaagagagaactctcctggctggatgacttaatgcccgagagtaagaagaagaagttggaagacgccgagaaggaggaggagcaaagcatgctggcaatggaggacgagggtaccgttcagttgccacttgaaggccactatagggacgacccatccgtgataaatatttcagatgagatgtcgaaaaccgccctctggcgcaacttgttgatcaccgccgacaacagtaaggacaaagaaagctcctttccctccaaatcaagcccttcatag

SEQ ID NO: 206233 - DNA, 3267 bp, synthetic construct
  misc_feature 1..3267: note = Description of Artificial Sequence: Synthetic coding sequence
  source 1..3267: mol_type = other DNA
atggagatcaaggaccagggcgcccagatggagcccctgctgcccacccgcaacgacgaagaggccgttgtcgacagaggaggtacacgatcaattctgaagacacatttcgagaaagaggacttagagggtcacaggaccttatttattggcgtccatgtgccactgggcgggcgaaagtctcatagaagacacagacacaggggccacaagcaccgcaagagggatagggagagagattccggattagaggacggaagggaatctccctcttttgacaccccttcccagagagtacagtttatcctcggcactgaagacgacgatgaggaacacataccccacgatcttttcaccgagctagacgaaatatgctggagagagggagaggacgctgagtggcgcgagacagcccgttggctcaaattcgaagaggatgtagaagacggaggggagcgctggtctaagccctatgttgcaacgctctccctacattcattatttgagctacgctcttgcatattaaatggcacggtgctgctggatatgcacgcaaacacgttagaggagattgcagacatggttctggatcaacaggtgtcctctggccagctgaatgaggacgtcaggcaccgcgtacacgaggcactgatgaagcagcaccatcaccaaaaccaaaaaaaactgactaatagaattcccattgtgcgcagttttgctgacatcgggaaaaaacaatcagagcctaactcgatggataagaacgctggccaagtcgttagcccacaatcggcaccggcatgcgtagagaataaaaacgacgtaagtcgggagaatagcacagtagacttttcaaaagtcgatctacatttcatgaagaagataccccctggtgccgaggcatccaatatcctggtcggggaactggagttcctggacagaaccgtcgtcgccttcgtccgtctctcccctgcagtcttgctgcaggggctcgctgaggtcccaatccctacccgttttctgttcattctgttgggtccgctggggaagggccaacagtatcatgaaatcggacgatcaatcgccacactgatgacagacgaagtgtttcacgacgttgcatacaaagccaaagaccggaatgacctggtttcaggcattgacgagttcttggaccaagttacggttctgccccccggcgaatgggatccttcgatcaggatagagccacccaaaaacgttccttcccaggagaagcgaaagattcctgccgtgcccaacggcacggccgcacacggagaagctgaacctcacggggggcacagtggcccagagttgcaaaggacaggccgcatctttggggggctgatcttagacataaaacggaaagcgccttatttttggtccgattttcgggatgccttctctctgcagtgcctggcatctttcctgttcctgtattgcgcatgtatgtcccctgttatcaccttcgggggcctcctaggggaggccactgaaggtcggatttccgccatcgagtcgctgttcggagcaagcatgaccgggatcgcctattctctgttcggaggtcaacctttaactattctgggttccacaggaccagtgctagtgttcgaaaaaatcctattcaagttttgcaaggaatatggtctctcttacctgtccctgagggccagcattggcctgtggacagcaaccctgtgcattatcctggtcgctaccgacgcatctagcctggtctgctacatcacaaggtttaccgaggaagcatttgcctctttgatctgtattatcttcatatacgaagcacttgaaaaactctttgaactttcagaggcttacccaatcaatatgcataatgacctcgaactgctcactcaatactcttgcaactgcgtcgagccccacaacccgtccaacggcactctgaaggagtggcgcgagagcaatatttccgcctctgatattatttgggaaaacctgacggtgagcgaatgcaagagcctccacggagagtacgtcggcagggcatgtggacatgaccacccttacgttcctgatgtgctcttttggtctgtcatccttttttttagtaccgtcactctctccgcaacactgaaacagttcaagacgtccaggtacttcccaactaaggtgaggtccatcgtttctgacttcgccgtattcctaacaatcctgtgcatggtcctcattgattacgctatcggaatacccagccctaagctgcaagtgcccagcgtgtttaagcccacacgggatgatcgaggctggttcgtgacaccattaggcccaaacccatggtggaccgttatagctgctatcattcctgctctcttgtgcaccatactgatctttatggaccagcagattaccgccgtgatcatcaaccgcaaagaacacaagctaaaaaagggatgcggataccatctggacttgcttatggtcgcagtgatgctgggtgtttgttccattatggggctgccctggtttgtggccgccacggtcctgagcattacccatgtgaactctctcaagttggagtcagagtgttccgccccgggggagcaaccaaagttcctgggaatcagagaacaacgagtcacaggtttaatgatttttatactgatgggaagctccgtgtttatgacttctatcttgaagtttattcccatgcctgtgctttacggggtttttctgtacatgggggcttcaagtctgaaaggcattcagttttttgaccggattaagctgttttggatgcctgctaagcaccaacccgactttatctatctgcggcatgtacctctacggaaggtgcacctgtttactatcatacagatgagctgcttggggctcctgtggattataaaggtcagcagagccgctattgtgttccctatgatggttctggcgctcgtctttgttcgcaagctgatggacctgcttttcacaaagcgcgaactgtcttggctcgacgacttaatgcctgagtctaaaaagaagaaactggaagacgcagaaaaagaggaagaacaatcaatgctggccatggaagacgagggtactgtgcagctccctcttgaagggcattatcgggacgacccatccgttatcaacatttctgacgagatgtcaaagaccgcactctggcggaatctgctgataacagctgacaactcaaaggataaggaatcatcattcccctcaaagtccagccctagctag

SEQ ID NO: 206234 - DNA, 3165 bp, synthetic construct
  misc_feature 1..3165: note = Description of Artificial Sequence: Synthetic coding sequence
  source 1..3165: mol_type = other DNA
atggagatcaaggaccagggcgcccagatggagcccctgctgcccacacggaacgatgaagaagcagttgttgatcgtggcggtacccggagtattctgaagacccattttgaaaaggaagatctggaaggccatcgaaccttgttcatcggggttcacgttcccttaggcggccgaaaatcacataggaggcaccggcaccgggggcataagcataggaagagagacagagagcgcgactctgggttagaagacggtagggaatccccgtcatttgacacaccctcccaacgagtacagttcattctggggacggaagacgacgacgaggaacatatcccacatgacctgtttaccgaactggatgaaatttgctggagggagggcgaggatgcagagtggcgcgagacagcccggtggttaaagttcgaggaggacgtggaagatgggggagagcgctggagcaaaccgtacgtggccactttgagcctccactccctctttgagttgaggtcttgcatactgaacggcaccgtgttgttggatatgcatgctaacaccttggaagaaatagctgacatggtactggatcaacaggtgtccagtggtcagttaaacgaagatgtcagacatagggtgcacgaggctctgatgaaacaacatcaccaccagaatcaaaaaaagctcacgaatcgtatccccattgtaaggagcttcgccgatatcgggaagaaacagtctgagcccaatagcatggacaaaaatgctggacaggtagtctctcctcagagcgcccctgcctgtgtggaaaacaaaaatgacgtttctcgcgagaacagcacggttgatttctcaaagggcctgggagggcaacagaaaggccacactagcccgtgcgggatgaagcagaggcacgagaaagggccaccccaccagcaggaaagggaggtggacctgcactttatgaagaaaatcccaccaggggctgaggcctctaatatcctcgtgggcgagctcgagttcctggatagaaccgtcgttgcctttgtgagactatctccagctgtcctgctacagggcctggccgaagtcccaatcccgaccaggtttctctttatactgctgggccctctaggcaagggtcagcagtaccacgaaatcggacgtagcattgccactcttatgacggatgaagttttccatgatgtagcctacaaggccaaggaccgaaacgatcttgttagtggaattgatgagtttttagaccaggtaacagtgctgccacctggagagtgggacccatcgattagaatcgaaccgccaaaaaacgtgccctcacaggagaagagaaagatcccagcagtgcccaacggtacggctgcccatggcgaggccgaaccacacgggggacattcagggccagaactgcagcgtactggccgcatcttcgggggtctcatcctagatatcaaacggaaggctccatacttttggtcagacttcagggatgcatttagcctacagtgtctggcctcctttctcttcttgtattgcgcgtgcatgtccccggtgattaccttcggtggactattgggcgaagccaccgaggggaggatctctgcaattgaaagcctcttcggagcttccatgacgggaatcgcctattctttattcggtggccagcccctgacaatcttgggctctactggtcccgtgctggtcttcgaaaagatcctgttcaagttctgcaaagagtacggtctatcttatttgagtcttcgcgctagtatcgggctgtggacagccacactgtgcattatcctggttgctaccgacgcatcgtcactcgtatgctacataactaggtttaccgaggaagcatttgcttcactaatatgtataatcttcatttacgaggccctggaaaagcttttcgagctgtctgaggcctacccaattaacatgcacaacgacctggaacttctcacccaatattcttgtaattgcgtagaaccccacaacccgtccaatggtaccctcaaagagtggcgggagtcgaatatcagcgcatccgacatcatctgggaaaacttaactgtgagtgaatgcaagagcttgcacggagaatatgtgggccgcgcatgcggccacgatcatccgtacgttcccgatgtcctcttttggtctgtgatcctgtttttttcaacagtgaccctttcggccacccttaagcaatttaaaaccagtcggtacttcccgactaaagtgaggtcaatcgtatctgactttgctgtattcctaaccatcctctgcatggtcctcattgattacgccatcggcatcccttctccaaagttacaagtcccgtcagtgttcaagccgacgagagacgaccggggatggtttgtgaccccattgggccccaacccctggtggacagtgattgccgcgatcattcccgccttgctgtgcactatcctcatcttcatggaccagcagatcaccgcggtgatcattaaccggaaggaacataaactaaagaagggatgcggctatcatttggacttattaatggttgctgtgatgctgggagtctgtagcattatggggttgccttggtttgttgccgccacagtgctatctattacccacgtgaatagcctaaaactggaaagcgagtgtagtgctcccggggaacagcccaagtttttgggcatccgcgagcagagggtcactgggttaatgattttcatactaatgggcagcagtgtttttatgaccagtattttaaagtttataccaatgccagtgctttacggcgtgttcctgtacatgggtgcaagtagtctcaaaggaatccagttttttgatcggatcaagttgttctggatgccagcgaagcatcagcccgacttcatatacctccggcatgtgcccctgaggaaagtgcatttatttacgattatccaaatgtcatgcctgggtttgctgtggattattaaggtgagtagggctgccatcgtatttccaatgatggtgctcgctctggtgtttgtccggaaactcatggatctgttgttcaccaagagggagttgagctggttggacgacttgatgcctgagtccaagaagaaaaagctcgaagatgctgagaaggagcactag

SEQ ID NO: 206235 - DNA, 3357 bp, synthetic construct
  misc_feature 1..3357: note = Description of Artificial Sequence: Synthetic coding sequence
  source 1..3357: mol_type = other DNA
atggagatcaaggaccagggcgcccagatggagcccctgctgcccacgcgtaacgatgaggaggccgttgttgatcggggcggaactcgttcaattttgaagacccactttgaaaaagaggatctagagggccacaggactttgtttattggagtccacgttcccctgggcggtaggaagagccatagaagacacagacaccggggccataaacacaggaaacgggaccgggagagagatagcggtttggaggacgggcgagaatcgcccagtttcgatacaccttcacagagggtgcagttcattctcggtaccgaggatgatgatgaagaacatatcccgcacgacctgtttacagagctggatgaaatttgttggagggaaggtgaggatgcggagtggcgagaaaccgcacggtggctgaaattcgaggaagacgtagaggatggaggggaaaggtggagcaagccttatgtggcaaccctgagtctgcattcactgttcgagctgcgctcttgtattctgaatgggacggttctgttagatatgcacgccaatacactggaggaaatcgcggacatggtccttgaccagcaggtctctagcggacagctgaacgaggatgtgagacacagggtgcacgaggcgctgatgaagcaacatcatcaccagaatcagaagaagcttacgaatcgcatcccaattgtgaggagcttcgcagacattggtaagaaacaatcagagccaaactctatggataagaacgcaggccaggttgtctcaccccaaagtgctcctgcgtgtgttgagaataaaaacgacgtcagtcgagagaattcaactgtcgatttttctaagggtcttggaggtcagcagaagggacacacgtccccttgtggcatgaaacagcggcacgagaaagggccacctcaccaacaagagcgagaggtagatttgcacttcatgaaaaaaatccctcctggagctgaagcaagtaacatcctagtgggagagctggagtttctcgataggacagtggtagcattcgtgcggttgtccccagccgtcttgctgcaaggtctggctgaggtacctatccccacaagatttctcttcatcctgctgggtcccctgggtaaaggacagcagtaccatgaaatcgggcgctctattgctacgcttatgacagacgaggtcttccacgatgtggcatacaaggcaaaggacagaaacgacctcgttagtggtatcgatgaattcctggatcaggtgactgttcttcctcctggagagtgggatccatcaatccgaatcgagccgccgaaaaacgtgccttcccaggagaaaagaaaaatcccagctgtgcctaatggaacagcagcccacggcgaggctgagcctcacggaggccatagtggccccgaattgcaacgcacagggcggatttttggtggactgatcctcgacatcaagagaaaagctccatacttttggagtgatttccgcgatgccttctcactccagtgtctggcatctttcttatttttatactgtgcctgcatgagcccagtgattacattcggaggattgctcggcgaggccacagaagggcgcattagcgctatcgagtctctgtttggggccagcatgactggcattgcctactccctatttggcgggcaaccgctgacaatcctgggctcaactggccccgtgttagtcttcgaaaagatcttgttcaagttctgcaaggagtacggactgtcctatctcagcttacgggcctcgattggtctgtggacagcaacactctgcatcatcctggtcgccacagatgccagctctctggtgtgctacataacgaggtttaccgaggaggcttttgcctctctgatctgcatcatcttcatctatgaagctctggagaagttatttgaactatctgaggcctaccctatcaatatgcacaatgatctggagctgttaacccaatacagctgcaactgtgtggaacctcataatccgtccaacggcacattaaaagaatggcgagaaagcaatattagtgcttccgatataatctgggagaatctgactgtttccgagtgcaaaagcttacatggcgaatatgtcgggcgagcttgcggccacgaccatccctatgtacctgacgtcctcttctggtccgtgattctgttcttcagcactgtgacacttagcgccacattgaaacaattcaagacgtcccggtattttccgacaaaagtacgaagcattgtcagtgacttcgcagtcttcctgaccatcctttgtatggtgctcattgactatgctattggtatcccctccccgaaactgcaagtaccatctgtgttcaagcccacacgggacgaccggggttggttcgtgacgccactcgggccaaacccatggtggacagtcatcgccgccatcataccagcccttctttgcaccatactgatcttcatggatcagcagatcacagctgtcattataaatcgaaaggaacataagctcaaaaaaggctgcgggtatcatctggatctactcatggttgctgtgatgctgggagtgtgctcaatcatggggcttccgtggttcgtagcggcaacagtcctatctattacccacgtgaacagcctgaaactcgagtccgaatgctccgctcccggggaacaacctaagtttctcgggatcagagaacagagagtaaccggcctgatgattttcattctgatgggttcctcggttttcatgactagtatattgaagttcattcccatgccagttctgtacggcgtcttcctgtacatgggagccagctccctcaaagggatccagttcttcgatagaattaagctcttctggatgcccgctaagcaccagccagactttatctatctacggcatgtgccactgaggaaagtgcacctgttcacaatcatccagatgtcctgtcttggcctcctgtggattattaaggtgagcagggcggccattgtgttccccatgatggtgctggccctcgtatttgttcggaaactcatggaccttttgttcacgaagagggaactctcctggttggatgatcttatgcccgagtcaaagaagaaaaagctagaggacgcggaaaaagaagaagagcaatccatgctcgcaatggaggatgaaggtacagtgcagctaccgcttgagggccattaccgcgacgacccgagtgttatcaacatctcagacgagatgtcaaaaaccgcgctttggaggaacctgttgatcactgcagataacagcaaagacaaagagagcagtttcccctctaagagttcaccctcatag

SEQ ID NO: 206236 - DNA, 3318 bp, synthetic construct
  misc_feature 1..3318: note = Description of Artificial Sequence: Synthetic coding sequence
  source 1..3318: mol_type = other DNA
atggagatcaaggaccagggcgcccagatggagcccctgctgcccacacggaacgacgaggaagctgtggtcgacagaggaggtacccgttctattctgaaaactcacttcgagaaagaggacctcgaaggccacagaactctgttcattggtgtccacgtgccactgggtgggaggaagtcccacaggagacacaggcaccgcggtcacaagcacaggaagcgagacagagagagagactcgggactcgaggatgggagagagagtccctcttttgacactccttctcagcgcgtgcaatttattctcggaaccgaggatgacgatgaggagcatatacctcatgacttattcacagagcttgatgagatatgttggcgcgaaggggaggacgcggaatggcgagagactgcccgctggctgaaattcgaggaagacgtggaggatgggggcgaaagatggtctaagccatacgtggcgaccttatctttacactcactctttgagttaaggtcatgcatcctgaacggtaccgtcttattagatatgcacgcaaatacactggaggagatcgccgacatggtcctcgaccagcaggtctcctccggacagctgaacgaagatgtgcgacaccgtgtacacgaagccctcatgaagcagcaccatcatcagaatcagaaaaaactgaccaacagaattcccattgtgcgatcgtttgcagacattgggaaaaagcagtccgaaccaaacagcatggataagaatggccaggtggtgtcccctcaaagcgctcctgcatgtgtggagaataaaaacgatgtctccagagagaatagtactgtcgacttttctaaggttgatttacattttatgaagaagataccgcccggagcggaagcaagcaacatactggtgggagaactagaattcctcgaccgtacggtcgtggcgttcgtgagattgagcccggcggttctgttgcaaggactggcggaagttcccatacccacccgctttttgttcattctgcttggtccactaggcaaaggccaacagtaccacgaaatcggccgaagcattgctaccctcatgacagacgaagtgtttcacgacgtggcctacaaggcaaaagatagaaatgacctagtgtctgggatcgacgaattcctcgaccaggtgacagtgcttccgcctggggagtgggacccctccatccggatcgagccccctaaaaatgtgcccagccaggagaaacggaagattccagctgttcccaacgggaccgccgctcatggggaggcagaacctcacggcgggcactctggccccgagttgcagagaactggcagaatttttggagggctgatcctcgatatcaagcgtaaagcaccctatttctggtcagatttcagggacgcgttctctttgcagtgcctcgctagttttctgttcctgtactgtgcctgcatgagccccgtgatcacgtttggaggcctgctaggcgaggccacagagggccgaatcagcgcgatcgaatcgcttttcggtgcaagcatgacgggcatcgcgtacagtctgtttggagggcaaccgttgactatcctcgggagtacaggaccagtgttggttttcgagaaaatcctgtttaagttctgcaaggaatacgggctatcttacctctcactcagggcttccattgggctgtggacagccacactctgcatcattctggtcgccacagatgcatcatctctcgtgtgttatatcaccagatttacggaagaagcatttgcatcgcttatttgcatcatcttcatatacgaggcccttgagaaactgtttgaacttagtgaggcttatcccattaatatgcataacgatcttgagctactgacccagtattcgtgcaattgtgtggagccacacaatccatctaacgggactcttaaagagtggagagaatcaaatattagtgcttctgatataatctgggagaacctgactgtttcagagtgtaaatcactgcacggcgaatacgtgggccgcgcctgcgggcatgatcacccctatgtccctgacgtcctgttttggtccgtaatacttttcttctctaccgtcaccctgtcggcaaccctgaagcagtttaagactagcagatacttccctactaaagtacgcagcattgtaagtgattttgcagtgtttttaaccatcttgtgtatggtgttgattgactacgcgatcggaatccccagcccaaagctgcaagtgccgtccgtcttcaagccgacaagagatgaccgcggctggtttgtgacgccgcttgggcctaacccatggtggacggtgatcgcagctatcatacccgctctcctttgcactatccttatctttatggaccagcagatcaccgcggtcattatcaataggaaagaacataagttgaaaaagggttgtggctatcacttagatcttcttatggtggccgtgatgctgggagtctgcagcattatgggattaccttggttcgtcgccgctaccgtcttgagcataacccatgtgaactcgttgaagctggaatctgagtgcagcgcaccaggcgaacaacctaagtttctgggaattcgagagcagcgcgtgacaggtttaatgattttcatactgatgggtagcagtgtattcatgacatcgattctgaagtttatccccatgcccgtcctctatggcgttttcttgtacatgggggcgagctccctgaagggaatacagttttttgatcgaattaaacttttttggatgccggcgaagcatcagcccgacttcatttacctgcgacatgtgcccctgcgcaaggtgcacctcttcacaatcattcagatgagttgtttgggcctgttgtggataataaaagttagtagagcagccatcgtcttcccaatgatggtgctagccctggtctttgtcaggaaacttatggacttactgttcaccaaaagggagctatcatggttggacgacctcatgcctgaaagcaaaaaaaaaaaactcgaggacgctgagaaagaagaggagcaatctatgttagctatggaagatgaggggaccgtccaattgccattggaaggacactaccgagacgatccgagcgtgataaatatatcggacgagatgagcaaaaccgctctttggagaaacctcctcataacagcagataattcgaaagacaaggagtcttcctttccttcaaaatcaattgagtcgcgtaaggaaaaaaaagccgactcggggaagggcgtggatcgagagacctgtttatag

SEQ ID NO: 206237 - DNA, 1227 bp, synthetic construct
  misc_feature 1..1227: note = Description of Artificial Sequence: Synthetic coding sequence
  source 1..1227: mol_type = other DNA
atggagatcaaggaccagggcgcccagatggagcccctgctgcccaccagaaacgatgaagaggcagttgttgaccgcggaggaacgcgatcgatactgaagacccactttgagaaggaggacctcgagggtcacagaacactgttcattggagtgcatgtccctctgggcggccgaaagtcacatcggaggcacaggcaccgcggtcataaacacagaaagagggaccgcgagagggactccggtctcgaggatggccgtgagagcccttctttcgacaccccttcccagcgggtgcagttcattcttggcacagaggatgatgacgaggagcacataccacatgatctctttacggagctggatgagatctgctggagggagggtgaggatgcagaatggcgagaaaccgctaggtggttaaaatttgaagaggacgtcgaagatggaggcgaacgatggtccaaaccttacgtggcaactctgtctctgcattccctttttgaactccgatcatgtatcctcaacggcacagttcttctggacatgcatgctaacacattagaggagattgccgatatggtcctggaccaacaggtgtcctccggacaactcaacgaagacgtcagacaccgagtgcacgaagctctgatgaagcagcatcaccaccagaatcagaaaaagctgacgaataggataccaatcgtgagaagctttgccgatattgggaagaagcagagtgagccaaactccatggacaaaaacgccggccaggttgtgtctccccagtcggctccggcatgcgtggagaataaaaatgacgtatcaagagagaatagcacagtcgatttctctaaggggcttggcggccaacagaagggccacacaagcccctgtggaatgaaacagcgtcatgagaaaggtccccctcaccagcaggagcgggaggtggacctgcactttatgaagaaaatccctcccggtgcggaggcttctaacatccttgtgggggaattggagttccttgaccgaaccgtggtcgctttcgtccggctcagccctgcagtgctcttacaagggctggctgaagttccaatcccaacaaggtactttatgatgctgcccattaagctgaagattgtcatgacctggtatcaggagctgatgagtttctggatccggctgttgttcagccttctcgaaaacggtatccaggcattcgaatag

SEQ ID NO: 206238 - DNA, 2676 bp, synthetic construct
  misc_feature 1..2676: note = Description of Artificial Sequence: Synthetic coding sequence
  source 1..2676: mol_type = other DNA
atgagccaggtgggcggccggggcgaccggtgcacccaggaggtgcaaggactggtgcacggagctggcgatcttagtgcttcccttgccgagaatagccccaccatgtcccagaacggttacttcgaagactcaagctactacaaatgcgacaccgatgataccttcgaggccagagaagaaattctgggggacgaggccttcgacacagcgaactcctccattgtaagcggggagagtatacggttcttcgttaatgttaacctggaaatgcaggcaacaaatacagagaacgaagctacgagcggtgggtgtgtgcttctgcacaccagccgcaaatacctgaagctcaagaatttcaaagaggagattagagcgcaccgggatctggatggcttccttgctcaagcatccatcgtgctaaacgaaaccgccacctctctggacaacgttttgagaacaatgctcagacgctttgccagggaccccgacaacaatgagccaaattgtaatctagatttactgatggcaatgttgttcaccgatgcaggggcccctatgcgggggaaagttcaccttctgtctgacaccatccagggggtgaccgccaccgtgactggcgtgcgctatcagcagtcctggctgtgcatcatctgcacaatgaaggccctacagaagcggcatgtctgcatctcgcgactggtgcggcctcagaattggggcgaaaattcatgtgaggttagatttgtcattctggtgttggccccccctaaaatgaagtccacaaagaccgccatggaagtggcacgaacgtttgccacgatgttctcagatattgcgttcagacagaaactccttgagacccggactgaggaagagtttaaggaggccctggtccaccaacggcagctccttaccatggtgagccatggaccagtggccccccgcactaaggagcgttctacagtgtcactccccgctcatcgccaccctgaaccccccaagtgcaaggacttcgttccattcggcaaaggcatacgtgaggacatcgcacggcgtttccctctgtaccctcttgacttcactgacggtatcattggtaaaaacaaagctgtgggcaagtatataaccactactcttttcctgtactttgcctgtctacttcctacaatagccttcggatcactgaatgacgaaaacacggatggagccatcgatgttcaaaagacaattgcaggacagagcatcggcgggctgttgtatgccctgttctcgggacaaccccttgtgattttgctgactaccgctcccctcgcactgtatatccaggtgattcgcgtaatctgcgatgactatgacttggattttaatagcttctatgcttggacaggattatggaacagtttcttccttgccctgtacgccttttttaacctgagtctcgtgatgtccttgttcaaaaggagcaccgaagagataattgccctcttcatcagcataactttcgtcctcgacgctgtcaaaggcactgtgaaaattttttggaaatattactatggacactatctggacgattaccataccaaacgcacaagctcgcttgtgtctctgtctggccttggggccagcttaaacgcctccctgcacactgccctgaacgcttccttcctcgcctcccctaccgagttgccttctgcaacacattcaggtcaggctactgctgtcttgtctctgcttattatgctgggcaccctctggctgggatatacgctgtaccagttcaagaaaagcccatacctccacccttgcgtcagggagattttgtccgactgcgcgttgcctatagccgtactcgcattcagcctcatttcatcacacggctttagggagatcgaaatgtctaagttccggtataacccttcagagtcgccctttgcaatggcgcagattcagtctctgtcccttcgagccgtgtctggggcaatgggactcggtttcctgttgtctatgctcttcttcattgagcaaaatctcgtggccgcgctcgtgaacgctcctgagaaccggctcgtgaaggggactgcctaccactgggatcttcttcttctggctatcatcaatacagggctgtctctgtttggattaccttggatccacgcagcttatccgcattccccgttgcacgtgagggccctagctctggtcgaagagagggtggagaacggacacatctacgataccatcgtgaacgtcaaagaaacacggctgactagtctcggagcttccgttctcgtggggctgagtctgttactgttaccggtccccctccagtggatccctaaacccgtcctttacggtctgtttctttacatcgccctcaccagcctggacggaaatcagctagtgcagagggtggcccttttactcaaagagcagacagcgtacccccctactcattacatacggagggtaccacagagaaagatccactacttcaccggccttcaggtgctccagctccttctgttgtgcgcctttgggatgtcttcgcttccctatatgaaaatgattttcccgctcatcatgattgctatgatccctatacgatatattctgctccctcggatcatagaggcaaagtatctcgacgtcatggacgccgagcacagaccatag

SEQ ID NO: 206239 - DNA, 2757 bp, synthetic construct
  misc_feature 1..2757: note = Description of Artificial Sequence: Synthetic coding sequence
  source 1..2757: mol_type = other DNA
atgggcgtgtacggcccccaggaccggagcgagagcgagaagcgggacgtgcaacgtgatcctcccccctggcatcccagacgggaaggcgaacggcctgctagggctagatccctgcctctggccgctgctgggcaggggtttctgcgcaagacatggatttctgagcacgaaaactcacccaccatgtcccagaacggatatttcgaagattcatcctattacaagtgcgatacggatgacacgtttgaagcgagagaggaaattctgggggacgaagcctttgatactgcaaacagctctatcgtgagcggagagtcaatcaggtttttcgtaaacgtaaacctggagatgcaagctaccaatactgagaatgaggcaactagtggcggctgtgttctgctccatacgagcaggaaatatctcaagctcaagaatttcaaggaggagattagagcgcatcgcgatcttgacggcttcctcgcccaggcatccattgtcctgaacgagaccgccaccagtctcgacaatgtgttaagaactatgctgagacgattcgctcgtgaccccgataacaacgaacctaattgcaatctcgacttgctgatggccatgctgtttactgatgccggcgccccaatgcggggcaaggtccatctcttatctgacaccatccaaggggtaacggcgacagtgacaggagttaggtaccagcaaagttggttgtgtattatttgcaccatgaaggctctgcagaagaggcacgtttgtattagtagactcgtgcgacctcagaattggggcgaaaacagttgtgaggtacggttcgtcattttggtgctggcccccccaaagatgaagtccaccaaaactgccatggaggtggctcgaacctttgcaactatgttctccgatatcgccttccgccagaaactgctagaaactcgcacagaagaagaattcaaggaagccttagtgcaccagcgacagttactcacgatggtcagccatggcccggtagcgcctcgtaccaaagagagatctaccgtctccctcccagcgcaccggcatccggaaccaccgaagtgtaaagacttcgttccatttgggaagggaatccgggaggacattgctagacgattccctctctaccccctggactttacggacggtattatcggcaagaataaggctgttggcaaatacatcacaacgacgctattcctgtactttgcttgcctgctgcctactatcgcctttggcagcttgaatgatgagaacacggacggagccatcgatgtgcagaagacaatcgccggacaatcaatcggcggcttgctctatgccttgttctccggccagccattggtgatactgctcacaaccgccccactggccctgtatatacaggttatccgcgtgatctgtgatgactacgacctcgactttaacagtttttatgcctggactggcctgtggaacagcttcttcctggctctgtacgcttttttcaatctgtctttggtaatgtctctgtttaaacgcagtactgaagaaatcattgctctgtttatcagtatcacgtttgtgctggatgctgtcaagggaacggtgaaaattttctggaaatattactatggacactatctggacgactaccatacaaagagaacatccagcctggtatcactgtcaggcctgggcgcttctcttaatgctagtctgcataccgccctgaacgcctcttttctcgcgtcacctactgagctgccctccgccactcattcagggcaggccaccgcggttttgagtctgctcatcatgttggggaccctgtggctgggttacaccttgtatcagtttaaaaagtccccttacttgcatccttgcgtccgcgagatcttgtctgattgcgccctacccatcgctgtgctagccttcagccttattagctctcatggattccgggagattgagatgtcgaagttccgatataaccccagcgaaagccctttcgctatggcacagattcagtccctctcgttgcgggcggtctccggcgcaatgggcctgggctttcttctgagtatgctgttctttatcgaacagaacctggttgccgccctggttaatgctcccgaaaatcgtctggtgaaggggactgcatatcattgggatctactgttactcgctatcataaatacgggacttagcctcttcggactaccttggattcacgctgcataccctcatagcccgctgcatgtcagagccctggctctggttgaagagcgtgtggaaaacgggcatatttacgatacaattgtgaatgtaaaagaaacccgcttgacttctctcggggccagtgttctggtgggactctctctattgctgctgcctgtgccgttgcagtggattccaaagccagtcctgtatggcttgtttctatatattgcactgacctctctggacggtaaccaattggtgcagcgggtcgccttgctgcttaaagagcagacagcctacccccctactcactacatccgtcgggttccccagcgtaagattcattatttcacaggattgcaagtactgcagctcttgttgttgtgcgcctttggcatgtcgtctcttccatacatgaagatgatctttccacttattatgatcgccatgattcccatcaggtacatcctgctccccagaatcattgaggcaaagtacctggatgttatggatgcagaacatcgtccgtag

SEQ ID NO: 206240 - DNA, 951 bp, synthetic construct
  misc_feature 1..951: note = Description of Artificial Sequence: Synthetic coding sequence
  source 1..951: mol_type = other DNA
atggccgccgccacccggcgggtgttccacctgcagccctgcgagaacagcccaaccatgtctcagaatggttattttgaggactcatcatattataaatgtgatacagatgacacattcgaagctcgtgaagagatccttggtgacgaggcctttgataccgctaactcaagcatcgtcagcggtgaatcgatccgcttcttcgttaacgtgaatctggagatgcaggcgactaacaccgaaaacgaggcaacttcaggcggttgcgtcctcttgcacacatcgagaaagtacctgaagctgaaaaactttaaggaggaaattcgcgcgcatcgggaccttgacggattcctggcacaggctagtatagtgctgaacgagactgccacttcccttgataacgtgctgcggaccatgctgcggagatttgctcgggatcctgataacaatgaacccaattgcaacttggatctgctcatggcaatgctgttcaccgacgccggcgcaccgatgagaggaaaggtgcacctgctcagcgatacaatccagggcgtaacagctacagtcactggcgtgagatatcagcagagctggctgtgcatcatctgcaccatgaaagcccttcagaagcgacatgtttgcatctcaaggctagtccggcctcagaactggggtgagaattcctgcgaagtccgctttgttattctggtgctggcacctccaaaaatgaaaagcacgaagactgccatggaagtggcacggacttttgcaaccatgttttcagacatcgcattccgccagaaattattagagacgcgcacagaagaagaattcaaagaggccctcgtgcaccaacgtcagctcctaacaatggtctcacacgggcctgtcgccccccgcacaaaggaacggtcaaccgtttcactccccgcccatagacacccagaatag

SEQ ID NO: 206241 - DNA, 2628 bp, synthetic construct
  misc_feature 1..2628: note = Description of Artificial Sequence: Synthetic coding sequence
  source 1..2628: mol_type = other DNA
atggccgccgccacccggcgggtgttccacctgcagccctgcgagaattctcccaccatgagccagaatggctactttgaagattcctcctactataagtgcgatactgacgacacctttgaggcacgggaggaaattcttggggatgaagcatttgacactgcaaattcaagtatcgtatcaggcgagtcaatcagattcttcgtaaatgtgaacttagaaatgcaggcgaccaacaccgagaacgaagcaaccagcgggggctgtgtcctactgcacaccagcagaaagtacctgaagctgaagaattttaaagaggaaatccgggcgcaccgagatctagatggattcctggcgcaggcatcgatcgtcctgaatgagaccgctaccagtttggacaatgtgctgaggaccatgctacgtcgatttgccagagaccctgacaacaacgagcccaactgtaacctggatctgcttatggctatgctgtttacggacgccggagctccaatgcgcggcaaagtgcatcttctctccgatacaatccagggagtgaccgccacagtgactggcgttcgctaccagcagagctggctctgtatcatctgtactatgaaagccttacaaaaaaggcacgtctgcatttcccgcctggtcaggccccagaactggggcgagaactcatgtgaagtccggtttgtgattctcgtcctggctccccctaaaatgaagagcactaaaaccgccatggaagttgcccgcactttcgccacgatgttctccgatatcgcttttagacagaagctgctggaaaccagaaccgaagaagaatttaaggaggcgctcgtgcatcagcgccagctactcaccatggtctcccatggacccgtggcccccagaaccaaagagcgaagcactgtgtcgcttccagctcataggcacccggagccgccgaagtgtaaggacttcgtgccctttgggaagggaataagagaagacattgctaggcgcttcccgctctatcctctcgacttcaccgatgggatcataggaaagaacaaggcagtcggaaaatacatcacgactacgctgtttctatacttcgcctgtctgctgccaaccatcgccttcgggtcactaaacgatgagaatacggacggcgccattgatgtccagaaaacaatcgcgggacagtccataggagggctcctctatgcactcttcagtggacagcctttggttatactccttaccaccgcacccctggctctctacattcaggtgataagggttatttgcgacgactacgacctggatttcaactccttctacgcctggaccggtttgtggaattcctttttccttgctctctatgcatttttcaacctctcattggtgatgtcactctttaagaggagcaccgaggagataattgccctcttcatcagcattactttcgtcttggacgccgttaaggggacagtcaagatcttctggaagtattactatggccactacctggatgactaccacactaaaagaacttcgtccctggtgtctctatcgggattaggggcttcactcaatgcatccctccacacagctttaaacgcctcttttcttgcctcccctacggagctcccgagcgcaacacacagtgggcaggcgaccgcggtgctgtccctgctgataatgttgggtacactctggctagggtatactctgtatcaatttaagaaaagcccctatttacacccttgtgtgagggagatattatctgactgtgccctgcctatcgccgtcctggcttttagcttgatatccagtcacggctttagagaaatcgaaatgtcaaaattccggtacaacccaagtgagagccctttcgctatggctcagatacagtccctgtcactcagggctgtgagtggcgcaatggggctgggctttctcctctccatgctgttcttcattgagcagaatctggtggccgctctggtcaatgcccctgaaaatcgactagtaaaaggcaccgcctaccactgggacttgcttctgctggcaatcattaatacaggtttgtccctgtttggtttgccctggattcacgccgcctatccacacagccccttacatgtgcgtgctctcgcacttgtagaggagcgggtggagaacggccacatttacgacacaatcgtcaacgttaaggagacccggctgactagcttaggcgcctcagtgctggtgggactttctctgctcctgctgcccgtccctcttcagtggatccctaagcccgtgctgtacgggctgtttctgtatattgcactaaccagtctagacggcaatcagctggtgcagagagtggccttgctgttaaaggaacagacggcctatcccccgacccattatattcgccgcgtcccacagcgtaaaattcattactttacagggttgcaggttctgcagctgctcctactctgtgcttttggtatgagcagcctaccttatatgaaaatgatttttccattgatcatgatcgctatgattcccatccgatatattctgctgccaagaatcatcgaggccaagtatctggatgtcatggacgccgaacatcggccgtag

SEQ ID NO: 206242 - DNA, 1113 bp, synthetic construct
  misc_feature 1..1113: note = Description of Artificial Sequence: Synthetic coding sequence
  source 1..1113: mol_type = other DNA
atgaccctggccagccggctgagcaccgccgccaacaccggccagatcgacgatccccaggagcaacacagggtcatttccagcaacctcgcgcttattcaggtgcaggccacagtcgttggcctgcttgccgccgtcgccgccttgcttcttggcgttgtttctcgcgaagaggtggacgtggcaaaagtcgagctgctctgtgcctcaagtgtgctcaccgccttccttgccgccttcgcacttggggtgttaatggtctgtatcgtgattggggctcgtaaactgggtgtgaatcccgacaatattgcaactcccatcgcagcgtctctgggcgatctcattacactgagcatcttagcgctggtgagcagtttcttctacaggcacaaggattctaggtacctcacccctttggtctgcctttcctttgctgctttgactcccgtttgggtacttattgctaagcagtcccccccaatcgtgaaaatcctgaagtttggctggtttccaataatactcgctatggtgattagctcatttggaggactcattcttagcaagactgtgagcaagcagcagtataagggcatggctatttttacgcctgtgatctgtggcgtgggtggaaacctggtggcaatacaaacctctaggataagtacatacctccacatgtggtcagctcccggggttctgcccttacagatgaagaagttctggcctaatccatgtagcacattctgcacaagtgagatcaactccatgtcagcccgtgtgttgctgctacttgtcgtcccaggacacctcatatttttttacataatctacctcgtggagggacaatcagtcattaacagtcaaactttcgtcgtgctgtatctcctagccggtctgatccaagttacaatcctgctttacctggcagaggtaatggtgagattgacttggcatcaagctctagaccccgacaatcattgcattccctatttgactggtctgggtgacctgctcggcacaggccttctggccttgtgtttctttacagattggctgttaaagtctaaagccgaacttggaggtatcagcgagctcgctagcggtcccccttag

SEQ ID NO: 206243 - DNA, 1542 bp, synthetic construct
  misc_feature 1..1542: note = Description of Artificial Sequence: Synthetic coding sequence
  source 1..1542: mol_type = other DNA
atgagcagcaagcccgagcccaaggacgtgcaccagctgaacggcacagggccaagtgccagcccgtgttcatcagacggaccaggccgcgagcctctggccggaaccagcgagtttctgggccccgatggggccggggtggaagtcgtgatcgagagcagagctaatgccaaaggcgtgagagaggaggacgctctgctggagaacgggtcccagtctaatgaatcagacgacgtgagcactgatcggggtccggccccgcccagtccattaaaggagacaagcttttcgatcggtctgcaagttctgtttccattcctgttggccggcttcggcacagtagcagctggaatggtgctggatattgtgcagcactgggaggttttccaaaaggtgactgaggtgttcattttagtcccagctctgcttggtctgaaggggaacctcgagatgactctggccagcaggctgagcacagctgccaacataggacatatggataccccgaaggagctgtggagaatgatcactggcaacatggctctgatccaggttcaggcgactgtggtgggcttcttagcctcaatcgcagctgttgtcttcggctggatccctgatggccacttctctatcccccacgcgtttttgctctgcgccagtagtgtggccaccgccttcatcgccagccttgtcctgggtatgatcatgataggggtgataattggcagtagaaagatcggaattaacccagataacgtcgctacccctattgcggcttccctcggcgacctgattactctagcattgctgtccggcatctcttggggtttgtacctagaactgaatcattggagatatatatatcccctggtttgcgcattttttgtggcccttcttcctgtgtgggttgtactcgctcggaggagcccggctactagagaggttctctattctggatgggaacctgtgatcattgccatggccatctcatctgtcgggggactaatactcgacaaaactgtgtcagatccgaattttgctggcatggcggtctttacccctgtcattaatggagtgggcgggaatttggtggcagtgcaggcgtcaaggatctccacatttctccacatgaacggaatgccaggggaaaacagtgagcaggcccccagaaggtgccccagtccttgcactactttcttttcgcctgacgttaacagcagatcagctcgcgtgctctttttgctggtagtgcccgggcatttggtgttcctgtataccatctcctgcatgcagggcgggcacaccacgctgacactgatattcattatcttctacatgacggccgctctccttcaagtactcatcttgctgtacattgctgattggatggtgcattggatgtggggtagggggctagaccccgacaacttcagtatcccataccttacggctctgggcgatttgctcggcaccgggttgctggccctgtcatttcatgtgttgtggttgattggggatcgcgacacagacgtgggcgactag

SEQ ID NO: 206244 - DNA, 1722 bp, synthetic construct
  misc_feature 1..1722: note = Description of Artificial Sequence: Synthetic coding sequence
  source 1..1722: mol_type = other DNA
atgaccaacagcaagggccggagcatcaccgacaagaccagcggcggcccatcaagcgggggggggtttgtggattggactctgagactgaacaccatccagagtgacaagtttctgaacctgcttctgtcgatggtaccagttatctaccagaagaaccaggaggacaggcacaaaaaagccaatggcatttggcaggacgggctgtccaccgcagtacagaccttcagcaatcggagtgagcagcacatggaataccattccttctctgaacaatcctttcacgctaataatggacatgccagctctagttgctcacagaaatacgatgactatgcaaactacaactattgtgatgggcgcgagacatcggagaccactgctatgctgcaggatgaggatatcagtagtgacggggatgaagacgcaatcgtggaggttactccaaagctccccaaagagtcaagtggcataatggcactgcaaatcttggtgccctttttactggcggggttcggaacggtgtccgctggtatggtgctcgatattgtgcagcattgggaagttttccggaaagtaacggaggtgtttattcttgtccctgccctcctgggtctaaagggaaatctggagatgacgttggcgtccagactgagcacggctgtgaacatcggcaagatggactcaccaatagagaagtggaacctcatcatagggaatctggccttaaaacaggtgcaggccactgtcgtggggtttttagcggctgtggccgccatcatcttgggatggattcccgaggggaagtactatctcgaccattctatccttctatgctccagtagcgttgccaccgcctttatcgcgagcctgctgcagggtattattatggtcggggtgatagtcgggtcaaagaaaacaggaatcaacccagataacgtcgcgacacccattgccgcatccttcggtgatttgatcactttagccatccttgcttggatctcacagggcctctacagctgtttggagacttactactacatatcaccactcgtgggggtgttttttctggccctaactccgatttggatcatcattgctgctaagcatcctgcgaccaggacagtcctccactcaggatgggaaccagtcattactgccatggttatctcctccattggagggttgattcttgacaccactgtgtccgaccccaacttagtggggattgtagtttataccccggtcattaacggcatcggcggaaatctggtggctatccaggccagtcgcataagtacttatctgcatctgcattccatccctggtgagttaccagacgaaccgaagggctgttattatccttttcggaccttcttcgggccaggagtgaataacaagagtgcccaggtactgctgctcctcgtaattccgggacacctcatcttcctgtacacgatccatctgatgaaatccggccacacctctcttacaatcatctttatcgtggtctatttgttcggtgctgtgctgcaggtctttaccctgctgtggatcgcagattggatggtccaccacttttggcgaaaggggaaggaccccgactccttttccatcccatatctgaccgctctgggcgatctgctgggcacagccctgttggcgttgtctttccactttctgtggcttattggagatcgggacggggacgtgggtgattag

SEQ ID NO: 206245 - DNA, 369 bp, synthetic construct
  misc_feature 1..369: note = Description of Artificial Sequence: Synthetic coding sequence
  source 1..369: mol_type = other DNA
atgaccaacagcaagggccggagcatcaccgacaagaccagcggcgggccttcaagtgggggcggctttgtcgactggactctcagattgaacacaatccaaagcgacaagttcctcaatctcttgctttccatggtgccagtgatttatcagaaaaaccaggaggaccgccataaaaaggcaaacgggatctggcaggatgggctgagcacagctgtccagacctttagcaatcgctccgaacagcatatggaatatcacagtttcagcgagcagtcatttcacgcaaataatggacatgcaagcagttcatgttctcagaagtatgacgactatgcaaactacaactactgcgacggcagggagtag

SEQ ID NO: 206246 - DNA, 432 bp, synthetic construct
  misc_feature 1..432: note = Description of Artificial Sequence: Synthetic coding sequence
  source 1..432: mol_type = other DNA
atgaccaacagcaagggccggagcatcaccgacaagaccagcggcggaccgagtagcggaggaggatttgtcgactggaccctcagactaaatactatccagagcgacaagtttctaaatctcctgctgagcatggttccagtgatctatcagaagaatcaggaagacaggcacaagaaggccaatggcatctggcaggatggcctcagtacagccgtccagacgttcagcaaccggtcagaacaacacatggaataccactctttcagtgagcaaagctttcatgctaacaatggccacgcaagtagctcgtgctcacagaagtacgatgattacgctaattataattactgcgatggaagagagacctctgaaaccacagctatgctgcaagacgaagatattagctccgacggagacgaggacgcttag

SEQ ID NO: 206247 - DNA, 141 bp, synthetic construct
  misc_feature 1..141: note = Description of Artificial Sequence: Synthetic coding sequence
  source 1..141: mol_type = other DNA
atgaccaacagcaagggccggagcatcaccgacaagaccagcggcggtcccagctcaggcgggggctttgtggattggacattacggctcaacactattcagagcgataagttcttgaacttgctgctctcgatggtgtag

SEQ ID NO: 206248 - DNA, 219 bp, synthetic construct
  misc_feature 1..219: note = Description of Artificial Sequence: Synthetic coding sequence
  source 1..219: mol_type = other DNA
atgaccaacagcaagggccggagcatcaccgacaagaccagcggcggtccatcttccggcggcggattcgtggactggacactcagactgaatacaatccagagcgacaagtttctcaatctgcttttaagtatggtgccggttatttatcagaagaatcaggaagatagacataagaaagccaatggtatttggcaggacggccttagtacagcatag

SEQ ID NO: 206249 - DNA, 39 bp, synthetic construct
  misc_feature 1..39: note = Description of Artificial Sequence: Synthetic coding sequence
  source 1..39: mol_type = other DNA
atgaccaacagcaagggccggagcatcaccgacaagtag

SEQ ID NO: 206250 - DNA, 231 bp, synthetic construct
  misc_feature 1..231: note = Description of Artificial Sequence: Synthetic coding sequence
  source 1..231: mol_type = other DNA
atgaccaacagcaagggccggagcatcaccgacaagaccagcggcggcccttcatcaggggggggcttcgtggactggaccctgcgcctgaatacaattcagtccgacaaatttcttaatctcctcctgtctatggtacccgttatctatcagaaaaaccaggaggataggcataagaaggccaatggcatttggcaggatggcttgagcactgcggtgcagacgttctag

SEQ ID NO: 206251 - DNA, 285 bp, synthetic construct
  misc_feature 1..285: note = Description of Artificial Sequence: Synthetic coding sequence
  source 1..285: mol_type = other DNA
atgaccaacagcaagggccggagcatcaccgacaagaccagcggcggcccttcaagcggtggcgggttcgtagactggacactacggcttaataccatccagagcgacaaattcctgaatctactcctgtccatggtgcctgtgatttaccaaaaaaatcaggaagaccgccacaagaaagctaacggcatttggcaggacggcctttctactgcagtgcagactttctccaataggagcgaacaacacatggagtaccactcctttagcgagcagagtttctag

SEQ ID NO: 206252 - DNA, 1524 bp, synthetic construct
  misc_feature 1..1524: note = Description of Artificial Sequence: Synthetic coding sequence
  source 1..1524: mol_type = other DNA
atggacggcaccgagacccggcagcggcggctggacagctgcggcaaacctggagagcttggcctgccacacccactgtccacaggcggtctgccagtcgcaagcgaggatggcgccctcagagctcccgagtctcagtcagtgacaccaaagcccctagagactgagccctctcgcgaaaccacctggtccattggcttgcaggttaccgtgcccttcatgtttgccggtttgggactgagctgggctggtatgttgctagattatttccagcactggccggtctttgtagaagtgaaggatttgcttaccctggtgccgcccttggtaggcctcaagggtaacctggagatgactttggcttcaaggctttcaaccgctgcaaatacaggacagattgatgaccctcaggagcaacaccgggtaatctcatcaaacctggcgctaatccaagtccaagccacggtggtaggtttgctggcggctgtggcagctctcctcctcggagtggtatcaagggaagaggtggacgtggcaaaggtggaactgctttgcgcttcttcagtactgactgccttcctagcagccttcgcccttggcgtgctaatggtgtgtatcgtgatcggcgctaggaagttaggggtgaaccccgacaatattgcaacgccgatcgcagcttccttgggcgacctaataaccctcagcatacttgccctcgtgtcatccttcttttatcggcacaaggactccagatacctgacaccattagtgtgcctcagtttcgcggctctcactccggtgtgggtcttaatagctaagcagagccctccgattgtgaagatcttaaaatttgggtggtttccaatcattctagcaatggttatttccagctttggaggtcttattctatctaagaccgttagcaaacagcagtacaaaggtatggccatctttacgcccgtaatttgcggcgtcggtggcaacctggtggccatccagacaagccggatttccacctatctacacatgtggtctgcacccggcgtgttacctctccagatgaaaaagttttggccaaatccgtgttccaccttttgcacctcggaaatcaattctatgagtgccagagttctgctcctgttggttgtcccaggacatcttatttttttttatattatctacttggtagaagggcagtccgttattaacagtcagactttcgtcgtcctttacttgttggccgggctgatccaggtgaccatactcctgtatctagccgaagtcatggtaaggctcacatggcaccaggcgctggatccggacaatcattgtatcccttatcttacgggcctaggagacctgctcggttcttcctctgtgggtcataccgctgcggtccctagacgatgtacagcctcaccaggctgggggctcatacagccatttatttgcacccagcatctaattgtgagcctcctgagtttctactttccgttttgcttactagctaagactagtatatag

SEQ ID NO: 206253 - DNA, 1416 bp, synthetic construct
  misc_feature 1..1416: note = Description of Artificial Sequence: Synthetic coding sequence
  source 1..1416: mol_type = other DNA
atggacggcaccgagacccggcagcggcggctggacagctgcggcaaaccaggggagctgggcttgccacaccctctatccacaggcggccttcccgtggcctcggaggacggggcgctacgggcaccagaaagccagtcggtgactcctaaaccactggagaccgagccctctagagagacgacttggagcataggcttgcaggtcacagtgccattcatgtttgctgggcttggactgtcatgggcagggatgctcctggactacttccaggccaatacaggccagatagacgacccccaggaacagcaccgcgtgatcagctccaatctggcgctgatccaggttcaggccaccgtcgtgggacttctggctgctgtggctgcgcttctgctcggagtggtgagccgggaggaagtggacgtggccaaagtcgagctgctgtgtgcctctagcgtcctcaccgccttcctggctgccttcgccttgggcgtcctgatggtgtgtatcgtaatcggcgcccgaaagctcggggttaatccagataacatcgctacccctattgcagcctccctgggggatctgataaccctttccatattagcactagtgtcatcattcttctacagacacaaggattctcgctaccttactcctctggtgtgtcttagcttcgcggcactcactcctgtgtgggtgctgatcgccaagcaatctcctcccatcgtaaagattttgaaattcggctggttccctataattctggccatggttattagctcctttggtggacttattctttcgaagaccgtgagcaagcagcaatacaaaggcatggcgatcttcacacctgtgatctgcggggttgggggaaatttagtcgccatccagaccagtagaatctctacctatctgcatatgtggtccgcacctggagtcctaccactccagatgaaaaagttttggcccaatccatgtagtactttttgtaccagcgagattaattctatgtcggccagggtgttactgctccttgtggtgcctgggcacttaatcttcttttacatcatctacctggttgaggggcaatccgtcatcaactcacaaacattcgttgtgctgtacctactggcagggctgatccaggtcacgattctgctgtatctcgccgaagtcatggtgcgtctgacatggcaccaggctcttgatcccgataatcactgcattccttacctcaccggcctgggagatctgctgggtagctcctctgtcgggcacaccgccgctgtcccccggcggtgcacagccagtcctggctgggggctgatacagcccttcatctgcacgcagcacttaatcgtctccttgctctctttttacttccccttctgcctcctggctaaaacaagtatctag

SEQ ID NO: 206254 - DNA, 1464 bp, synthetic construct
  misc_feature 1..1464: note = Description of Artificial Sequence: Synthetic coding sequence
  source 1..1464: mol_type = other DNA
atggacggcaccgagacccggcagcggcggctggacagctgcggcaaacccggagagcttgggctcccccatccgctgtctacaggagggctgccagtcgctagcgaagatggggcactgagggctcccgaaagccaatctgtcacgccaaaacccttggaaactgaaccgtctcgggagaccacctggagtattgggttgcaggtcaccgtgccattcatgttcgcaggactgggcctgagctgggctgggatgttacttgattactttcagcattggccagtcttcgtcgaggtcaaggatctgctcactctcgtgcctcccctggtgggcctaaaaggaaaccttgagatgacactggcatccagactgagcactgcagccaacaccggccagattgatgatccccaagagcagcatagagtgatctccagtaacctcgccctgattcaagtccaggccacggtggttggcctcttggccgccgtggcagcgttactcttgggcgtcgtaagccgggaggaagttgacgtggcaaaagtggagctgctctgcgcctcctctgtgcttactgcatttctggctgctttcgcattgggcgtattgatggtctgcatcgtcatcggcgcccgaaagctcggtgtgaatcctgacaatatcgctacgccaattgccgctagcctgggagatctgattaccctgagtatcctggccctcgtttcatccttcttctaccgacacaaggactccagatacctgacgcctctggtgtgcttgtcgtttgctgctctgacacctgtgtgggtcctgattgccaaacaaagtccgcccatagtcaaaatcctgaagtttggctggttccctatcatcctggccatggtgatctcgtcctttggcgggcttatcctttccaagaccgtctctaagcagcagtataaagggatggcaatcttcacaccagtaatatgcggcgtgggggggaatctagttgcgatccagacttcccggatatccacgtatctgcatatgtggtcagctccaggcgtgctcccgctccagatgaagaagttctggccaaatccatgctcaactttctgtactagcgagatcaattccatgagcgctagagtgttgctgctcctagtagtgcccggacacctgattttcttctacatcatctacctggtcgagggccaaagtgtgatcaacagtcaaacctttgttgtgctgtacttacttgctggactgatccaggtgaccatcctgctctacctggcggaggtgatggtgagattgacttggcatcaagccttggaccccgataatcactgcattccgtacttgaccggcctcggtgacctgctgggcactggtttgctcgccttgtgcttcttcactgactggctactcaaatctaaggcagagcttggcggtatctctgagctggctagtgggccaccctag

SEQ ID NO: 206255 - DNA, 1386 bp, synthetic construct
  misc_feature 1..1386: note = Description of Artificial Sequence: Synthetic coding sequence
  source 1..1386: mol_type = other DNA
atggtggtgacccagctgaacctggagttctgcttccagggcaagaagctgagaggcttctcttgcgaacttaccaggtcacctcatggtgttctcccggagtcattcttcaccataatgtgtcaggtcgtagtgcctattttgctcagcggactgtgcatgatgaccgctggcctcgttatgaataccatccagcactggcccgtattcgtggaggtgaaagacctgctgacattggtgcctccactcgtagggctcaaaggaaacttagaaatgactctggcgagcaggttgtctaccgctgccaacactgggcagatcgatgatccacaggagcagcatcgggtgatatcaagcaatcttgccctgattcaggtccaggctactgtggtggggctgctcgccgcagtggcagcactcctgctgggggtcgtctctcgcgaggaggtggacgtggcaaaggtagaactactttgcgcttcctcagtgttgaccgcttttctagcggccttcgcgttaggggtgctgatggtatgtattgtgatcggcgcccgcaagttgggggtaaatcccgacaacattgcaacacccattgctgccagtctgggtgacctcatcactcttagcatacttgcattggtcagcagttttttctacagacacaaagactcaaggtatctgactccactggtttgcttgagtttcgctgccctgacccctgtgtgggtcttaattgcaaagcaaagtccccccatagtcaagatcctcaagtttggctggtttccaattatcttggctatggtgatctccagtttcggagggctgatcctcagcaaaaccgtctcaaagcaacaatacaagggtatggctattttcacccccgtgatttgtggcgtggggggcaaccttgttgcaatccaaacaagtcggatttcgacgtacttgcacatgtggtccgctccaggagtgcttccccttcaaatgaagaagttttggccaaacccctgctccactttttgtacaagcgagatcaatagtatgtcagcaagggtattactcctcctggtggtgccagggcacctgattttcttttatatcatttatcttgtcgagggccaatcagtgataaatagtcagacatttgtggtcctttacttgttggcagggctcatacaggtcactattttactatatctggccgaggttatggtacgtctgacgtggcaccaggctctggacccagacaaccattgcattccatatctgaccggtctcggagatcttctcggaacgggcctgctagccctatgtttttttacagattggctcctgaagtcaaaggctgaactcggggggatttcagagcttgcaagcgggccgccctag

SEQ ID NO: 206256 - DNA, 1437 bp, synthetic construct
  misc_feature 1..1437: note = Description of Artificial Sequence: Synthetic coding sequence
  source 1..1437: mol_type = other DNA
atggacggcaccgagacccggcagcggcggctggacagctgcggcaagcctggcgagcttggacttccccaccccttgtctactggagggctccctgtcgcctctgaagatggagcattacgcgcacctgagagtcaatctgttacacctaaacctctggagacagagccatctcgcgtgactgtcccattcatgttcgccggcttaggcctctcctgggcgggaatgcttctagattatttccagcactggcccgtatttgtagaagtaaaggatctgttgacgctagtacccccattggtaggcctgaagggcaaccttgagatgaccctggctagccgcctttcaaccgctgccaacacagggcagatagacgacccccaggaacagcatagagtgattagcagcaaccttgcgctgatacaggttcaagccactgtggtgggtctgctggccgccgtggccgcacttttgctgggagttgtctcacgcgaagaggtggatgtggctaaggttgagctcctgtgtgcctcatctgtgctgactgcttttcttgctgcattcgctctgggagtcctcatggtgtgtattgttatcggtgcccgaaagctgggagtgaacccagacaacatcgccacgcccatcgccgcttctctcggcgacctcatcacactcagcatcctggcgctggtgtcttctttcttttaccggcacaaggactcccgatacttaacaccgctcgtgtgcctttcattcgccgcactgacaccagtttgggttttgattgccaagcagtcccctccaatcgtcaaaatcttaaaatttggctggtttccgattatcttggctatggtcatttcgtcctttggaggcttgatcttgtctaaaactgtgtccaaacagcaatataagggtatggctatattcacacccgttatttgtggagtcggggggaatcttgtcgcgatccagaccagcaggatctcaacgtacctgcacatgtggagcgccccaggtgtcttacccctgcagatgaagaaattctggccaaacccttgtagcacattttgcacctcagagatcaattctatgtctgcacgcgtcctactcctgctggtggtccctggccacctcatattcttctatatcatataccttgtcgagggtcaaagcgtgatcaactcccaaacgttcgtggtgctgtatttactggcaggactgattcaggtgacaatcctcctctatctagccgaggttatggttagactaacctggcaccaggctttggacccagataaccactgtattccttacctaaccggtctgggggacctccttgggacaggcctgttggcattgtgcttttttaccgactggttattaaagagcaaagctgagcttgggggaatctctgaactggccagcggtcctccctag

SEQ ID NO: 206257 - DNA, 459 bp, synthetic construct
  misc_feature 1..459: note = Description of Artificial Sequence: Synthetic coding sequence
  source 1..459: mol_type = other DNA
atggacggcaccgagacccggcagcggcggctggacagctgcggcaaacccggagagctcgggttgcctcacccactgtccaccggtgggctgcctgtggccagcgaagacggagcactccgagcgcccgaaagccagtcagtcacacccaagcccctggagactgagccttcccgggagactacatggagcataggtctgcaagtgaccgtaccctttatgtttgctggcctgggactgagttgggctggcatgctcttggactattttcaacattggccagtgttcgtcgaagttaaggacttgctcacactggtgccacctctggtggggctgaagggaaacctggagatgactctggctagcagattatccaccgctgcaaacaccggacaaatcgatgatcctcaggaacagcatcgcgtgatcagctccaatctggcactgatccaagtctag

SEQ ID NO: 206258 - DNA, 459 bp, synthetic construct
  misc_feature 1..459: note = Description of Artificial Sequence: Synthetic coding sequence
  source 1..459: mol_type = other DNA
atggacggcaccgagacccggcagcggcggctggacagctgcggcaagccgggcgagttgggactcccgcaccctctgagtaccggaggtctgcccgttgcatctgaggacggcgcattgcgggcccccgagtcacagtcggttacaccaaagcccctggaaacagagccaagtagggagaccacatggtctatcggccttcaagtgaccgtaccttttatgttcgcagggcttggccttagctgggctggaatgctgctggactattttcagcactggccagtcttcgtggaagtgaaggatctcctcacattggtgccacccctagtgggccttaagggaaacctcgagatgaccctggcaagcaggcttagtaccgcggccaacactgggcagatcgacgatccccaggagcaacacagagtaatatcatctaatcttgctcttatacaggtgtag

SEQ ID NO: 206259 - DNA, 261 bp, synthetic construct
  misc_feature 1..261: note = Description of Artificial Sequence: Synthetic coding sequence
  source 1..261: mol_type = other DNA
atggacggcaccgagacccggcagcggcggctggacagctgcggcaaacctggtgaacttgggctgcctcaccccttgagcacaggagggttaccagtcgcaagcgaagacggggccctccgcgcccctgagagtcaaagcgtgaccccaaagcccctagagacagagccctctagagagactacttggtcaatcggtctgcaggtgaccgtaccattcatgtttgccggattgggccttagttgggccggaatgctgtag

SEQ ID NO: 206260 - DNA, 606 bp, synthetic construct
  misc_feature 1..606: note = Description of Artificial Sequence: Synthetic coding sequence
  source 1..606: mol_type = other DNA
atggacggcaccgagacccggcagcggcggctggacagctgcggcaaacccggcgaattgggcctgccacaccctctaagcaccggaggtctgcccgtcgcaagcgaggatggagcacttcgcgcccccgagagtcagtctgtgacacccaaacccttagaaaccgagccttctagagagacaacatggtctatcgggcttcaggtgacagtccccttcatgtttgctggactgggcctttcttgggcgggaatgttgttggattacttccaacactggccagtgtttgtggaggtgaaagacctcctcaccctggtccctcccctggtcggattaaaaggaaacttggagatgacactggcaagtcggctgtcaactgccgccaacacgggccaaatcgacgatccgcaggagcaacaccgggttatctcctcgaacctggcgctgatacaagttcaagctaccgtcgtgggtttgctcgccgccgtagcagccctgctgctgggggtcgtgagccgggaggaggtagacgtggcaaaagtggagctgttgtgcgcaagcagcgttctgacggcttttctggctgccttcgcgctgggtgagtag

SEQ ID NO: 206261 - DNA, 414 bp, synthetic construct
  misc_feature 1..414: note = Description of Artificial Sequence: Synthetic coding sequence
  source 1..414: mol_type = other DNA
atggacggcaccgagacccggcagcggcggctggacagctgcggcaagcctggtgagttaggattacctcacccattaagcacgggcggcctacctgttgcctctgaagatggcgccctgagggcccctgagtcgcagtctgtaactcccaagcctctggaaaccgagccatctagagaaactacttggtctatagggctccaagtgacagtaccctttatgttcgcagggctaggtctgtcttgggccggcatgcttttagactactttcaggcgaatacaggtcagattgatgatccgcaagagcaacacagagtgatttcttcgaatctcgctctgatacaggtgcaggccacagttgtgggcctccttgccgcagtagccgcactgctcttgggcgtcgtgagtcggtag

SEQ ID NO: 206262 - DNA, 459 bp, synthetic construct
  misc_feature 1..459: note = Description of Artificial Sequence: Synthetic coding sequence
  source 1..459: mol_type = other DNA
atggacggcaccgagacccggcagcggcggctggacagctgcggcaagccaggagagctgggcctaccccaccccctatcaacaggtggtctcccagttgcgtcggaggacggggcgcttcgagcccccgaaagccaaagcgtgactcctaagcccctcgaaactgaacccagtagagagactacttggtcaatcgggctgcaggtgaccgtgcctttcatgttcgctggcctgggcctgagttgggcagggatgttgctcgattactttcaacactggccggttttcgtggaggtgaaggacctactgaccttagtcccgcctctagtcggccttaaaggaaaccttgaaatgactcttgccagtcgactcagcacggccgctaataccggccagattgacgacccacaggagcagcatcgagtgattagttccaatcttgcgctgatccaggtgtag

SEQ ID NO: 206263 - DNA, 1680 bp, synthetic construct
  misc_feature 1..1680: note = Description of Artificial Sequence: Synthetic coding sequence
  source 1..1680: mol_type = other DNA
atggcccccaccctgcagcaggcctaccggcggcggtggtggatggcgtgcacagctgtgcttgaaaatcttttcttctcagccgtgctcctgggctgggggagccttctgattatcctgaagaacgagggcttctactcctcgacatgtcccgccgaatctagcaccaatactactcaggatgagcagcgaaggtggccaggttgtgaccagcaagatgaaatgctgaatctcggctttactatcggaagctttgtccttagcgcgacaacgctgcctcttggaatcctgatggaccgattcggcccccggccagttcgtctggtgggctccgcgtgctttaccgcctcttgtaccctcatggccttggcttctagggacgtggaggcactgagtccactcatatttctggcactgtctctgaatggcttcggtggtatatgcctgaccttcactagcctgacgttacccaacatgtttgggaatctacgcagcacattgatggcactgatgatcggtagctatgctagctcagctataaccttcccggggattaagctcatatacgacgccggagttgcattcgttgtcatcatgttcacatggtccggattggcctgtttgatttttctgaactgtactctgaactggcctattgaggcttttcctgcaccagaagaggtcaattacacaaagaaaatcaagttgagcggcctggcactggaccataaagtaaccggggatttgttttacactcacgtgacgaccatgggtcagagactatctcagaaagcaccaagtcttgaggatgggagcgatgccttcatgagtccccaggacgttagagggacgtctgaaaacctgccagagcgctccgtgcctctgcgaaaaagcttgtgttcaccaacctttctgtggtctctgctgacaatgggcatgacccagctacggattatcttttatatggctgccgtgaataaaatgctggagtatttggttactgggggccaggaacatgagactaacgagcagcagcagaaagtggccgagaccgttggtttttacagcagcgtcttcggggccatgcagctgctgtgtctattaacgtgccctctcatcggctatattatggattggcggatcaaagactgtgttgacgctcctactcaaggcaccgtgctgggggatgcacgggacggcgtggctactaagagtattagacctcgatactgcaaaatccaaaagctgaccaatgctatctcggcattcacactgaccaaccttctcttagtcggctttgggatcacatgcctcatcaacaacctgcatctgcagtttgtcactttcgtgttgcacacaatagtgagaggcttttttcattccgcgtgcggcagcctctacgcagctgttttcccttctaaccattttggtacacttaccggcttacaaagcctaatatcagctgttttcgccctgctgcaacagccactttttatggctatggtgggcccgctgaagggcgagcctttttgggtcaatctgggactgctgctcttctcgttgctgggctttttgttgccttcctacctgttttattaccgtgcacggttgcaacaagaatatgctgcaaatggtatgggacctctcaaggttctgtctggctcagaggtgacagcctag

SEQ ID NO: 206264 - DNA, 1680 bp, synthetic construct
  misc_feature 1..1680: note = Description of Artificial Sequence: Synthetic coding sequence
  source 1..1680: mol_type = other DNA
atggcccccaccctgcagcaggcctaccggcggcggtggtggatggcctgcactgccgtcctggaaaacctctttttctccgcggtgctcctcggttggggtagcctgctgatcatactgaagaatgaggggttttattcatctacctgtcccgctgagagctccactaataccacacaagacgaacagcggcggtggccaggttgcgaccagcaggacgaaatgttaaatcttggctttaccattggaagtttcgttttgagtgccaccacccttccactggggatcctgatggaccggtttggcccacggcccgttaggctggtggggtctgcatgttttacggcctcttgcacccttatggcgctggctagccgggacgtcgaggctctgtcccccctcattttccttgccttgtccctcaatggattcggcggcatctgtttgacatttacctccctcaccctccccaatatgtttggcaacttgcgctctactctaatggctttaatgatcggtagttacgcatcctcagccattacatttcccggcatcaaacttatctacgatgcaggggtcgcattcgtcgttatcatgtttacctggagcgggctcgcgtgtctgatcttcctgaactgtaccctcaattggccgatcgaggccttccctgcccctgaagaagtgaattacacaaagaaaattaagctttctggactcgcattggatcacaaggtgaccggggacctcttctacacacacgtgacaaccatggggcagcggctgagccaaaaagcgccttcgcttgaagatgggtcagacgcctttatgtcaccacaagacgtacgagggacatccgaaaatctgcccgaacgctccgtgccgctgagaaagagcctgtgttcgcctacctttctttggtcactgttaacaatgggcatgacccaactgagaattatcttttacatggcggctgtgaataagatgttagaatatttagtgaccggcggacaggagcatgagactaacgagcaacaacagaaagttgcggagaccgtgggattctactcctccgtgtttggtgcgatgcagctgctgtgcctgcttacctgtcctctgatcggttatattatggactggcgcatcaaggactgtgtagatgccccgacacagggcactgtcctgggtgacgcacgcgatggggtggctacaaagtcaatacggcctaggtactgtaagatccaaaaactcacgaatgcaatctctgcatttacactgacaaacctgctgttagtgggcttcgggataacatgcctcatcaataatttgcatctccaattcgtgacattcgtcctacacaccattgttaggggattcttccactccgcatgcggatccttgtatgctgccgtgtttcccagcaaccacttcggtacactgaccggactccagtcactgatatcagcggttttcgccctcttacaacagcccctgtttatggcaatggtcggccccttgaaaggtgagcctttctgggtcaacctggggctcctgctgttctcactgctgggctttctgctcccaagttacctcttttactatagggccaggctccagcaggaatacgcagcaaacgggatggggccccttaaggtactgtccggcagtgaggtgactgcttag

SEQ ID NO: 206265 - DNA, 333 bp, synthetic construct
  misc_feature 1..333: note = Description of Artificial Sequence: Synthetic coding sequence
  source 1..333: mol_type = other DNA
atggcccccaccctgcagcaggcctaccggcggcggtggtggatggcctgcacggcagtgttagaaaacctgtttttcagtgctgtgctcttgggatggggttctctcctgataatcctgaaaaatgagggtttttacagtagtacttgcccagctgaatcatcaactaacactacgcaagacgagcagaggaggtggccaggctgtgatcaacaggacgaaatgctgaacctgggtttcacgattggcagcttcgttctttccgcgacaactctgccactaggcattctgatggaccgttttggccctcggcccgttcgcctggttggctag

SEQ ID NO: 206266 - DNA, 1710 bp, synthetic construct
  misc_feature 1..1710: note = Description of Artificial Sequence: Synthetic coding sequence
  source 1..1710: mol_type = other DNA
atggcccccaccctggccaccgcccaccggcggcggtggtggatggcttgtaccgctgtgctggagaacttattgttctctgccgttttactagggtggggctctttgttgattatgctgaaatcagagggattttactcttatctgtgtacggaacctgaaaacgtgacaaatggaacggtcggcggcactgcagaaccaggccacgaggaggtgtcatggatgaacgggtggctgtcctgtcaggcacaagatgagatgctcaacctggcgttcaccgtcggctcattcctcctatcagccatcactctgccactggggattgttatggacaagtatggcccccgaaagctgcgtctcttgggatccgcttgttttgcagtatcatgcctcctgattgcatatggcgcttcaaaacccaatgccttgtcagtactgatttttatcgctctggcactgaatggcttcggtggaatgtgtatgaccttcaccagcttgacgcttccaaatatgtttggagacttgcgcagtacattcattgctctgatgatcggctcatacgctagcagcgcggttacgtttcctggaatcaagctaatctacgacgccggggtgtcctttatcgtcgtgttggtggtatgggcaggctgcagtggtctggtttttttgaactgcttcttcaactggccacttgaacctttcccagggccagaggacatggactatagcgtcaaaataaaatttagctggttgggatttgatcacaagatcacaggaaaacagttttacaaacaggtaaccactgtcggtaggaggctgtccgttggaagttcaatgagatccgccaaggagcaggtcgctctgcaggaggggcataaactatgcttgtccacggttgatcttgaggtgaagtgccagcctgacgctgctgtggccccatccttcatgcatagcgtgttttcacccattctgctgttgtctctcgtcacaatgtgcgtaacccagctaaggctgatattctatatgggagctatgaataatatcctgaagttcctcgtgtcgggtgaccagaaaacagtcggcctatacacatcaattttcggggtcctccagttattatgcctattaaccgccccagtgatcggatacatcatggattggagacttaaggagtgtgaggatgcgtccgaggaaccagaagaaaaggatgccaaccaaggagagaagaagaagaaaaagagggatagacagatccagaagatcacaaacgccatgagggcttttgccttcacaaacctgttgttggtgggttttggggtgacctgcctgatccctaaccttccactacagatactttcctttattctccacaccatcgtacgaggctttatccactccgcggtaggtggcctgtatgctgcagtttatccttcgacccagttcggcagtctgacaggtttgcaatctctgatttctgccctcttcgccttgttgcaacagcccctgtttttagcgatgatgggcccactccagggagacccgctgtgggtgaacgttggtctccttctacttagccttctcggcttttgtctgcctctgtaccttatatgttacagacgtcagcttgaacgccagctccagcagcggcaagaagatgataaattgttcctgaagataaacggaagctctaatcaggaggctttcgtctag

SEQ ID NO: 206267 - DNA, 1722 bp, synthetic construct
  misc_feature 1..1722: note = Description of Artificial Sequence: Synthetic coding sequence
  source 1..1722: mol_type = other DNA
atggcccccaccctggccaccgcccaccggcggcggtggtggatggcctgtaccgcggtcctcgaaaaccttctgttcagtgccgtgcttctgggttggggatcactgcttatcatgctgaagtctgaaggattttacagctatctgtgcaccgagccagaaaacgtcacaaatggcaccgtcggtggaactgccgagccaggtcacgaagaagtgtcatggatgaacggctggttgtcctgtcaggcccaggacgagatgttgaatcttgccttcactgtgggctcgtttctcctgagcgccataacactcccgctcggaatagtgatggacaagtacggtccacggaagttgaggttgctgggttccgcatgcttcgcggtttcctgcctcctgatagcttacggagctagcaagcccaatgccctcagcgtgctcatcttcatcgccctggctctgaatggtttcggtggcatgtgtatgaccttcactagtctgacgttgccaaatatgtttggcgatctaaggtccacctttatcgccctgatgataggttcgtacgcgagcagcgctgttactttccccgggatcaaattgatatacgatgccggggtgagttttatcgtggtgttggtcgtttgggccggatgttctggactcgtgttccttaactgcttctttaactggccactcgagccctttcccggtcctgaagatatggattactccgtgaagattaagttcagctggttggggttcgatcacaaaatcaccggcaaacagttttataagcaggtgaccacggtgggccgtcgtctgagcgttggcagcagtatgaggtccgctaaagagcaggtggcacttcaggagggccataaactgtgcttgtctaccgtagacctcgaggttaagtgccagcctgacgcagccgtcgcgccaagttttatgcattccgttttctcccccatcctgctcctgagcttggtgacgatgtgcgtcacacaactgagactgatcttctatatgggggccatgaataacatcctcaagtttcttgtatccggcgaccagaaaactgcctcaagcactgtaggtctgtacacatctatcttcggggttctgcagctgctatgcctgctgacagcaccggtgatcggatacatcatggattggagactgaaagaatgtgaggacgcatctgaagagcctgaggaaaaggatgccaatcagggagagaaaaagaaaaaaaagcgtgatcgccagatccagaaaataactaatgcgatgagagcattcgcatttactaatttgctgttggtgggatttggcgtgacatgcctcattccaaacttgcccctgcagatcctgagttttattcttcatactattgtgagaggctttatccactcagccgtgggcgggctgtacgctgcagtgtatccatccacccagtttggttcactgaccggtctccagtcactgataagcgctctttttgccctgctccagcagcccctgttcctcgcaatgatgggacccctgcagggagacccactttgggttaacgtgggccttctgcttttgtccctgctgggcttttgtttgccactttacctgatctgctacaggcgccagctcgagagacaattgcaacaaaggcaggaggatgacaaactgtttcttaagataaacgggagtagcaatcaggaggccttcgtgtag

SEQ ID NO: 206268 - DNA, 1299 bp, synthetic construct
  misc_feature 1..1299: note = Description of Artificial Sequence: Synthetic coding sequence
  source 1..1299: mol_type = other DNA
atgacctacggcagcccccaggccaacgccagccccagcgacgccgtcgccctcgatcatggcgaagtgtctcgccgccaacaacaggaactgcccaatatgtttggcgaccttcgtagcactttcattgcgctcatgatcggatcatatgcctcttccgccgtgaccttcccagggattaagctgatatacgacgcaggagtatcatttatagtggtgcttgttgtctgggccggctgctccggcctcgtgttcctgaattgtttcttcaactggcctctggagccctttcccgggccggaagacatggactattctgtgaagataaagttctcgtggttaggatttgaccacaagattactggcaagcagttctataaacaggtcacgacggtcggacggaggctaagtgtgggcagcagcatgcgtagcgccaaggagcaagtcgccctacaagagggacataagctgtgcctctccactgtggatctggaggttaagtgtcagccagatgccgcggtcgcgccaagttttatgcacagtgtcttcagccctatcctgctgctcagtcttgtgacaatgtgcgtgactcaactgagactgatcttttacatgggcgccatgaataacatccttaagttcctcgtgtcgggcgatcaaaagactgtggggctgtacacttctatctttggcgtactccagctactctgccttctcaccgctcccgtcatcggctacatcatggattggagactcaaggagtgcgaagatgcgtctgaagagcccgaggagaaggacgcaaaccagggggaaaagaagaaaaagaaaagagatcgacagatccagaagatcaccaatgcaatgagggccttcgcgttcaccaatctactgctggtcgggtttggagttacctgcctgatccccaatctccccttgcaaatcctgagcttcatcctgcacaccatagtgagggggttcattcacagcgcagttggtggattatacgccgcggtttatccttcaacccagtttggttcccttactgggctccaaagcctgattagcgcactgttcgctctgctgcaacagccgttattcctggcgatgatgggaccccttcagggtgatccgctgtgggttaatgttggcctgcttttgttgtctctgcttggcttctgcctccccctgtacctgatctgttaccgccgacagctggagcgacagctccagcagagacaggaggacgacaagcttttccttaagatcaatggcagctcaaatcaagaggcctttgtctag

SEQ ID NO: 206269 - DNA, 1341 bp, synthetic construct
  misc_feature 1..1341: note = Description of Artificial Sequence: Synthetic coding sequence
  source 1..1341: mol_type = other DNA
atgaccagcaaggagatcatcctgggcctgtgcctgctgagcctggttctgagcatgatattgatggttattatccgatatataagcagagtcctcgtatggattctaacgattcttgtaattctcggaagtcttgggggtacaggtgtcctgtggtggttatacgccaagcagcgcagaagtcctaaagagaccgtcacgccagaacaactgcaaattgctgaggacaacctgcgcgctctgttgatctacgcaattagcgcaacagtttttactgtgatcctgttcctgataatgttagttatgcggaaaagagtggctctgaccatcgcgctttttcacgtcgctgggaaagttttcatccacctgccactcctggtctttcagcccttctggaccttcttcgcgctggtgctgttctgggtctactggatcatgacgctcctgttccttgggacaactggatccccagtccagaacgagcagggatttgtggaattcaaaatcagtggtcccctgcagtacatgtggtggtatcacgtcgtggggctgatttggatttcagaattcatcctggcatgtcagcagatgaccgttgccggagcagtggtaacttactacttcacccgcgacaaacgcaatttacctttcacgcctatactcgcctctgtcaacaggctgatcaggtaccacctgggaactgttgccaaaggatcctttattatcacccttgtgaaaatcccacgaatgatcctcatgtatatccatagtcagttaaagggcaaggaaaatgcatgcgccaggtgcgtattgaagagttgtatctgctgtctgtggtgtctcgaaaagtgtctgaattatttgaatcagaacgcctacacagccaccgccatcaacagcaccaacttctgtactagcgcgaaagacgcctttgtcattctggtcgaaaacgccctgcgtgttgctacaattaacacagtgggggattttatgctgtttctagggaaagtgctcattgtgtgctcaactggccttgcaggcataatgttgttgaactaccagcaggattatacagtttgggtgctcccccttattatagtatgcctttttgcctttctggtggcacactgtttcctctcgatctacgaaatggtggtggatgtgctttttctatgctttgcaatagacacgaagtataacgacggctcaccgggacgggagttttatatggacaaggtgctaatggagttcgtagaaaatagtaggaaggctatgaaagaagctggcaaaggcggcgtggccgattccagagaactgaaaccaatgctcaaaaagcgctag

SEQ ID NO: 206270 - DNA, 1974 bp, synthetic construct
  misc_feature 1..1974: note = Description of Artificial Sequence: Synthetic coding sequence
  source 1..1974: mol_type = other DNA
atgggctgctgcagcagcgccagcagcgccgcccagagcagcaagagggaatggaagcctttagaggaccgttcatgcacagacataccatggcttctccttttcatcctgttttgtattgggatgggattcatctgcgggttcagcattgctaccggcgcagccgctcggctggtgagtggctacgatagttacggcaacatctgcggacaaaaaaacacgaagcttgaggctatccctaattccggaatggaccatactcaacggaaatacgttttcttcttggatccctgtaatctggatctgatcaatcgtaagatcaagtccgtagccctctgcgtcgctgcatgcccgagacaggagctaaagaccctgagcgacgtgcagaaatttgccgagattaacgggagtgcgctgtgttcatataatcttaaaccatctgagtacacaacttccccaaagtctagtgtcctgtgcccgaaactgcctgtccccgctagtgctcccatcccctttttccatcggtgtgcccccgtaaacatcagctgctacgctaaattcgccgaggccttaattacattcgtaagcgacaatagtgttcttcatcgtctcattagcggagttatgactagcaaagaaatcattctaggactttgcctgctgtcccttgtgctctccatgattctaatggtaattatacggtatatcagtagggtgctggtttggatcctcaccattctggtgatcttgggctcactcggcgggaccggcgtgctgtggtggctgtacgcaaagcagagaaggtccccgaaagaaaccgtgactcctgaacaactgcaaatcgctgaggacaacctgcgcgctctcctcatctatgccatctcagccactgtgttcaccgtgatcctgttcctgattatgctggtcatgcgcaagcgcgtggcactgactatcgcacttttccatgtagctgggaaagtctttatccacctgccactccttgtgttccagccattctggacctttttcgccctcgtgctgttttgggtgtattggataatgaccctgctgttcttgggtacaaccggttccccagtccaaaatgagcagggattcgtagagtttaagatcagcggaccattacaatatatgtggtggtaccacgtggtgggcctgatttggatcagcgagttcattctagcgtgtcagcagatgaccgtagccggcgctgtagtgacgtactactttacccgggataagagaaatcttccattcactccgatcttagccagcgtcaacagactcattcggtaccatttagggaccgtggctaaggggagctttattattacacttgtaaagatccctaggatgatcctcatgtacatccactctcagctgaagggtaaggaaaacgcgtgtgccagatgcgtcctgaaatcctgcatctgttgcctgtggtgtttggaaaaatgtctaaactaccttaatcaaaacgcatatacagcaacagccatcaattcaacaaacttttgcacgtcagcaaaagatgcgtttgtgattttggtcgagaacgctcttagagtggctacaattaacaccgttggcgattttatgcttttcttgggtaaagtgctgattgtttgcagcacaggactggccgggattatgcttctgaattatcagcaagattacaccgtctgggtgctgcctctcattatcgtctgcttatttgcctttttggtggctcactgctttctgtccatatacgagatggtggtcgatgtgctgtttctctgctttgccattgataccaaatacaacgacggctcccctgggcgggagttttatatggataaagttctcatggagttcgttgagaattcaaggaaagcaatgaaggaagcaggtaaaggcggagtcgccgatagccgggaactcaaaccaatggcaagcggtgctagctctgcttag

SEQ ID NO: 206271 - DNA, 1959 bp, synthetic construct
  misc_feature 1..1959: note = Description of Artificial Sequence: Synthetic coding sequence
  source 1..1959: mol_type = other DNA
atgggctgctgcagcagcgccagcagcgccgcccagagcagcaagcgggagtggaagcctttggaagaccggtcttgtacagacatcccttggctacttctcttcattctcttctgtattgggatggggtttatttgtgggttctcgattgcgacgggagctgccgcgaggcttgtcagtggctacgattcctacggcaacatctgtggccagaagaacactaagctggaagccatacccaactccggcatggaccacacacaaagaaagtatgtcttcttcttagacccctgtaacttagatttgattaataggaagataaaatccgtcgccttgtgtgtggctgcctgcccacgccaggaactgaaaaccctctccgatgtccagaagtttgctgaaatcaacgggtctgctctatgctcctataacctaaaaccttctgagtataccacgagcccaaaatccagcgtgttgtgccccaagctgccagtacctgccagcgcaccaatccccttcttccacagatgcgctcctgtgaatatttcatgttatgccaagttcgccgaagcattgattacgtttgtttcagataatagcgtcctacatcgcttgattagcggcgtgatgacctccaaagagatcatccttgggctgtgcctgctgtctctggtgctttctatgatcctgatggttattataaggtacatatcacgggttcttgtgtggattttgacaattctggtcatactggggtctctcggcgggacaggcgtgttatggtggctgtatgccaagcagcgccggagtccaaaagagacagtgacccccgagcaactccaaattgctgaggacaacctgagagcccttttaatttatgcgatatctgcgacagttttcacagtgatcttgttcctcatcatgcttgtgatgcgcaagagggtggctctgactatcgccctgttccatgtcgccggtaaagtgtttatccacctgccactcctggtcttccagcccttttggactttttttgcgctggttcttttctgggtgtattggatcatgacactgctattcctgggtacaacggggtcccccgtgcagaacgaacagggcttcgtggagttcaaaattagcggcccacttcagtacatgtggtggtaccacgtggtgggcctgatctggatctccgaattcattcttgcctgtcagcagatgaccgtggccggcgctgttgtcacatactattttacacgggacaagcggaatctacccttcacaccgatcctggcatccgtcaaccggctaattcgttaccacttggggaccgtggctaaagggtcttttatcatcacactggtgaaaattccgcgaatgattctaatgtatatccatagccagctcaagggtaaagagaatgcctgcgccagatgcgtactcaagtcttgtatttgttgcctgtggtgtctcgagaagtgcctgaattatttgaatcagaatgcttataccgccacggcaatcaatagtacaaatttttgtaccagcgctaaagacgctttcgtcattcttgtggagaatgcgctgcgggtcgcgacgatcaacactgtgggggattttatgctgtttttgggcaaagttctcattgtctgctccaccggtctcgcgggtattatgctcctcaactaccagcaggattacactgtgtgggtgctgccactaatcatcgtgtgtctttttgccttccttgtggcgcactgctttctctcaatatatgagatggttgtagacgtgctgtttctgtgttttgctatcgacacaaagtataacgacggctcacccggaagagaattttacatggataaagtcctcatggaatttgtggagaacagccgcaaagccatgaaggaagcaggcaagggcggcgtcgccgactctagagaattgaaaccgatgattaagtag

SEQ ID NO: 206272 - DNA, 1965 bp, synthetic construct
  misc_feature 1..1965: note = Description of Artificial Sequence: Synthetic coding sequence
  source 1..1965: mol_type = other DNA
atgggctgctgcagcagcgccagcagcgccgcccagagcagcaagagagagtggaagcccttggaagaccgatcctgcaccgacatcccttggctgcttttgttcattctgttctgtatcggaatgggctttatttgcggcttctctatcgccaccggcgctgcagccagactagtttccggatatgactcctacggcaacatatgtggccagaagaacactaaactggaggcaattccaaacagtggaatggaccatacacaacgcaagtacgtttttttcctggatccctgcaacctggatctgattaatcggaaaattaaatctgtggcactgtgtgtggcagcttgcccaagacaagaactcaagaccctctcagatgttcagaaatttgctgagattaatggaagcgctctatgttcctacaacctgaagcccagtgagtacaccacctcgcctaagtcctccgtgctctgccctaagctgcccgtgccggcctcagctcccatccccttctttcaccgctgcgcacccgttaacatcagctgttacgccaaatttgccgaagccctgatcactttcgttagtgacaacagcgtcctccatcgccttataagtggcgtgatgacaagtaaggagatcattcttggtctatgcctgctgtctcttgtgctgagcatgattctgatggttatcattaggtatatttccagagtcctggtttggatcctcaccattctcgtgatcttgggatccctgggggggacaggcgtactgtggtggctatatgccaaacagcgccgttcccctaaagaaacagtgactcctgagcagctgcagatcgccgaggataacctccgtgcgcttttgatctatgctatttctgcaacagtttttacggttatactttttcttatcatgctcgtgatgaggaagcgggtggcccttacaattgcactgttccacgtggccggcaaagtgttcatccatctacccctcctcgtcttccagcctttctggacgttttttgccctcgttctgttttgggtctactggatcatgactcttttgttcctcggaacaacaggtagccccgtacagaatgagcagggattcgtggaatttaaaatttctggacccctccagtacatgtggtggtatcacgtggtgggactcatttggatatccgaattcatccttgcttgccagcaaatgaccgtggctggagctgtggtgacgtactactttacaagagataagcggaatttgccattcacaccaattctggcgagcgtgaatcgtctgatcaggtatcatctcgggacagtcgccaaaggcagtttcatcatcaccttagtcaagatcccgaggatgatattgatgtatatacacagtcagctcaaggggaaagaaaacgcttgtgcccgatgtgtgttgaagtcatgtatctgctgtctgtggtgtctggagaaatgcttgaactatttaaaccagaatgcttacacagcaaccgcgatcaattcaacaaacttttgcacaagcgcaaaagatgcatttgtgatcctcgtggagaacgccctccgggtggctactatcaatacagtgggggacttcatgctctttttaggcaaagtgttaatcgtgtgcagtacaggcctggccgggattatgttgctcaattatcagcaggactataccgtttgggtgctgccgttgatcattgtttgtctgttcgccttcttggttgcacactgcttcctgagcatctacgaaatggtcgtggacgtgcttttcctgtgctttgctattgatactaagtacaacgatgggagtcccgggcgggagttctatatggacaaggtcctaatggagttcgtagaaaacagccgcaaagcaatgaaggaggctggcaaaggaggcgtggccgattctcgcgaactgaagccaatgcttaagaagcggtag

SEQ ID NO: 206273 - DNA, 1974 bp, synthetic construct
  misc_feature 1..1974: note = Description of Artificial Sequence: Synthetic coding sequence
  source 1..1974: mol_type = other DNA
atgggctgctgcagcagcgccagcagcgccgcccagagcagcaagagagaatggaagccattagaggataggagctgtacagatataccttggctcttattgttcattttgttttgtattggaatgggatttatatgcggtttcagcattgccacaggcgccgccgctaggctcgtctcaggctacgactcctatggaaatatatgtggccagaaaaatacaaagctggaggccatacccaacagtgggatggatcacacccagagaaaatacgttttcttcctggatccatgtaaccttgacctgatcaacaggaagataaaaagcgtagcattatgtgttgctgcttgtcctcgccaggaactgaagaccctgagtgatgttcagaagttcgcagaaataaatggcagcgctctgtgctcctataatctgaagcccagcgagtacaccacttctcccaagagctctgtcttatgccccaaactgccggtgccagccagtgccccaatacctttctttcaccgttgcgccccagtgaacatcagctgttacgcaaagtttgccgaggcactgattacctttgttagcgacaacagcgtactccaccggctgattagcggcgttatgacctccaaagaaattatcctaggactctgtctgctgagcctcgtcctgtccatgatcttaatggtaatcatcaggtatatctctcgagtgctcgtctggatactaactattctggtaatcctggggtcgttaggggggactggcgtgttgtggtggctatacgctaagcagcgtcggtcacccaaagaaacagtcacgcctgagcagctgcagattgctgaagacaatttacgcgcattgctaatctacgctatctctgccaccgttttcaccgtgatcctgttcctgataatgctggttatgaggaaacgggtggcacttacaatcgcgctgttccatgttgctggtaaagtttttatacacctccctttattggtttttcagccattctggacattctttgcattagtgctgttttgggtgtattggataatgactttactttttctcgggacaacggggagcccagtccaaaacgagcagggctttgtcgagtttaagatctccggccccctccagtacatgtggtggtaccacgttgtgggcctgatttggatcagcgagtttatactggcctgccaacaaatgactgttgcaggcgcagtagttacatattatttcaccagagataaaaggaacctcccatttactcccatcctggcgtctgttaacagactgattaggtatcatctggggactgttgccaagggttcattcattatcaccctggttaagattcctcgaatgatattgatgtacattcattcacagcttaaagggaaggagaatgcttgtgctagatgcgtgctcaagtcttgtatatgctgcctgtggtgcctggaaaaatgtttgaactatttaaaccagaacgcgtataccgccacagccatcaactcaacaaacttttgcacatctgccaaggacgccttcgtgattttagtcgaaaacgctcttcgcgtcgctacgataaacactgtgggcgacttcatgttgttcctgggtaaagtgcttatcgtttgttctacagggctggctggcattatgctccttaactatcagcaggactacacagtgtgggttctccccctgatcatcgtatgcctgttcgcattcctggtggctcactgttttctgtccatctacgaaatggtggttgacgttctcttcctatgctttgccattgacaccaagtacaatgacggcagccctggccgagagttttacatggataaggtcctgatggagtttgttgaaaactctcgcaaggccatgaaggaggcaggcaagggcggtgttgctgattcacgcgaactcaagccaatggcatctggcgccagcagcgcgtag

SEQ ID NO: 206274 - DNA, 2121 bp, synthetic construct
  misc_feature 1..2121: note = Description of Artificial Sequence: Synthetic coding sequence
  source 1..2121: mol_type = other DNA
atgggcgacgagcggccccactactacggcaagcacggcaccccccaaaagtatgacccgacctttaagggccccatctataataggggctgtacggacattatctgttgtgtcttcctcctgctggccattgtgggctacgttgcggtgggtatcatcgcctggacccacggagacccacgaaaagtcatttatccaactgactccaggggtgaattctgtggacagaagggaactaaaaatgagaacaagccctatcttttttactttaacatagtgaagtgtgcgtcacccctggtgcttctggaatttcagtgccctacccctcagatctgcgttgagaaatgtcccgatcggtacctcacttacctgaatgctaggtcaagccgagatttcgaatactacaaacaattctgtgtgccaggtttcaagaataataagggggtggccgaagtgcttcaggatggagactgccccgccgttttgattccttcgaagccattggccaggagatgcttccctgccatccacgcatataagggagtgctgatggtggggaatgaaacgacttacgaggacggccatggctctcgcaagaatattacggacctggtggagggcgcaaagaaggccaacggtgtccttgaggcccgccagctcgctatgcgcatttttgaagactacaccgtgtcttggtactggattattatcggcctggtcattgccatggctatgtcgctcttattcatcattctcctgcggttccttgccggtatcatggtatgggtgatgatcattatggttattctggtgctgggatatggtatattccattgttatatggagtactcgaggttgcgaggggaggccggcagcgacgtctccttggtggacctcggctttcagaccgatttcagggtgtatctacatctgcgccagacttggttggcattcatgatcatcctgtctatccttgaagtcattatcattcttctcctgatttttctgagaaaacgtattctgatagcaatcgctctgattaaggaggcctcgcgagctgttgggtatgtcatgtgttcgcttttgtatcctctggtgacgttcttcctgctgtgcctgtgcatcgcgtattgggcctctacggctgtcttcctgagtacctccaatgaagccgtctataagattttcgacgacagtccgtgcccttttacagccaagacatgtaaccccgaaacgttcccttcgtcgaacgaatctcggcagtgccccaacgcccggtgtcagtttgcattctacgggggggagagtgggtatcatcgggctttactcggcctgcagattttcaacgcctttatgttcttctggctggccaattttgtacttgcactggggcaagttacattggccggtgcatttgcctcttattactgggctcttaggaagccagatgatctgccagcctttccattgtttagcgcatttggcagagccttgagatatcacactggatcactggcctttggcgccctgatactagccatcgtccaaattataagggtgatccttgaataccttgatcagagactgaaggcggccgaaaataagtttgcaaaatgtctaatgacctgccttaaatgttgtttttggtgcttagagaagttcatcaagtttctaaaccgaaacgcctacataatgatcgcaatatacggcactaacttttgcaccagcgctaggaacgctttctttctgctcatgcggaatattattcgcgtagccgtgcttgacaaagtgacagactttctcttcctgctgggcaaactgttgattgtagggtcggttggcattctcgcgttctttttttttactcaccgtattcgcatcgtgcaggacactgcaccaccactgaactactactgggttcccatactgacagttattgtaggctcatacctcatcgctcatgggttcttctcggtctacggcatgtgcgtagataccttgtttctgtgcttcttggaagaccttgaaaggaacgacggctctgcagagaggccatacttcatgagcagcacactgaagaagctcctgaacaagaccaacaaaaaggccgctgaatcttag

SEQ ID NO: 206275 - DNA, 2121 bp, synthetic construct
  misc_feature 1..2121: note = Description of Artificial Sequence: Synthetic coding sequence
  source 1..2121: mol_type = other DNA
atgggcgacgagcggccccactactacggcaagcacggcaccccccagaagtacgaccctacattcaagggtccaatttacaatcggggttgcaccgacatcatttgttgcgtgtttctcctcttagcgatcgtgggctatgtagctgtgggtataatcgcttggacccacggcgaccctcgaaaggtgatctaccctacagactctcgaggcgaattctgtggccagaagggaacgaagaatgaaaacaaaccttatctattttactttaacatagtcaagtgcgcttcccccctggtccttttagaattccagtgccctacaccacagatctgcgtagaaaaatgtcctgatcggtacctgacatatctcaatgccagaagcagtcgggacttcgaatactataaacagttctgcgttccggggtttaagaataacaaaggagtggcagaagtgctgcaggacggggactgccccgccgtattaattcccagcaagcccctggcccgaagatgttttcctgccattcacgcctacaagggtgtgctgatggtcgggaatgagactacatacgaagacggacacgggtccaggaaaaatattaccgacttagtggagggcgctaagaaagccaacggagtgctggaggctcgccaactcgctatgagaatttttgaggactacacggtctcgtggtattggatcattattggcctggtgattgcaatggccatgtctctgctgtttatcatactcttaagatttctggccggaataatggtctgggttatgattatcatggtgattcttgtgctgggatatggcatctttcattgttacatggaatattctcgtctgagaggggaagccggaagcgacgtaagcctggtcgatctgggcttccagacggactttcgcgtctacctgcaccttcggcagacctggctggccttcatgatcatcctatcaattctggaagtcatcatcatccttctgctcatttttctccggaagagaatactgatcgccattgcactcataaaggaagcgagcagagctgtgggatacgtgatgtgtagtctgctataccccctggtaacctttttcctcctgtgcctctgcatcgcctattgggctagcactgctgtgtttctgagtacgagcaacgaagccgtctacaagatatttgatgatagcccttgcccatttaccgcgaagacctgtaatccggagacctttccatcctccaatgagtctaggcagtgcccgaacgcgcgctgccaatttgcattctatggaggagagtctggataccacagagctctgttagggctgcaaatctttaacgccttcatgttcttctggctggctaatttcgtcctggccctcgggcaggtgactctggcaggggccttcgccagttattactgggctctcaggaaaccagacgatctgcccgcctttccactattctccgcctttggcagggcattacgctaccatacgggttctctggctttcggagcactgattttggccatcgtacagatcattagagtgattttggagtacctggaccagcgccttaaagcggccgagaacaagttcgccaagtgtctgatgacctgcctgaagtgttgtttctggtgcctggagaaatttattaagttcctcaacagaaacgcctatatcatgatcgctatctacgggaccaatttttgcacctctgcaaggaatgccttcttcctccttatgcgcaacatcatcagggtggcagtcctagacaaagtcacagattttctgtttctcttgggcaagttgctaatagtcggatcggtcggcatcctcgccttttttttttttacacatcgtatcaggattgtgcaagataccgcacctccactgaattattactgggtgcccattctcaccgtgatagtcggcagctacttaattgcccatgggtttttttcagtgtacggcatgtgcgtcgatacactgttcctgtgcttttgcgaggatctggagcgaaacgacggatctcaggagcggccttatttcatgagcccagaacttcgggacatcttattgaaaggcagcgccgaagagggcaagcggtag

SEQ ID NO: 206276 - DNA, 2115 bp, synthetic construct
  misc_feature 1..2115: note = Description of Artificial Sequence: Synthetic coding sequence
  source 1..2115: mol_type = other DNA
atggaggacgagcggaagaacggcgcctacggcaccccccagaagtacgatccaaccttcaagggaccgatttacaacaggggctgtactgacatcatttgttgcgtgtttctgctcctggccatcgttggatacgtcgccgtaggcattatcgcctggacacacggagatccaaggaaagtcatctaccccactgattcacgcggggagttttgtggccagaaaggaaccaaaaacgagaacaagccttacctgttttacttcaatatcgtgaaatgcgcctctccactggtgctgcttgagtttcagtgtccaacccctcagatttgtgtggagaagtgccctgacaggtatttaacatatctcaacgcaagaagctcccgggatttcgagtactataagcagttttgtgtgcccggcttcaaaaacaacaaaggagtggctgaggtactgcaagacggagattgcccggcagtgctgataccatccaagcctctcgctaggcgatgcttcccggccatccacgcttataagggcgtcctgatggtcggcaacgagaccacttatgaggacggacatggctccaggaaaaatatcaccgaccttgttgaaggcgctaagaaggccaatggagtcctggaagccagacagctggcaatgcgcatctttgaggattacactgtaagttggtattggatcatcataggcctcgtaattgccatggccatgtcccttctttttatcattctccttagattccttgcaggcattatggtgtgggttatgatcatcatggtcatcctggtgctgggatacggaattttccactgttacatggagtattccaggcttcgtggggaggcaggatccgatgtctccctggttgacctgggattccagaccgactttagagtgtaccttcacttgaggcagacctggctagcatttatgatcatcctttccatcctggaggtgatcatcattctgctgcttatctttctgaggaagaggattctcattgctattgcactcattaaggaggcctcaagagctgttggctacgtcatgtgtagcctgttatatcctctggtgacctttttcctgctgtgtttatgcatagcctactgggcgtctactgctgtgttcctcagcaccagtaatgaggctgtgtataaaatattcgacgatagcccttgtcccttcaccgctaaaacatgcaacccggagacttttccatcaagcaacgagtcccggcagtgccctaatgcaaggtgccagttcgccttctacgggggcgaatccggctaccaccgggctctcctgggattgcagatttttaacgcctttatgtttttttggctggcaaacttcgtactggccctgggccaagtgacattggctggtgcctttgcctcatattactgggccctaagaaagccagatgacttaccggcctttccccttttctccgccttcggcagagccttgagataccataccggttctttggcttttggcgctctgatcctcgccattgtgcagatcataagagtgatactcgagtacttggaccagaggcttaaagcagctgaaaataaatttgcaaagtgtcttatgacatgcctgaaatgctgtttttggtgtcttgaaaagttcattaagtttcttaatcgcaatgcgtatattatgattgccatttacggaaccaacttctgtacttccgctcgcaatgccttttttcttttgatgaggaacatcattcgcgtagcggtgcttgacaaagtcactgattttctgtttctgctcggaaagctgttaatcgtgggttctgtgggcattttagcctttttcttctttacccatcggatcagaatcgtgcaggacactgcccctcccctgaattattattgggttccaattctcaccgtcattgtgggctcataccttatagcccatggttttttcagcgtctatggaatgtgtgtggataccctgttcctgtgcttcctggaagacctggagcgtaatgatggcagtgctgaacgtccgtattttatgtcctccaccttgaagaaattgttgaacaaaacgaataaaaaagcagccgagagttag

SEQ ID NO: 206277 - DNA, 1248 bp, synthetic construct
  misc_feature 1..1248: note = Description of Artificial Sequence: Synthetic coding sequence
  source 1..1248: mol_type = other DNA
atgaccggcgagcggcccagcaccgccctgcccgaccggcggtggggccctcgcatactgggtttctggggcgggtgtcgggtctgggtgtttgccgccatcttcctccttctcagtctggccgcgtcttggtccaaagccgaaaacgatttcgggctggtccaaccgttggtgacgatggagcaacttctgtgggtctctggtaggcagatagggtccgtcgacactttccgaatccctttgataacagccactccccgcggaacactgttagcgttcgccgaggcccgcaagatgtcttcctctgacgaaggcgctaaattcatagcattgcggaggagcatggatcagggatcgacttggtcccccacagctttcattgtcaatgatggggatgtgcccgatggactcaatctaggggcggtggtgtccgacgttgagacaggggtagtgttcctgttctatagcctatgtgcccacaaagctggctgtcaagtcgcgtctactatgcttgtttggtctaaagacgacggggtgagctggagtactcctcggaaccttagcttagacattggcaccgaggtgttcgcaccaggccctggcagcggtatccagaagcagcgggagcctcgcaagggcaggcttatagtatgtggccacgggaccctggagcgggacggtgtgttttgcctactgtcagatgatcatggggcatcttggagatatgggagcggagtgagcggtattccgtacggtcaacccaagcaagaaaacgatttcaaccccgacgagtgccaaccttacgagctgcctgatggatcagtcgtcattaacgcacgaaatcagaacaactaccattgccactgtcggatcgtactgcggagttatgatgcttgtgacaccttgaggccacgcgacgtgacattcgatccagagttggttgaccctgtcgtagcagccggcgccgtggtgacgtccagcggtattgtgttcttttcgaaccccgctcacccagagttccgggtgaatctgacccttagatggtctttctcaaatgggaccagttggcgtaaagaaactgtgcagctgtggccaggccctagtggctactcctctcttgctactctggagggctccatggatggggaggaacaggctcctcagctctacgttctctacgagaaagggagaaaccattatacagaaagtattagcgtggctaagatctccgtgtatggaaccctttag

SEQ ID NO: 206278 - DNA, 2007 bp, synthetic construct
  misc_feature 1..2007: note = Description of Artificial Sequence: Synthetic coding sequence
  source 1..2007: mol_type = other DNA
atgggcggcaagcagcgggacgaggacgacgaggcctacggcaagcccgtgaaatacgaccccagctttaggggcccaatcaaaaaccgatcatgcactgacgtcatttgctgtgtgctcttcctattattcatcttaggttacatcgttgtgggcatagtggcatggctctacggggaccctagacaggttctgtatccgagaaatagtaccggagcttactgtggaatgggggaaaataaggataagccctatcttctgtattttaacatcttttcatgtatcctgagttctaacattatttccgtggccgagaacgggttgcagtgcccaaccccgcaaacagtgatcaccagtctgcaacaggagctctgcccgtctttcctgctgcctagcgcccctgcgttgggacgatgttttccatggaccaacgtgacccctccagcactaccgggcatcactaatgatacaaccatccagcaaggcatcagcggcctgatcgactctctgaacgccagagacataagtgtgaaaattttcgaggatttcgctcagtcatggtactggatacttgttgccctcggcgtggccctggttctctccctgctttttatactcctcctgaggctggtggcgggacctctcgtccttgtcctaatcttgggtgttcttggtgtcctggcttacggcatttattactgctgggaggagtatagggtgctgagggataaaggcgccagcatctctcagctgggattcacaacaaatttaagcgcgtatcagagcgtgcaggagacttggcttgccgccttgatcgtactggccgtgctcgaggccatcctgctgctgatgctaatctttctgaggcaacggatccggatcgctatcgcactgcttaaagaggccagcaaggccgttggacagatgatgagtaccatgttctacccactcgtcacattcgtacttctcttaatttgtatcgcttattgggctatgactgcactgtacctagcaacttcgggccaaccacagtatgtgctgtgggcaagcaatatctcctcacctggatgcgagaaggtgccaatcaacacatcctgcaatcccaccgcccatttagtaaactcaagttgtccaggcctcatgtgcgttttccaggggtacagctctaaaggtcttatacaacggtccgtgtttaacctacaaatctacggcgtcctcggactgttttggaccttaaactgggtgctcgccctcggtcagtgtgttctggccggtgccttcgcaagcttctactgggcctttcacaagccccaggacatcccaacgtttccccttatttctgcttttatccgaacactgcgttatcacaccggatccctggcctttggagccctgatcttgacccttgtccagatcgctcgcgtcatcttggaatatatagaccacaagctgcggggtgtgcagaacccggtggccaggtgtatcatgtgctgttttaagtgctgtctgtggtgcctggagaaatttatcaaattcctaaacagaaacgcttatatcatgattgccatttacggcaagaacttctgtgtgagcgctaagaacgccttcatgctgttgatgaggaacatagttcgggtggtcgtccttgacaaggtgaccgaccttctccttttcttcggaaaactcctggtggtcggcggcgttggagttcttagctttttttttttttccggaagaatccccggcttggggaaggatttcaaaagtccgcatttaaactactattggttaccgatcatgacctccattctcggcgcgtatgtgattgctagtggatttttttccgtattcgggatgtgcgtagatacgctttttctctgtttcctcgaggatctcgaacggaataacggatctctcgatcgaccttattacatgagtaaaagcttactgaagatcttgggcaaaaagaacgaagcgcctcccgacaacaaaaagcggaaaaagtag

SEQ ID NO: 206279 - DNA, 2133 bp, synthetic construct
  misc_feature 1..2133: note = Description of Artificial Sequence: Synthetic coding sequence
  source 1..2133: mol_type = other DNA
atgggcggcaagcagcgggacgaggacgacgaggcctacggcaagccggttaaatatgacccttcatttagggggccgatcaagaataggagttgcacagatgtgatttgctgtgtgctcttcttgttatttatactgggctacattgtggtcggcattgtcgcatggctttacggagacccaagacaagtcctgtatccccgtaactccactggtgcctattgcggtatgggcgagaacaaagataagccatacctactttattttaacattttttcatgcattctgtcttccaatattattagtgtagctgagaacgggctccaatgccccacaccacaagtttgcgtttccagctgcccagaagatccgtggaccgtcgggaagaacgagttctctcagaccgtgggggaggttttttacactaagaaccgcaacttctgcctacctggggtgccatggaacatgactgtcatcacttctttacaacaggaactttgtcctagcttcctgctgccttccgcacctgctctgggtcggtgctttccctggacaaatgtgacaccaccagcactacccgggattactaatgatactacgatccaacagggtatctctggactgattgatagcttgaacgcccgcgacatctctgtcaagatcttcgaagatttcgcccagtcatggtactggatcctggttgctctcggtgtcgccctggtgttgagcctgctttttatcctgctgctaaggctcgtggcaggacctctcgtgcttgtcctcatccttggtgtcttaggggtcctggcttatggaatctattactgttgggaggaataccgcgtactcagagacaagggcgcgtcaatctctcagcttgggttcaccacaaaccttagtgcctatcaatccgttcaggagacatggctagctgcactgattgtccttgccgtgttagaggctattcttctcctaatgttaatctttctccggcaaaggatacgcattgctatcgccctgctgaaagaagcatccaaggctgtgggacagatgatgtccaccatgttctaccccttggtgaccttcgtgctgctgctgatctgcatcgcatactgggctatgaccgccctgtatctcgcaacttcagggcagccgcaatatgtcctgtgggcatcaaatatctcatcccccggttgtgagaaggtccccataaacacatcctgcaaccccaccgcccaccttgtgaattcctcatgccccgggctgatgtgtgtctttcagggctactctagtaagggacttatacaaagaagcgtctttaacctgcagatttatggagtgttggggctgttctggacactgaactgggtgcttgccttgggacagtgtgtgcttgcaggtgcgtttgcatccttctattgggcgtttcataagccacaggatattcccaccttcccactgatttccgcctttatccgcacactgcgatatcatactggcagccttgcgttcggggccctaatcctgacccttgtgcaaattgcccgagtcatcctggagtatattgatcataaactgcgaggtgttcagaaccctgtcgctaggtgcataatgtgctgttttaaatgttgcctctggtgtctagagaagttcataaagttcttgaaccgtaacgcatatattatgattgctatctacggtaagaatttctgcgtgtctgctaagaacgccttcatgttgctcatgcggaacatcgtacgtgtggtagtgttagacaaggtcacagatttgttgctgttcttcgggaaacttctggtggtgggcggcgtgggcgtgctctcattctttttctttagtggcaggattccgggactggggaaggatttcaaatcacctcatctgaactattactggcttcctatcatgacgtcgatactgggagcctacgtgatcgcgagtggattttttagcgtgtttggaatgtgcgtagacaccctctttctgtgcttcctggaggaccttgagcggaataacgggtccttggacagaccgtattacatgagcaaatctcttctgaaaattcttggcaaaaagaacgaggcccccccggataataagaaaaggaagaaatag

SEQ ID NO: 206280 - DNA, 1236 bp, synthetic construct
  misc_feature 1..1236: note = Description of Artificial Sequence: Synthetic coding sequence
  source 1..1236: mol_type = other DNA
tgacgggacgaggacgacgaggcctacggcaagcccgtgaagtacgatcccagttttcgagggcccatcaagaaccggagctgcacagacgtgatttgttgtgtcttattcctgctcttcatcctgggctatatcgtcgttggcatcgtggcctggctatacggcgaccctagacaagttctgtacccaagaaactccactggcgcatactgcgggatgggcgaaaataaggacaagccttatctcctgtacttcaatatcttctcttgcatcttgtccagtaatatcatttcagtggctgaaaacgggctgcagtgccccacaccccaggtgtgcgtctccagctgccccgaagatccttggacggttggaaaaaatgaattttcccaaactgtaggagaagtgttctacaccaagaataggaatttctgcctaccaggagtgccttggaacatgactgtgattacctcgctccagcaggagctgtgccccagcttcctgctccccagtgcccctgccttggggcggtgcttcccctggactaacgtaacgcctcccgctctccccggcattacaaacgatacaaccatccagcaggggatcagcggcttgattgattctctgaatgccagggacatatcggttaagattttcgaagacttcgctcagtcatggtattggatcctggtcgctgtgggtcagatgatgtcaactatgttctaccctcttgttacttttgtgttgctcctgatatgtatcgcctactgggccatgacagcactctatctggctacgtccggtcagccgcaatatgtcctgtgggcctcgaacatttctagccctgggtgtgaaaaggtgcctattaacacctcatgcaatccaactgctcatctcgtgaactctagctgtcccggtctgatgtgtgtgttccagggatacagctccaaagggctgatccaaaggtctgtattcaatctgcagatctatggagtcttgggacttttctggactttaaactgggtgctcgccctgggccagtgtgtgttggcaggtgctttcgctagcttctactgggcctttcacaaacctcaagatatccctacttttcccctcatctccgccttcattcggaccctccggtaccataccgggagccttgcatttggagctctcatcctgactctggtccaaatcgctagggtcattctcgagtatatcgaccacaagttacgctag

SEQ ID NO: 206281 - DNA, 1236 bp, synthetic construct
  misc_feature 1..1236: note = Description of Artificial Sequence: Synthetic coding sequence
  source 1..1236: mol_type = other DNA
tgacgggacgaggacgacgaggcctacggcaagcccgtgaagtacgacccgtcattccgcggccccatcaagaataggagctgtacagacgttatatgctgcgtgctgtttctcctgttcattctcggatacatagtcgtgggcatcgtggcatggctgtatggggatcccagacaggtcctttacccccgtaatagcactggagcctactgtggtatgggagagaataaggacaagccatacctcttgtactttaacatattcagttgtatattgtcctctaatatcatatctgttgccgaaaatggattgcagtgcccgaccccccaggtgtgcgtgagctcctgtccagaggacccttggaccgtggggaagaacgaattctcacagactgtgggagaggttttttacactaaaaatagaaatttctgtttgccaggagtgccctggaacatgacagtcattacctctctgcagcaagagttgtgtccatcgtttctcctccctagcgcccctgctcttggacgctgtttcccctggactaacatcactcctcccgctctgcctggaattaccaacgacacaacaattcagcagggaatttcagggctcatcgatagtttgaacgccagggatatcagcgttaaaatcttcgaagacttcgcacaaagttggtactggattcttgtcgccgtgggccagatgatgtcgaccatgttttaccctcttgtgacatttgtgctactcctgatctgcattgcctattgggccatgacagcactgtacttggccacaagtggacagcctcagtacgtcctttgggccagtaatatttccagccctggatgcgagaaagtgcccattaatacttcttgtaatcccacagcccatctggtaaattcgtcttgtcccggcctgatgtgtgtcttccaagggtactcttctaagggactcatccagcgatctgtcttcaacctgcagatttacggagtgctggggctcttctggactctgaattgggtgctggctcttgggcaatgcgtcctagccggagcctttgcgagcttttactgggccttccacaaaccccaggacataccaactttcccactgatcagcgcattcatccggacactacgctatcacaccggttcgctggcttttggggccttgatcttgaccttggtgcaaattgccagagtgattctggaatatattgaccacaaacttagatag

SEQ ID NO: 206282 - DNA, 2133 bp, synthetic construct
  misc_feature 1..2133: note = Description of Artificial Sequence: Synthetic coding sequence
  source 1..2133: mol_type = other DNA
atgggcggcaagcagcgggacgaggacgacgaggcctacggcaagccggtgaagtacgatccttcttttagggggcccattaagaaccgctcttgtaccgacgttatctgctgcgtgctgttcctacttttcatcctgggctatatagtggtcggcatcgttgcatggctctacggcgatccacggcaggtgctgtatccgagaaatagcacgggagcctattgtggcatgggcgagaacaaggataaaccttacctgctgtactttaatatcttttcttgcatcctgtctagtaatataatctctgtggcggagaatggcctccagtgccctacaccacaggtgtgtgtgtcaagttgccccgaggatccttggacggttggcaagaacgaattttctcagactgtgggagaggtgttctacactaagaatcgtaacttctgcctgcctggggtcccgtggaacatgacagtgataacaagtttgcagcaagagttgtgtccatctttcctgcttccaagtgcgcctgccttgggccgctgcttcccatggaccaatataactccccccgccctgccaggcatcaccaacgacaccactattcagcagggtataagtgggttaattgatagcttgaacgcccgcgatatctctgttaagatcttcgaggattttgcccagtcatggtattggattctcgtggcactgggtgtggctctggtcctctctctgctctttattctgctgctcaggctcgtggccggccccctggtgctcgtactgattttaggcgtgctgggggtgttggcttatggaatttactattgctgggaggagtaccgagtgctgcgcgacaagggcgccagtatcagccagcttggatttacgactaacctttccgcctaccaatcagttcaagaaacatggctcgccgccctcatcgtcctggctgtcttggaggctatcctgctgcttgttttaatttttctcagacagaggattcggattgccattgcactgctgaaagaagcatcaaaagccgtggggcagatgatgtctacaatgttttaccccctggtgacattcgtcctcttactgatctgtattgcttactgggccatgacggcattgtaccttgctactagtgggcaaccccagtatgtgctgtgggcttctaatatctcgagcccgggatgcgagaaagtcccaattaacaccagctgtaacccaaccgcccacctggttaacagttcttgccccgggcttatgtgcgtgtttcaggggtatagttctaaaggactcatccaacgctctgtttttaacctccagatatatggcgtgctggggctcttttggacactcaactgggtgttggccctggggcagtgcgtcctcgccggggcttttgcaagcttttactgggccttccataagccccaggacatacctactttccccttgatatctgcatttattcgaactttgcggtaccacacagggagcctagcctttggtgctttaattctgacgctggtgcagatcgcccgagtgattttggaatacatcgatcataaactcaggggggtacaaaatcctgtggccaggtgcatcatgtgttgctttaagtgctgtctgtggtgtctagagaagtttattaagttcttaaacagaaatgcttatataatgattgctatctatggcaaaaacttctgcgtaagcgcgaaaaacgcattcatgctgctcatgagaaacatcgtgcgcgtggtcgttctggataaggtgacagatttgctgttgtttttcggcaaactgcttgtggttgggggagtcggtgtgctgagcttctttttcttttctggtaggatacctggcttgggcaaagactttaagagcccccacctgaactattattggcttccaatcatgacttccattcttggggcctacgtgatcgcatccggtttcttctctgtgtttgggatgtgcgtggataccttatttctgtgttttctggaggatctggagagaaataacggaagcctcgaccgaccctactatatgagtaagtctttgctcaagattctgggaaaaaagaacgaagctccccccgataataaaaaaaggaagaagtag

SEQ ID NO: 206283 - DNA, 2133 bp, synthetic construct
  misc_feature 1..2133: note = Description of Artificial Sequence: Synthetic coding sequence
  source 1..2133: mol_type = other DNA
atgggcggcaagcagcgggacgaggacgacgaggcctacggcaagccagtcaagtacgacccctccttccggggacccatcaaaaatagatcatgtacggatgtcatctgctgtgttctgtttttgttattcattctcggttatatagttgtcggaattgtcgcctggctctacggggatcctagacaagttctgtacccccgaaattcgaccggggcgtattgcggcatgggtgaaaacaaggacaaaccctaccttctctacttcaacatctttagctgtatactgtcctcgaatatcataagcgtagcagagaacggattgcaatgtcctaccccacaagtgtgtgtgtcttcttgtcctgaggacccatggacagtcggaaagaacgagttttcacaaactgtgggtgaggtattttatacaaagaacaggaacttctgcctacccggtgtcccttggaatatgactgtgataacgtctctgcagcaggagttgtgcccttcatttttgcttcccagtgcaccggctctggggcgatgcttcccttggaccaatattacaccacccgccctgccgggcatcaccaacgacaccacaatccagcagggtatctcaggcctgatcgattctctcaacgccagggacatatctgtcaagatattcgaagacttcgcacagtcctggtactggatcctcgtggccctaggagtggctctggttctctcccttcttttcatattgctgctacggctggtggcaggtcctctggtacttgttctcattctaggcgtgcttggcgtgttggcctatgggatttattactgctgggaggagtatcgcgtcctccgcgataagggcgcctcaatttctcaattgggattcacgacgaatttgagcgcataccagagcgtccaggagacttggctggctgctctcatagtccttgcagttcttgaggcaattctgctgttagtgctcattttcctgaggcagagaattaggatagctattgctttgttgaaagaggcaagcaaggccgtggggcaaatgatgtcaacaatgttctaccccctggtgacctttgtgttattgttaatctgcatcgcatattgggcaatgacagccctgtacctggctacttccggccagccccagtatgtgctctgggcaagcaacatcagttcgcccggatgcgagaaggttcctataaacacgtcatgtaatccgactgcacacttagttaattcctcttgtcccggtctcatgtgcgtgttccagggttacagctccaaaggtctgatccagagaagtgtgtttaacctgcagatatatggcgtgctcggactattctggaccctaaactgggttttagcgctgggacagtgtgtgctggccggtgcctttgcttcattttattgggcctttcataagccccaagacatcccaacttttcctctcatttcagctttcatccgcactttacggtaccatacaggcagcctcgcgttcggcgctctaattctcaccctggtacaaatagccagagtaatactagagtacatagatcacaagctgcgaggcgtgcagaatcccgtcgctcggtgtatcatgtgctgcttcaaatgttgcctctggtgtttggaaaagttcataaagttcctgaatcggaatgcctatatcatgattgctatctatggcaaaaacttttgcgtaagtgctaagaatgcgttcatgctgcttatgcggaatattgtccgcgttgtggtcttggacaaagtgacagacctcctgctcttctttggcaaacttttggtcgtcgggggagtcggcgtgctatcattttttttctttagtggcaggatacccggccttggtaaagatttcaagtctccacacttaaattattactggctgcctatcatgacctctatcctgggcgcatatgtgattgcctccggatttttttccgtgttcgggatgtgtgttgacaccctgttcctctgttttctcgaggatctcgagagaaataatggttctcttgaccggccatattacatgagtaaatccctattgaagatattggggaagaagaatgaagcaccaccagataataagaagagaaagaaatag

SEQ ID NO: 206284 - DNA, 2133 bp, synthetic construct
  misc_feature 1..2133: note = Description of Artificial Sequence: Synthetic coding sequence
  source 1..2133: mol_type = other DNA
atgggcggcaagcagcgggacgaggacgacgaggcctacggcaagcccgttaagtacgacccctcgtttcgagggccaatcaaaaatagaagttgtaccgatgtaatatgctgcgttttgtttctgttgtttattctcggatatattgtggtgggaatagtggcatggctgtatggcgatccccgccaggttctttatccgcgcaattccacaggcgcttactgtggcatgggagaaaataaggataaaccctaccttttgtattttaacatcttttcttgcattctgtcctccaacattatttccgttgcagaaaacgggctgcagtgtcccaccccccaagtgtgtgtatcctcatgtcccgaggatccgtggacagtcggcaagaatgaattctcacaaaccgtcggagaggtattctacaccaagaatcggaacttctgtctacccggagtcccatggaacatgaccgtgatcacaagtctgcagcaagagctttgccctagtttccttctgcccagcgcccctgctctcggtaggtgcttcccttggaccaacgtgacccccccggccctgcctggtattactaacgataccacgatccaacagggtatttcgggcctgatagatagtttgaacgcccgtgacatttcagtgaagatcttcgaggactttgcccaatcctggtattggatcctggtggccctgggcgtggccctcgtactctcgcttttattcattcttttgttaagactggtcgcaggccctcttgttctcgtgctgatcctgggggttcttggtgttctggcttacggtatttattactgctgggaggaatacagggtattacgtgataagggcgcctcgatatcccagctcggatttacaacaaatctgtcagcatatcaatccgtgcaggagacttggctggcggctctcatagtgctggccgttctggaagcaatcttgttgttgatgttgatcttcttgcgccagcggatcagaatcgccattgcgctccttaaggaggcgtctaaggccgtggggcaaatgatgagtactatgttctatcctctggtgaccttcgtgctgctcctcatatgcattgcctactgggcaatgaccgccctatacctggccaccagcggccagcctcagtatgtgctatgggcatcaaatatctcgtccccgggctgtgaaaaagtgcccataaatacctcctgtaatcccacagcacaccttgtgaattctagctgtccgggcctgatgtgcgtcttccaggggtacagctctaagggactgatccagagatctgtgttcaacctgcagatctatggggtgctggggctgttctggacgctgaattgggtattggcgctgggccagtgtgtgcttgccggggctttcgccagcttctactgggccttccataagccgcaagacataccaaccttccctctgatctccgcattcatcagaactttacggtatcacaccggctcgctcgcttttggcgctttgatcctcactttagtacagattgcccgagtgatcttggaatacatcgatcacaaattgcgcggtgttcaaaatccagtggcaaggtgcatcatgtgttgtttcaaatgctgtctctggtgcctcgaaaagtttataaaattccttaatcggaatgcctacattatgatagcaatttatggcaagaatttttgtgtgtcagccaagaacgcattcatgttgctgatgcgcaatatcgttagggtcgtcgtcttggataaagtgacagacctgctgctgttcttcgggaagctgttggtcgttggcggcgtgggagtcctgtccttttttttcttcagtgggcggatccccggcttaggcaaggatttcaaaagcccccacctgaattactattggctcccaattatgacatccatcttaggagcatacgtgattgcttctggattcttttccgtgtttggcatgtgcgtggacactttgtttctgtgttttcttgaggacctggaacggaataacggcagcctcgaccggccgtactacatgtcgaaatcactcctcaaaatattgggtaaaaaaaatgaagctcccccagacaataagaaaaggaagaaatag

SEQ ID NO: 206285 - DNA, 1236 bp, synthetic construct
  misc_feature 1..1236: note = Description of Artificial Sequence: Synthetic coding sequence
  source 1..1236: mol_type = other DNA
tgacgggacgaggacgacgaggcctacggcaagcccgtgaagtacgaccccagcttccgtgggccaattaagaacaggagctgtaccgacgtgatttgctgcgtcctgttcctgctgttcattctgggttacattgtggttgggatcgttgcatggctgtatggggatcccaggcaagtgttatatccccgtaacagcacgggagcttactgtggcatgggtgagaacaaggacaagccatacctcctctatttcaacattttcagctgtatcctgtctagcaacatcatatcagtcgcagagaatgggcttcagtgcccaactcctcaggtctgtgtgtcgtcttgtcctgaggacccgtggacggtgggaaagaacgagttctcacagacagttggcgaagttttttacacaaaaaatagaaacttctgcctgccaggcgtcccctggaacatgaccgtgattactagtcttcagcaggagctgtgtcccagtttcttgctgccgtccgcccccgcactcggacggtgcttcccttggacgaatgttacacccccggcgctgcccggtataactaacgatactacaatacagcagggtatcagcggacttattgactctctgaacgcccgggatattagtgtcaagatattcgaggactttgcgcaaagttggtactggatcttagtcgccgtaggacaaatgatgtctactatgttttaccccctagtgacatttgtgctactgttaatctgtatagcctattgggctatgacggccctgtacctggccacgagcgggcagccccagtacgtcctctgggcatctaatatatccagccctggctgtgaaaaggtgcctatcaatacttcttgtaatcctaccgctcatctggtgaattcttcctgccccggcctgatgtgtgtcttccagggctattcaagtaagggactgatccagcgaagtgtgtttaacttgcagatttatggagtgctaggcctgttctggaccctaaattgggtgctggctctcgggcagtgtgtgctcgctggggcttttgcttctttctactgggccttccataagccacaagatattcctaccttccctctcatctccgcatttattagaaccctgcgctatcatactgggtcactggccttcggggctttgattctgacactcgtacaaatcgcacgtgtgattctggaatacattgatcacaagctgaggtag

SEQ ID NO: 206286 - DNA, 1236 bp, synthetic construct
  misc_feature 1..1236: note = Description of Artificial Sequence: Synthetic coding sequence
  source 1..1236: mol_type = other DNA
tgacgggacgaggacgacgaggcctacggcaagcccgtgaagtacgacccttcgtttcgggggcccataaagaatcgatcttgcacagatgtcatctgctgtgtgcttttcctgctcttcatcctaggctacatcgtcgtggggatcgtggcctggctgtatggcgacccgcgccaggtgctgtaccctagaaattctactggtgcctactgcgggatgggcgagaacaaagacaaaccttatctactgtacttcaacatctttagctgcattttgagtagtaatatcatatcagtggctgagaatggcctgcagtgccccaccccccaggtttgtgtgtctagttgccccgaggacccttggacagtgggtaagaacgaattctcccagacagtgggagaagtgttttatacaaagaaccggaacttctgcttgccgggggttccgtggaacatgactgtgattacttcattgcaacaggaattatgtcctagcttcttgctgccctcagcacccgctctgggacggtgtttcccctggacaaatgtcactcccccagcgctgccgggaatcacaaacgacactaccattcagcagggaatctctggcctcattgattccctgaacgctcgcgacatctccgtgaaaatctttgaagattttgctcagtcgtggtattggatcttagtggcagtcggacagatgatgtctaccatgttctacccactcgtcaccttcgtgctcctcctcatctgcatagcctactgggccatgactgctctctatctggctacgagcggacagcctcaatacgtgctgtgggccagtaatatcagctccccggggtgcgaaaaagtgccaatcaacacgtcgtgcaaccctaccgcccatctggtgaattcgtcatgtcctggactcatgtgcgtgttccaggggtatagtagcaaagggctcatacagaggtccgtctttaacttgcagatttacggcgtgcttggcctgttctggaccttgaactgggtgcttgcattgggccagtgtgtcttggcgggcgcatttgctagcttttattgggctttccacaagcctcaggatattcctactttccccttgattagtgccttcatccggactctccggtaccatacaggctcactcgcatttggagccctgatccttacactcgtacagattgcccgcgtgatcctggagtacattgaccacaagttgcggtag

SEQ ID NO: 206287 - DNA, 1236 bp, synthetic construct
  misc_feature 1..1236: note = Description of Artificial Sequence: Synthetic coding sequence
  source 1..1236: mol_type = other DNA
tgacgggacgaggacgacgaggcctacggcaagcccgtgaagtacgatccatcctttcgcggaccaattaaaaatcggagttgtaccgatgtgatttgttgtgttctgtttcttctgtttatcctgggctacattgtagttggaatcgtcgcctggctgtatggcgatccccgtcaggtcttataccctagaaactccacaggggcctattgtgggatgggtgagaataaggataaaccctatctgctgtattttaacatattctcctgtatcctgtcctccaacattatcagcgtcgccgagaatggactacagtgtcctacaccccaggtttgtgtgtcctcctgtccggaagacccatggacagttggaaagaatgaattttctcagactgtcggagaagtgttctacactaagaatagaaatttctgcctccccggggtaccatggaacatgacagtgatcacatccctacaacaagagttgtgccctagctttttactgccttccgctcctgctctaggcaggtgttttccttggacaaatatcaccccacctgctcttccaggaatcactaatgataccactatccaacagggcataagcgggctgatagactccctgaatgcccgagatatctccgtgaagatctttgaggattttgcgcagtcttggtactggattttggtcgctgtggggcaaatgatgagtactatgttctacccactcgtgacatttgtcctcctcttgatctgtatcgcgtactgggccatgactgctctctatctggctacctcgggccagccccagtacgttctgtgggcctcaaacatatccagccctggctgtgagaaggtgcctattaatacatcgtgcaaccccacagcccacctggttaattcctcttgcccaggtctgatgtgtgtcttccagggatactcatccaaaggcttgatccaacggtcagtatttaacctccaaatctacggagtgctcgggcttttctggactctgaactgggtgctggcactgggacaatgtgttcttgccggagctttcgcgagtttctactgggcttttcacaaaccacaggacattcctaccttccctcttatttcggcctttatacggacactcagatatcataccggttccctggcctttggggcactaatattgacactagtacagattgcacgcgtgatcctggagtacatcgaccataaattacggtag

SEQ ID NO: 206288 - DNA, 2133 bp, synthetic construct
  misc_feature 1..2133: note = Description of Artificial Sequence: Synthetic coding sequence
  source 1..2133: mol_type = other DNA
atgggcggcaagcagcgggacgaggacgacgaggcctacggcaagccagttaaatatgacccgagtttcagagggcccataaaaaaccgctcatgcacagacgtgatttgctgtgtcttgtttctcctgttcattctgggatacattgtcgtaggcattgttgcatggctgtatggggatccaagacaggttttatatccccgcaattccacgggtgcctactgcggaatgggcgagaataaggataagccgtacctcttatatttcaatatattttcttgtatcctgagcagcaacatcatttcagttgcggaaaacggcctgcagtgccccacccctcaagtgtgtgtatccagctgcccagaggatccttggacggttgggaagaatgagttttcccaaaccgtgggcgaggttttttatacaaaaaataggaatttctgtctaccaggtgtgccttggaacatgaccgtcatcacatcccttcagcaggagctatgccctagtttcctgctgccttcagcaccagccctcgggcgctgctttccatggactaacatcacccctcccgccttacccggcataacaaacgatactacaattcaacagggaatatcaggactgatagactccttaaatgccagagatatctcggtgaagatttttgaggacttcgcgcaaagctggtactggattctggtggccctgggggtggcactggttctttcactgctatttattctgttacttcgattggtggcgggtcctctagtgctcgtcctgattcttggagtcctgggagtgctggcctatggtatatactactgctgggaagagtaccgggtattgcgggacaagggcgcatcgattagccagcttggctttactaccaaccttagcgcttatcagtcagtgcaggaaacatggctggctgccctgatagttctcgcagtgctggaagcaatcttactgctagtgctcatattcctaaggcagagaatacggatcgcaatcgccctgttaaaagaggcaagcaaggccgtcgggcagatgatgagtaccatgttctaccccctggtgacgtttgtgctcttacttatctgcatcgcctactgggctatgacagctctgtatctggccaccagcgggcagccacagtatgtgctgtgggcgtcaaacatctcctcccccggctgcgaaaaggttccgattaataccagctgtaatccgacagcacatttggtaaattcttcctgcccaggcttgatgtgcgtcttccagggctattcctcaaaagggctgatccaacgctccgtttttaatctgcagatctatggcgtcctggggctgttctggaccctcaactgggttctggcgctaggccaatgcgtcctggcaggggcgtttgcttcgttctactgggcgtttcacaagccccaagatatccctacgttcccgttaatttctgctttcattcgcactctgaggtaccacaccggcagccttgcatttggcgcactcatactgactctggtccaaatcgcgagggttatcttggaatacatcgatcacaaattgcgtggagttcagaaccctgtggcccggtgcattatgtgttgcttcaaatgttgtctctggtgtcttgagaaatttataaagtttttaaataggaatgcctacataatgattgccatttatgggaagaacttctgcgtgagtgcaaaaaacgcgttcatgctgcttatgcggaatatagtccgggtcgtagtgcttgataaggtgactgacctcctcctgttctttggcaagctgctcgtggtaggcggtgttggcgtcctatcctttttttttttttctgggcgcattcccggcctcggcaaagattttaaatctcctcacctcaattactactggttacccatcatgaccagcatactgggtgcttacgtcattgcctccggcttcttcagtgtctttggcatgtgcgttgacactctgtttctttgtttcttggaagacctggagaggaataacggctcactcgatcgtccttactacatgtcgaagtctttgctcaaaatcttgggcaagaaaaacgaggctcctccagataataaaaaaaggaaaaagtag

SEQ ID NO: 206289 - DNA, 1236 bp, synthetic construct
  misc_feature 1..1236: note = Description of Artificial Sequence: Synthetic coding sequence
  source 1..1236: mol_type = other DNA
tgacgggacgaggacgacgaggcctacggcaagcccgtgaagtacgatccttctttcaggggccccatcaagaaccggtcttgtaccgatgtgatctgttgcgtcctgtttctgttgtttatcctgggatatatagtggtgggaattgtcgcctggctttatggtgacccacggcaggtgttgtatccacggaacagtacaggtgcttactgtggaatgggagaaaataaagataaaccatatcttctctatttcaatatttttagctgcattttaagcagtaatatcatatccgtggccgagaacggcttgcaatgtcctactccccaggtctgtgtttcttcatgcccggaagacccatggaccgtgggaaagaacgaattcagtcagacagtcggagaggtcttctatacaaaaaaccggaatttctgtctgcccggcgtgccatggaacatgactgtgatcacttccctgcagcaggagttatgcccatcttttctattaccctccgcccccgcgctgggcaggtgctttccctggaccaatattactccaccagctctccccggcattacgaacgacacaactatccaacagggcatcagcgggctgattgactccctaaatgctcgggacatctcagtgaaaatctttgaggacttcgcccagtcctggtattggattcttgtcgcagtcgggcagatgatgtctacaatgttctaccctctggtgacattcgtgctgcttctcatatgtatcgcatactgggcaatgacagccttgtaccttgccacctcagggcagcctcaatatgttctttgggcctcaaacattagtagccccggatgcgagaaagtgccaataaatacatcttgcaatcccacagcccacctcgtgaattcctcctgtccgggtttaatgtgcgtgttccaagggtatagctccaagggcctgatccagcggtcagtgtttaaccttcagatttacggcgtgttgggcctgttttggaccctcaattgggtgctcgcactagggcaatgcgtgttagcgggagcctttgcctcgttttattgggcattccacaagccacaggatatacccactttccccctcatttcggcttttataaggactctccggtatcataccggcagcctcgcctttggagctctgatacttaccctggtacaaatcgcccgtgtgattcttgaatatattgaccataagctgcggtag

SEQ ID NO: 206290 - DNA, 2133 bp, synthetic construct
  misc_feature 1..2133: note = Description of Artificial Sequence: Synthetic coding sequence
  source 1..2133: mol_type = other DNA
atgggcggcaagcagcgggacgaggacgacgaggcctacggcaagcctgtgaaatacgacccaagctttcgcggtcctattaaaaaccggtcttgcaccgatgtgatatgttgcgtactgttcctgttgtttattctgggctatatcgtggtaggcattgtggcctggctgtatggtgacccccgacaggtcctgtacccccgtaattctacaggcgcatactgcggcatgggggaaaacaaagacaaaccttatctcctgtactttaacattttctcatgcatactttcctctaacataatctccgtggctgagaatggactccagtgcccaacacctcaggtgtgtgtttcctcttgccctgaagatccttggaccgttggtaaaaacgaattctcccagacagtcggggaggtcttttacactaagaatcgaaatttctgcctcccaggcgtgccctggaacatgactgtcatcacttctctccagcaggagctctgtccgagcttccttctccccagcgcacctgcccttgggcgatgcttcccttggaccaatgtgaccccccccgcactgcctggaattactaacgacaccaccattcagcaaggcatcagcgggctcatcgatagtcttaacgcccgcgacattagtgtgaagattttcgaggattttgcccagtcttggtactggatactagtggcgctgggcgtcgcgcttgtcctgagtttactttttatcctgctgctgcgtctcgtggccgggcctcttgttctggtgttaattctgggcgtgcttggtgtcttggcctatgggatttactactgctgggaggagtatagggtacttagggacaagggcgcttccatttctcaacttggctttacaacaaacctgtctgcataccaatcagtccaggaaacctggctggccgccttgatcgtgctcgctgttctcgaagccattctgctactaatgcttatctttctcaggcagcggattcgtatcgccatagccttactgaaagaggcatctaaagctgtcgggcagatgatgagtaccatgttttatcccttggttacgttcgtcctcctgctaatatgcatagcctactgggccatgactgcactgtacttggctacaagtggccagccacagtacgtcctctgggcctccaatataagcagtcctggatgtgagaaggttcctataaatacttcctgtaatcctaccgcccatctggtaaatagcagctgtcctggactcatgtgtgtgttccagggctactcttccaaaggactgatacagcgttcagtattcaacctgcagatatatggagtgttaggcttgttttggacacttaactgggtgctggccctgggccagtgtgtcttggcgggcgccttcgcctctttctactgggcatttcataaaccccaagatatccctacctttcctctcatttctgcttttattagaacactgagatatcacacgggcagtctagccttcggtgctctcattctcacactggtacagattgcccgggtcatcctagaatacattgaccacaaactgagaggggtgcagaaccccgtagcacgttgcatcatgtgttgttttaaatgctgcttgtggtgcttggagaagtttataaaattccttaaccgcaacgcatacatcatgatcgctatctatggaaagaatttctgcgtcagtgccaagaacgctttcatgctgctcatgcgaaacattgtgcgcgtggtggtcctggataaggtcacggacttgctgctgtttttcgggaaactcctcgtggtggggggggtcggcgtgctcagttttttttttttcagcgggcggattccaggtcttggcaaggacttcaaaagtccccatctgaactactactggcttcccattatgacatctatcttgggagcctacgtgattgccagcggcttcttttctgtctttggaatgtgcgtcgacacattgttcttatgtttcctcgaggatctagaacggaacaatgggagcctggataggccctattatatgtctaagtccttgcttaagatcctcggcaagaagaatgaagcccctccagataataagaagcgaaagaagtag

SEQ ID NO: 206291 - DNA, 1236 bp, synthetic construct
  misc_feature 1..1236: note = Description of Artificial Sequence: Synthetic coding sequence
  source 1..1236: mol_type = other DNA
tgacgggacgaggacgacgaggcctacggcaagcccgtgaagtacgacccatcattcagaggaccaatcaagaacagaagctgcacagacgtgatctgttgtgtgctgttcctgctcttcatcctagggtacattgtggtcggaatcgttgcgtggctttatggagacccccggcaggtgctctaccctcgcaattccactggcgcctactgtggcatgggcgaaaataaagataagccttatctcttatatttcaatatatttagctgcattctctcgtccaatatcatctctgtggctgagaacggactgcagtgcccaacgccccaggtgtgcgtgtctagctgtccagaggatccctggacagtgggcaagaatgaatttagccaaacagtcggagaagttttttacactaaaaatcggaacttctgtctgcctggggtaccctggaacatgacagttatcacttctttgcaacaggaactttgtcccagctttctcctgcccagtgcaccagcactggggcgctgtttcccatggacaaacgtgacaccacctgcactgccgggtataacaaatgatacaactatccagcagggtatatcgggtctgattgatagcttgaatgccagggacatcagtgtgaaaatcttcgaggattttgcccagtcatggtattggatcttggtggcagtggggcagatgatgagcaccatgttttatccgcttgtaacctttgttttgcttctgatctgtatagcatactgggcaatgactgcactgtatctcgctacatccggacaaccacagtacgttctctgggcttcaaacatcagcagccctggctgcgaaaaagtgcctattaatacctcttgcaatcccacagctcacctggtgaatagctcctgtcctggcctgatgtgcgtgttccaaggctactcgagtaaaggtttgattcaaaggagcgtgttcaatctacaaatctacggtgtgctgggcctattttggacactgaactgggtactggcactgggccagtgcgtgttagcaggtgcttttgccagtttttattgggcctttcacaaaccccaggacattcccaccttcccgctgatcagtgcattcattcgtacccttcggtaccatactggctcgctagccttcggtgcgctgatcctgacgctggtgcagatcgctcgcgtgattctggagtatattgaccataagctgcgatag

SEQ ID NO: 206292 - DNA, 1905 bp, synthetic construct
  misc_feature 1..1905: note = Description of Artificial Sequence: Synthetic coding sequence
  source 1..1905: mol_type = other DNA
atgggcgagaacaaggacaagccctacctgctgtacttcaacatcttttcatgtatcctctcctcaaatatcatttccgtggcggagaatgggctgcagtgtcccacaccacaggtgtgcgtctcaagctgtcctgaggatccctggactgtggggaagaatgagtttagccagaccgttggcgaggtattctatacaaaaaatcggaacttctgtctgcccggcgtgccttggaacatgacggtaatcacctccctgcagcaggagctgtgccccagctttctgctgccttccgctcccgcactaggacgctgttttccctggactaacgtaacgccccccgctctcccgggcattacaaacgatacaaccatccagcagggaatctcaggcttgatcgacagtcttaacgcacgtgatatctccgttaaaatctttgaggattttgcacagagttggtattggatcctggtcgcgttgggggttgccttggttctttctctgctctttattctgctactgcgcctcgttgctggtcctctggtgctggtgctgatcctcggcgttcttggggtcctggcctacggtatctattattgttgggaagaatatcgagtcctcagggacaaaggtgcatctatcagtcagcttggattcaccactaatttgtccgcataccaaagcgtgcaggaaacttggctcgccgccctgatcgtgctcgcagtgctagaggctatcctgctgcttatgctcatttttctgaggcagcggattcgtatagccatcgcccttctgaaggaggcctctaaagccgtggggcaaatgatgtcaacgatgttttatccattggtgacttttgtcctcttgctgatttgcatagcctattgggcaatgaccgccctctacctcgctacttcaggccagcctcagtacgtcctgtgggcgtcaaatatttctagcccgggttgcgagaaggtacccatcaacacctcttgtaatcctactgctcatctggtgaattcatcatgtccaggattgatgtgcgtttttcagggctacagttcaaaggggctgatacagaggtctgttttcaatttgcagatctacggggtgctgggattgttttggacgctcaattgggtgctcgcccttggtcaatgtgtcttggccggcgcctttgcttcgttctactgggcctttcataagccacaagacataccaacattcccactgatctcagcgttcatcagaacgctgcgataccacactggatctctcgccttcggagcactaatactcaccctcgttcagatcgctagagtgattctcgagtacatcgaccataaacttcgtggcgtacaaaatcccgtcgcaagatgcattatgtgttgctttaagtgctgcctgtggtgcttggaaaaatttatcaaattcctcaaccgtaacgcctacattatgatcgccatctacggcaaaaatttctgcgttagcgcaaagaacgccttcatgctgctcatgaggaatattgtccgagtagtggtgctagataaagtaaccgatctgctgttattctttggcaaactcctggtcgttgggggggttggtgtgttaagtttctttttcttttcaggccgtatccccggtctcggcaaagatttcaagtctccccaccttaactactattggttaccaattatgacctccattctcggcgcatacgttatcgcatctgggttcttcagtgtcttcggaatgtgcgtggacacactgttcctttgtttcctggaagatttggaaagaaataacggcagcctcgatcgcccttactatatgtcgaagagtctcctgaagatcctgggaaagaaaaacgaggctccaccagacaataagaaaagaaagaagtag

SEQ ID NO: 206293 - DNA, 1905 bp, synthetic construct
  misc_feature 1..1905: note = Description of Artificial Sequence: Synthetic coding sequence
  source 1..1905: mol_type = other DNA
atgggcgagaacaaggacaagccctacctgctgtacttcaacatcttctcctgtatcctgtctagcaacatcataagcgtggccgaaaacggccttcagtgtcccacccctcaggtctgcgtgtccagctgccctgaagacccttggactgttgggaaaaatgaattttctcaaactgtcggagaagtgttttacaccaaaaaccgcaatttttgcctacctggcgttccctggaacatgaccgtgattacatctttgcaacaggaactgtgccccagctttcttttgccgtccgcccctgccctggggaggtgcttcccttggaccaacgttacacctccagctctacccggcatcacgaacgacactacaattcagcaggggatcagtggactaatcgattccctaaacgcccgcgatatatctgtcaaaatctttgaggacttcgctcagtcctggtactggattcttgttgcgctgggggttgccctagtcctgagtctgctgtttatcctgctgctgcgacttgtcgccggcccgctcgtcctcgttctgattctgggagtgttaggcgttctggcctacggaatttactattgttgggaggagtaccgtgtcctgagagacaagggcgcttccattagccagctcgggttcactaccaatctatcggcgtatcagagcgtgcaggaaacctggctggctgccttgatcgtgctcgccgtcctggaagccatcctcctactgatgctgatcttcttgagacagaggatcaggatcgccatcgcactgctgaaggaggcaagtaaagccgttggtcagatgatgagcaccatgttctatccgctcgttaccttcgtcctgctgctcatttgtattgcctattgggcgatgactgctctgtaccttgcaaccagtgggcagccgcaatatgttctgtgggcaagcaatatcagcagtccgggttgtgagaaggtacccataaacacaagttgtaaccctaccgcgcacctggttaactcttcctgtcctggcctaatgtgtgtttttcagggttacagtagcaaaggactaatccagaggtctgtgttcaatctgcaaatctatggggttctcgggctgttttggacactgaactgggtcttggcactcgggcagtgcgtgctggccggcgcatttgccagtttttattgggccttccacaagccgcaggacattcccactttccctttaatctcagcgttcatccgcacactgcggtatcatactgggtctttggcattcggcgcactgattctcacacttgtgcaaattgcccgtgttatccttgaatacatcgaccataaactgcgcggagtgcaaaaccccgttgcccgatgcataatgtgttgcttcaagtgttgcctctggtgcctggagaagttcatcaagttcctcaatcggaacgcttacatcatgatcgccatttatggcaagaacttttgtgtgtccgccaagaatgcctttatgctactgatgagaaacatcgtgcgggttgtggttctcgataaagtgacagatctacttctttttttcggaaaactcctcgtcgttgggggagtcggggtgctatcctttttcttttttagcgggcggatccctgggctcggtaaagattttaagagcccccacttaaactactactggttacccatcatgacctcaattctgggagcctatgtcattgcatcgggcttcttttccgtgttcgggatgtgcgtcgatacactgttcttatgttttttggaggacctcgaaagaaacaatgggtcacttgatcggccatattatatgtctaaatcccttttgaaaatcttaggaaaaaaaaacgaggcccctcccgataacaaaaaaagaaagaagtag

SEQ ID NO: 206294 - DNA, 1905 bp, synthetic construct
  misc_feature 1..1905: note = Description of Artificial Sequence: Synthetic coding sequence
  source 1..1905: mol_type = other DNA
atgggcgagaacaaggacaagccctacctgctgtacttcaacatcttctcgtgtattctttccagcaacatcatctcggtggccgagaacggcctccagtgtcctacccctcaggtttgtgtttcctcatgccctgaagacccctggacagtgggcaagaatgagttctcccagacagtgggcgaagtcttctacacaaagaatcgcaacttttgtctgccgggagtgccgtggaatatgacagtcatcactagcctgcagcaggagttgtgtccgagctttctgcttccttctgctcccgccctgggtaggtgtttcccgtggacgaatatcaccccacccgccctgccaggcatcacaaacgatacaactatccagcaggggattagtgggctgattgactccttgaatgcccgtgatatttccgttaaaatcttcgaggacttcgctcagtcttggtattggattctggtggccttgggcgtggctttagtgctttctctcttattcatcctattgttgagactcgttgcgggtcctctcgtgctggtgttgatccttggagtcctgggtgtgcttgcctacgggatttattactgctgggaggagtatcgagtgctgcgtgataagggggccagtatctcacagctgggctttacaactaatctgtccgcttaccagtccgtccaggagacatggctggctgctctcatcgtgcttgccgtcctggaggccatattgcttttagtcttgatttttctccggcagcgcatccgaatcgcaattgcactgctaaaggaggcgtccaaggcagtaggccagatgatgtccacgatgttctaccctcttgttacgttcgtgttgttgctcatttgcatcgcctactgggctatgaccgcactgtacctcgccaccagcggtcagccccaatacgtcctttgggcctccaacatctcgtctccgggttgcgaaaaagtccccatcaacacttcgtgcaatccgactgcccacctggttaatagttcctgccctggcctaatgtgcgtcttccaaggttatagttccaaaggacttattcagcggagtgtgtttaacttacagatctatggggtcctgggcctattctggactctgaactgggttctggctttgggccagtgcgtgttagcaggggcattcgcttctttttactgggcttttcataaacctcaagacatcccaaccttcccactcatttccgccttcatcaggaccttaaggtatcacacgggaagtctggccttcggggccctgatccttaccctggtccagattgctagggtgatcctggagtatatagaccacaagcttcgcggagtgcagaatcccgtcgctagatgtatcatgtgctgtttcaagtgttgcctgtggtgcctcgaaaagtttatcaagtttctcaacaggaatgcctatatcatgatcgctatctacggaaaaaatttttgtgtgtctgctaaaaatgcctttatgctactcatgaggaatatcgtgcgtgtcgtcgtacttgacaaggttacagacttgcttcttttttttggcaagctgctggttgttgggggcgtcggcgtcctaagtttttttttctttagtggaagaattccaggccttggcaaggattttaaaagtccgcacctgaactactattggctgccaataatgacgagtatcttaggagcttacgtcatcgcgtctggctttttcagcgtgttcggcatgtgtgtggacacactgttcttgtgttttttggaggatctggaacggaataacggctcgctcgatcgcccttattatatgtcaaagagcctgctaaaaatactcggtaagaagaacgaggccccaccagacaacaagaaaagaaaaaagtag

SEQ ID NO: 206295 - DNA, 2007 bp, synthetic construct
  misc_feature 1..2007: note = Description of Artificial Sequence: Synthetic coding sequence
  source 1..2007: mol_type = other DNA
atgggcggcaagcagcgggacgaggacgacgaggcctacggcaagccggtgaagtatgatcccagctttagggggccaattaaaaaccgctcatgtactgacgtcatctgttgtgtgctgtttctcctcttcatactgggatatatagtcgtgggaatcgtcgcctggctgtacggcgaccctcgccaggtcctgtatcccaggaattctaccggggcatactgcgggatgggcgagaacaaggacaaaccatacctactgtatttcaatattttctcttgcattctgtctagtaacattattagcgttgctgagaacgggttacagtgtcctactccacagactgtgattactagcttgcagcaggagctgtgtcctagttttctccttccttccgcgcccgccctgggtagatgttttccttggacaaacatcacccctcctgccctcccaggtatcacaaatgacaccacaatacagcaaggtatttccggtctgattgattccctaaacgcgagggacataagcgtgaagatttttgaagacttcgcacagtcgtggtactggatactggtcgcgctcggagtggcattagtgctgtctctactctttatcctcctgttgcgcctcgtggctggacccttagtgctggtactaatcttaggggtgctgggcgtgctcgcatatgggatttactattgttgggaggagtatcgagtccttagagataagggagcttctataagccagctcgggtttacgactaacttgagcgcatatcagtccgtgcaggaaacgtggctggcggcactgatcgtactagccgtgctggaagcaattctgctgctggtcctaatcttcctgcgccaacgcatcagaatcgctattgccctccttaaagaggcctccaaggcagtgggtcagatgatgtcgactatgttctatcctctggtcacattcgtgcttctgcttatctgcatcgcatactgggctatgacagctctgtatctagcaacatcagggcagcctcagtatgtactctgggctagcaatatcagcagcccaggatgcgaaaaagtgccaatcaacacttcctgcaatcccaccgctcacctggtgaactcatcatgcccagggctaatgtgcgttttccagggatactcaagcaaaggcctgatacagcgctccgtgtttaacttacagatctacggagtactcggattgttttggacgctaaactgggtactggctctaggccagtgtgtgctggcaggggcctttgcctccttttattgggcattccacaagcctcaggatatccccactttccccctaattagtgcattcattaggacactccgttaccacaccggctcacttgcgttcggagcacttattctgacgctggtgcagatagcaagagtcatactggagtacattgatcacaaactgagaggcgttcaaaatccggtggctaggtgtattatgtgttgcttcaagtgctgtctgtggtgcctcgaaaaatttattaagtttctcaaccgcaacgcctatatcatgatcgccatctatggtaaaaacttctgcgttagcgccaagaatgcctttatgctgctgatgagaaacatcgtgcgcgtcgtcgtgttggacaaagtcaccgatttgctcctcttctttgggaagctgctcgtagtgggaggcgttggcgtccttagcttcttttttttctccggacgaataccaggtctgggcaaggactttaagagtccccatttgaattactattggcttccgatcatgacatccatccttggcgcctacgtgatcgcctctggattcttctcagtcttcggcatgtgcgtggacaccctgtttctgtgcttcctggaggatctcgagcgaaataacggctctcttgaccgcccgtactacatgtccaaatcactgcttaaaatcctgggcaagaagaacgaagcgccacccgacaacaaaaagcgcaaaaagtag

SEQ ID NO: 206296 - DNA, 1905 bp, synthetic construct
  misc_feature 1..1905: note = Description of Artificial Sequence: Synthetic coding sequence
  source 1..1905: mol_type = other DNA
atgggcgagaacaaggacaagccctacctgctgtacttcaacatcttttcatgcatcctgtcgagcaacataatcagcgtggctgagaatggcctgcagtgtccaactccacaggtatgcgtttcctcctgtcctgaggacccctggacagtagggaagaacgagttcagccagactgtaggggaggtgttctatacaaagaaccggaatttctgcctgccaggggtcccttggaatatgacggtaatcaccagcctccaacaggagctgtgccctagctttctcctccctagcgcaccggctctgggaaggtgcttcccatggaccaatgtgacacctccggcgctgcctggaattacaaacgatactacaattcagcagggcatttctgggctgattgattcactcaacgcacgagacatctccgtgaaaatctttgaagactttgcacaatcttggtattggatcctggtggcacttggggtcgccctggtgctgagtctgctgttcatactcctgcttaggctggtagccggcccgctggtcctggtactcatcctcggcgtgctgggggtcctggcctatggaatctattactgctgggaggagtaccgggtgctgagggacaagggggcctcaatcagtcaactcggattcacaacaaatctgagtgcttaccagtccgttcaggaaacgtggctggccgcattaattgtgcttgcggtgctagaagctattctcctgttgatgttgatcttccttcggcagcgcattagaatagcaatcgcacttctcaaggaagcttctaaggccgtgggccagatgatgtcaacaatgttctacccactggtgacattcgtcttactccttatatgcatcgcatactgggctatgaccgcattatacctcgccacgagtggccagcctcagtacgttctgtgggcttcaaacatctcttctcctggctgtgaaaaagtgcccatcaatactagctgcaatccaacagcgcatctcgttaatagttcctgccctggactgatgtgcgttttccagggctactctagcaaaggcttgatccagagaagcgttttcaatctacagatatatggagtcctgggtctgttctggaccctgaattgggtgctggctctgggacagtgcgtacttgccggcgcctttgccagtttctactgggctttccacaagccccaggatattcctactttcccactgatctcagcattcatacgtacccttcgttatcacacaggatccttagccttcggggcacttatcctaacactcgttcagatcgcccgggttatcctggagtatattgaccataagctacggggtgtgcaaaacccagtggcccggtgcatcatgtgttgctttaagtgttgcctgtggtgcttagagaaattcatcaagttcctgaaccggaatgcatatatcatgattgccatctacgggaagaacttttgcgtgtctgccaagaacgcattcatgctcctcatgagaaatatcgtgagagtggtagtgctggacaaagtcaccgatttactgctatttttcggtaagctactcgtggtaggaggcgtaggagtactctctttctttttcttctcaggcaggatccctggactcggcaaggattttaagtctcctcacctcaattactactggctcccaataatgaccagcattcttggcgcctacgtgattgcgtcgggatttttctcagtgtttggaatgtgcgtcgacacactttttttgtgctttttagaagatcttgaacgcaacaacggcagcctggaccgcccatactacatgagcaaatccctgttgaagatcctaggcaagaagaacgaagctccacctgataacaagaaacgaaagaagtag

SEQ ID NO: 206297 - DNA, 1905 bp, synthetic construct
  misc_feature 1..1905: note = Description of Artificial Sequence: Synthetic coding sequence
  source 1..1905: mol_type = other DNA
atgggcgagaacaaggacaagccctacctgctgtacttcaacatcttcagctgtattcttagcagtaatatcattagtgttgccgagaacggcctgcagtgtccgactcctcaggtgtgtgtgagctcctgccccgaggacccatggactgtgggaaagaacgagttcagccaaaccgtcggtgaagtgttttacactaaaaatcgaaacttttgcctccctggagtgccctggaacatgacagtcatcacatcattgcaacaggagctgtgccccagttttctgctcccaagcgcacccgccctggggaggtgttttccgtggacaaatgtgacaccaccggccctaccagggatcaccaacgatacaaccatccagcaaggaatcagcgggctgattgacagtctgaatgctagggacatttctgtgaagatcttcgaggattttgcacagtcctggtactggatcctggtcgctctcggcgtggctctcgtgctttccctcctcttcatacttctcctgaggctcgtcgctgggcctctggtcttggtgttaattctgggagtgcttggcgtgttggcctacgggatctactactgctgggaggagtacagagtcctacgggataaaggtgcgagcattagccagttgggttttaccaccaacctgagtgcataccagagcgtgcaggagacgtggcttgctgcattgattgtgttggctgttctagaggccatcctgctacttatgctcatcttcctgcgccagcgaatcagaatagccatagccctgctgaaggaggcgagtaaggcagtgggtcaaatgatgagcacaatgttctacccattggtcacattcgttctgctcttaatctgcatagcctactgggccatgacagctctgtatctcgctacctcaggccagcctcagtatgtgctgtgggcgtctaacatatcttcccccgggtgcgagaaagtgccaatcaatacaagttgtaatcccaccgcccatcttgtcaacagcagctgtcctggtctcatgtgcgttttccagggatactcaagcaagggtcttatccagagaagtgtgttcaacctgcagatttacggtgtcctggggcttttctggacactgaactgggtcctggccctaggccagtgcgttctggccggagctttcgcctctttctattgggctttccacaaaccacaggatatcccaaccttcccactcatttctgccttcataaggacactcagataccatacaggaagcctggccttcggagcgctcattctgaccctggtacagatcgctcgcgtgattctcgagtacatcgaccataagctcaggggcgttcaaaaccctgtggctcgttgtatcatgtgttgctttaagtgctgcttgtggtgtctggaaaagttcatcaaattcttaaaccggaacgcctatataatgatcgctatctacgggaaaaacttctgcgtgtccgctaaaaacgccttcatgctgctgatgcgaaacattgtgcgggtggtggtgcttgataaagtgacagacttactcctcttctttggtaagctcctggtagttggtggagttggcgttctgtcctttttcttcttttctggtcgtatccctggcctgggcaaggacttcaagtctccgcatttgaactactattggctgcccatcatgacgagtattcttggcgcatacgtcattgccagtgggtttttttctgtcttcggcatgtgcgtggacactctcttcctgtgttttctcgaagatctcgagcgcaataacggctcgttggacagaccatactatatgagcaaatctttgttaaaaattcttggtaaaaagaatgaagctccgcccgataacaagaagaggaagaaatag

SEQ ID NO: 206298 - DNA, 2007 bp, synthetic construct
  misc_feature 1..2007: note = Description of Artificial Sequence: Synthetic coding sequence
  source 1..2007: mol_type = other DNA
atgggcggcaagcagcgggacgaggacgacgaggcctacggcaagcctgtgaaatatgaccccagcttccggggccccataaagaacagatcttgtacagacgtcatttgttgtgtgctgttcctgctctttattctgggctacatagtggtgggcattgttgcgtggctctatggagatcccaggcaggtactgtatccgaggaacagtaccggcgcttattgcggcatgggcgagaacaaagacaagccctacctgctctatttcaatatcttttcttgtattctctcctccaacatcatttccgtggccgagaatggtctgcagtgtcccaccccccaaaccgtgattacaagcctgcagcaggagttgtgcccttctttcctgttacccagcgcccccgctctggggagatgtttcccctggactaatgtgacaccccccgccctgccaggtatcactaatgataccaccatccagcagggaatctctggtctcatcgatagcctgaacgctagggatatttccgtaaagatcttcgaggactttgcacagtcctggtattggatcctggtggcactcggggtggccctggtgcttagcctcctgttcatactgcttctgcgtctcgtcgctggccccctagtgttggtacttatcctgggtgtactgggcgtgttagcctatggtatttattattgttgggaagaataccgcgtgcttcgggacaaaggagcatctattagccagctcggattcactacgaacctttcagcgtaccagagtgtgcaggagacctggcttgctgccctgatcgttctcgcggtgttggaggctatcctgctgttgatgttgatctttctgaggcaacgcattaggattgctatcgctcttcttaaagaggctagtaaagcagtgggacagatgatgtccacaatgttctatccactggtcacttttgtcctgctgttaatctgcatagcctactgggcaatgaccgctctttacctggccaccagtggccagcctcagtatgtgctctgggcatctaacattagttcccctggctgcgaaaaagtaccaatcaacacgtcctgcaatccaactgcccacctggtgaacagcagctgccctggcctaatgtgtgtgtttcagggttattcctctaagggtctgatccagcggagtgtgttcaatcttcagatatatggggtgctgggactgttctggacacttaactgggtgctcgcactcggccagtgtgtcctggccggagcctttgcaagcttctactgggccttccataaaccccaagacattccaacattcccactgatttccgctttcatccgcacactcagataccacactgggtcattggccttcggcgctctcatattgacacttgttcagatcgctagggttatcctggaatacatcgatcacaaactgagaggcgtacagaacccagtggcgagatgcataatgtgttgcttcaagtgttgtttgtggtgcttagagaaattcatcaagtttctcaacaggaacgcctatatcatgatcgccatttatggaaagaacttctgtgttagcgccaagaacgcctttatgttgctaatgagaaatatcgtaagagttgttgtattggacaaggtcacggacctgcttttgttcttcgggaaattgctcgtggtaggcggggtcggtgtcctctccttcttcttctttagtggcaggatcccaggcttagggaaagacttcaaaagtccacatcttaactactactggttgcctataatgacttcaatactgggcgcctacgtcattgcgtcgggcttcttctctgtatttggcatgtgcgttgacacactgttcctgtgttttctcgaggacctggaacgcaataacggttctcttgaccgcccttactacatgtcgaagagcctcctgaaaattctgggtaaaaaaaacgaggcacctcctgacaataagaagcggaaaaagtag

SEQ ID NO: 206299 - DNA, 2007 bp, synthetic construct
  misc_feature 1..2007: note = Description of Artificial Sequence: Synthetic coding sequence
  source 1..2007: mol_type = other DNA
atgggcggcaagcagcgggacgaggacgacgaggcctacggcaagcccgttaagtacgaccctagcttccgcggcccgatcaaaaataggagttgcacagatgtcatctgctgcgtcctgttcctgctgtttatccttggttatattgtggtcggcattgtggcttggctctatggtgacccgcgacaggttctatacccccggaactccaccggggcctactgcggcatgggtgagaataaagacaaaccatatctgctgtatttcaacatcttttcgtgcattctctccagcaacattatcagcgtagccgagaacggattgcagtgtcccacccctcaaactgtgataacatccctgcaacaggagctgtgccccagttttttactcccatcagcacccgctttaggtaggtgtttcccatggactaatgtgactccgcctgcgctcccaggcataactaacgatactacaatccagcagggcatttcgggcctgattgactcactgaatgcacgcgacatatccgtcaagatcttcgaggactttgcccagagctggtactggatcttggtggccttgggtgtggctctcgtgctgagccttctgttcatcctgctgctgcgattagtcgctgggcctcttgtcttggtgctgatcctgggtgtattgggcgtgcttgcgtatgggatttactattgctgggaagaatatagagtcctgcgggacaagggtgcgtccatatctcagcttggttttactacaaacctgagcgcctaccagtccgtgcaggagacttggctggctgctctgatcgtcctggccgtacttgaggcaatccttctgctgatgctgatatttctaaggcaaagaataagaatcgccattgccctgctgaaggaggctagtaaagccgtcggacagatgatgtcaaccatgttctatcctctcgtcaccttcgtcctgctgctgatctgtatagcatattgggccatgacggccctttatctcgcaacttcaggtcagccccaatacgtgctctgggcctcgaatatctctagtcctggatgcgaaaaggtacctattaatacctcatgcaatccgacagctcacctggtcaattcaagttgccccggtcttatgtgcgtgttccagggttactcatccaaggggctgattcagagatctgtttttaacctccagatctatggcgtcctcggccttttctggacactgaattgggtcctggccctgggtcagtgcgtgctcgcaggggcttttgcttccttctactgggccttccacaaaccacaggacatccctacattccctctcatcagcgcttttatccgcactctcaggtaccacaccggatctttggcatttggtgccctgattctaaccctggtgcagattgctagagttatcctggaatacatagatcataagcttcggggcgtccagaatcccgtggcccggtgtatcatgtgttgctttaagtgttgcctatggtgtctggagaagttcatcaaattcctgaataggaatgcatacataatgattgctatctacggaaagaatttttgcgtatccgccaaaaatgcctttatgctgttaatgcgaaacattgtacgtgttgttgtactggacaaggtgaccgatctcctactgttcttcggtaagctccttgtagtgggcggagttggtgtgttgtcttttttcttttttagcgggagaatccctggccttggtaaggacttcaagagcccccatttaaactattactggctccctataatgacttctattctgggcgcttacgtgatcgccagcggatttttcagcgtttttggaatgtgtgtggacaccctgttcttgtgcttcctcgaggatctggagcgtaataacggaagcctggacaggccctattatatgtccaagtccttgctgaagatcttgggtaaaaaaaatgaggccccccccgataataagaagaggaagaaatag

SEQ ID NO: 206300 - DNA, 2007 bp, synthetic construct
  misc_feature 1..2007: note = Description of Artificial Sequence: Synthetic coding sequence
  source 1..2007: mol_type = other DNA
atgggcggcaagcagcgggacgaggacgacgaggcctacggcaagccagtgaagtacgatccaagcttcagaggcccaattaagaaccggtcttgcactgatgtgatttgctgcgtcttgttcctcctgtttatactcggctatattgttgtcgggatcgtggcttggctgtatggggacccacgccaggttctgtacccccgcaactcaaccggggcctactgcggcatgggcgagaataaggacaaaccctacctgctttactttaacatctttagctgtattctctcttcaaacatcatctctgtagccgaaaacggacttcagtgccctacgccacagaccgtgattacttcactgcagcaggagctgtgccccagctttctccttcccagcgcacccgcccttggcaggtgcttcccttggaccaacatcacgccacctgcactaccaggtatcaccaacgatacaaccatccagcaaggcatctcggggctgatcgattcgttaaacgccagggacatctcggttaagatttttgaggacttcgcccagtcttggtactggatcctggtggccttgggtgtggccctggttttgtccttgttgtttatacttttgctgaggctggtggccggacccctggtactggtgctaattttaggggtgctgggagttctggcttatggtatttactattgctgggaggaataccgtgtcctgcgggataagggtgcatccatttcgcagctgggattcactacaaatctcagcgcttaccagtctgtgcaggagacgtggctggccgcgctgatcgttctcgccgtcctcgaggccatactcctgctggttctgatattcttgcgccagcgcatccgcatagccatcgcgctgctgaaagaggccagtaaagccgtcggccagatgatgagcacaatgttctaccctttagtaacttttgtgcttcttctgatttgcatagcctactgggctatgactgcattatatttagccacgtctggacagcctcagtacgtgttatgggccagcaacatctcatcaccagggtgcgaaaaggttcccatcaatacatcatgtaatccaaccgcccacttagtgaactcgtcgtgcccgggtctgatgtgcgtgtttcagggatatagctctaagggtttgatccagagatctgtgtttaacctgcagatttatggggttttgggcctgttctggacgttgaactgggtgctagctcttggacagtgcgttctggccggggctttcgcatcattctattgggcgttccacaaaccccaagacatcccaacctttcctctcatttccgcctttattcgtacacttcgctaccatactggcagcctggctttcggggcgctcattttgaccttggtccagatcgcccgggttatcctggagtacatcgatcacaaactgaggggtgtccagaatcccgtggccagatgtatcatgtgctgcttcaagtgctgtctgtggtgtttagagaagttcatcaaattccttaaccgtaatgcctacatcatgatagctatttacgggaagaatttttgcgtttccgcaaagaatgccttcatgctcctaatgaggaatatcgtgagggttgtggttctggacaaggtgaccgacttactcctgttttttgggaagctactcgtagtcggaggagtgggagtcctcagcttcttcttcttctcagggcgcattcctgggttagggaaggatttcaaatcaccccacctgaattactactggctgccaataatgacatccatattgggggcttacgtgatcgcctcaggcttcttctctgtattcggaatgtgtgtggacacactgtttctgtgcttcctcgaagatctggagaggaacaacggatcccttgataggccctactacatgtcaaagtccctcctaaaaatactgggaaagaagaatgaggccccacccgacaataaaaagaggaagaagtag

SEQ ID NO: 206301 - DNA, 1905 bp, synthetic construct
  misc_feature 1..1905: note = Description of Artificial Sequence: Synthetic coding sequence
  source 1..1905: mol_type = other DNA
atgggcgagaacaaggacaagccctacctgctgtacttcaacatctttagttgtatcctgtcatccaatataatctcggtggccgagaacggcctgcaatgccccactccccaggtgtgcgtgtcctcctgtccagaggacccttggactgtggggaaaaacgagttctcccaaaccgtcggagaagtattctacaccaaaaaccggaatttttgtctccctggtgtaccatggaacatgacagtgattacctctctgcagcaggagctgtgtccctctttcttattaccatcggccccagcccttggcaggtgctttccttggaccaatattactccgcccgcactgcctggaattaccaacgatactacgattcaacaaggaatctctggcctgattgattctctcaatgctagggatatctccgtaaagatctttgaggactttgcccaatcctggtactggatactggtggctttaggcgttgccctggtgctttctctgctctttatactgcttctgagactagtggccggccccttagtgcttgtgttgatccttggagtacttggagtgctggcctacggcatatattactgttgggaggagtatcgggtgctaagggacaagggcgctagcattagtcagctcggttttaccacaaatttgagcgcctatcagtcggtgcaagaaacgtggctggctgcacttatcgtcctcgcggtgctggaggccattttgctacttgtcctcatcttcttgaggcaaaggattcgaatcgcgattgcactgctgaaggaggcttctaaagcagtgggccaaatgatgtcaactatgttctatcctctagtgacattcgtactacttttaatctgcatcgcctactgggccatgacagccctctatttggccaccagcggccagccacaatacgtgctttgggcctctaacataagcagtcctgggtgcgagaaggtccctatcaatacctcttgtaaccccaccgcacacctggtcaactccagttgcccaggactgatgtgcgtgttccaaggatactcatctaagggcctcatccagcgttctgtctttaacttacaaatatacggtgtccttggactgttttggacgctcaattgggtgctcgctctagggcagtgcgtgttggccggcgccttcgcgtccttctattgggcattccataagccccaggacattcccacattccccctgatatctgcctttatacgtactctgagataccacacgggcagcctggcgtttggagctcttattcttactcttgtacagattgctcgagtcatcctggagtatatcgatcacaagcttcggggcgtgcagaacccagtggcacgctgtattatgtgttgctttaagtgctgtctctggtgtctagagaaatttatcaagtttttaaatcgcaatgcttatatcatgatagccatttatggaaagaatttctgcgtgtccgcaaaaaacgcatttatgctcctcatgcggaacattgtcagagtagtggttctcgacaaggtcacagatttgctgctgttctttgggaagttgttagtggtaggtggagtgggagtgctgtcattcttttttttctccggccgcattcccgggttgggaaaagactttaagtccccacacctcaactattattggcttcccattatgacatccatcctcggagcctacgtgatcgcctcaggattttttagtgtctttggaatgtgcgtcgatactttgttcctctgcttcctggaggatctagagcggaacaatgggagcttagaccggccatactatatgtcaaagtctctattgaaaattctcggcaagaagaatgaggcaccccctgacaacaagaaaagaaagaaatag

SEQ ID NO: 206302 - DNA, 2007 bp, synthetic construct
  misc_feature 1..2007: note = Description of Artificial Sequence: Synthetic coding sequence
  source 1..2007: mol_type = other DNA
atgggcggcaagcagcgggacgaggacgacgaggcctacggcaagccggtgaagtatgatccatcctttcgcggacccataaagaacaggtcgtgcacggacgtcatttgctgtgtgttgttcttgctattcattttgggctatatcgtagtgggcattgttgcttggctgtacggcgatcctagacaggttctgtacccccgcaattcaaccggcgcttattgcggcatgggcgaaaacaaggataaaccctacctgctatacttcaacattttcagctgcattctgtctagtaatataatcagcgtggccgagaatggtctgcagtgtcctaccccgcaaaccgtcataacgtctctccagcaagaactgtgtccctccttcttgctcccaagtgcgccagcactggggcgttgcttcccgtggaccaacgtgaccccacccgcactgcctggaatcaccaatgacacaacgatccagcaagggatcagtggtctgattgatagtttgaatgcccgggatatctccgtgaaaatcttcgaggacttcgcgcaaagctggtattggattcttgtagcacttggagtggcactggttctgtccttgctcttcatcttgctgttgcggctggtggccggacccctcgtcctggtccttatacttggagtacttggcgtgctcgcctatgggatctattattgctgggaggaatatagagttctgcgcgacaaaggggcgagtatctcccagctgggctttacaactaacttgagcgcctaccagagcgttcaagagacctggctggccgcactgatcgtgttggccgtcctggaggcaatactgttgctcatgcttattttcttgcgacagcggatccgtattgccatcgccctacttaaggaagcttcaaaggccgtcggacagatgatgagcaccatgttctatccactggttaccttcgtactgctcctgatctgtatagcctactgggctatgacagccctctacctggcaacatccggccagcctcagtacgttttgtgggcctccaacatctcaagtcctggttgcgagaaagtcccgatcaatacatcctgcaatcctaccgcccatctggttaatagcagttgtccaggactgatgtgcgtcttccagggatactcctcgaaaggtctgatccaaagaagcgtcttcaacttgcaaatttacggcgtgctcggtctcttttggaccctaaactgggtgctcgctctggggcagtgtgtgcttgctggggccttcgccagtttctattgggctttccataagccacaggatatcccaacgtttcctctgatctcggcctttattagaaccctccgctatcacacaggaagccttgctttcggagctttgattctgacacttgtgcagatcgctcgcgtgatcctcgagtacatcgaccacaagctccgtggcgtgcagaatcccgtagctaggtgcattatgtgctgtttcaagtgttgcctgtggtgcctggagaagttcatcaagtttctgaatcggaatgcctacattatgatcgcaatttacgggaaaaacttttgcgtgagcgcaaagaacgcattcatgctgctgatgaggaacattgtcagggtggtcgtattggacaaggttacggaccttctgctgtttttcggcaagctcctggtggttgggggggttggcgtgcttagcttcttcttttttagcggtaggatccctgggctgggcaaggattttaaatccccccatctcaattactattggcttcccataatgacgtccattctcggggcgtatgtgattgcttctgggttcttctcagtatttggtatgtgcgtcgatactctgttcctgtgtttccttgaggatcttgagcgcaataatggcagcttggacaggccctactatatgtctaagtcattactcaaaatcctggggaaaaagaacgaggcccccccggataacaagaagcgcaaaaagtag

SEQ ID NO: 206303 - DNA, 2007 bp, synthetic construct
  misc_feature 1..2007: note = Description of Artificial Sequence: Synthetic coding sequence
  source 1..2007: mol_type = other DNA
atgggcggcaagcagcgggacgaggacgacgaggcctacggcaagcctgttaagtatgaccccagctttcgaggccccattaagaatcgctcttgtacggacgtgatttgctgcgtgctgttcttgctgtttatcctgggctacatcgtagtgggcatcgtagcctggctctatggagaccctagacaagtgctgtacccaagaaactctaccggcgcgtattgcggcatgggggagaataaggataaaccatacctcctgtacttcaacattttttcctgtatcctgtcctctaacataatcagcgtggctgagaacggactccaatgtcccacaccccagaccgtaattacgtctctgcagcaggagctgtgtccatcctttctgctcccctccgctcctgcactgggccgctgtttcccttggacaaacattactccgcccgcactgcccgggatcacgaacgacaccacaatccagcagggtatatcagggttgatcgattccttaaacgcacgggatatttcggtgaagatctttgaagattttgctcagtcatggtactggatcttggtggctcttggcgtggcacttgtcctatcactcctcttcatcctattgctgagattggtagccggtccacttgttctggtgttgatactgggtgttctgggcgttctcgcctacgggatatactattgttgggaggagtaccgcgttctgagagacaagggggcctcgatatctcagctcggcttcactacaaatctttccgcttaccagtcagtccaagaaacctggctcgccgctttgatagtacttgctgtcctcgaggcaatactgctcctggtgttaatctttcttaggcaaagaatcaggatagctatcgccctgctcaaggaggcgagtaaagctgtgggtcaaatgatgagtaccatgttttaccctctggtgacttttgtgctgctgctgatttgcattgcctattgggcaatgactgccctgtacttagcaacaagtgggcagccacagtacgtcctctgggcatccaatatttctagccctggttgcgaaaaagtgccaatcaacacatcctgtaaccctacagcccatctggttaactcaagttgccccgggttgatgtgtgtgttccagggctacagttccaaaggtttgatccagagaagtgtattcaacttacaaatctatggcgttcttggactgttctggacactgaactgggtacttgcgctcggccagtgcgtgcttgccggagcctttgcgagtttctactgggcctttcataaacctcaggatattcccacgttccctcttatcagtgcctttatacggactctgagataccacacgggttcactggcttttggggccctgattctgactctagtccagattgcaagggtcatcctagaatacattgatcacaaactaagaggcgtgcaaaaccctgtcgcacggtgcatcatgtgttgcttcaaatgttgtttgtggtgccttgagaagttcatcaagttcctgaacaggaacgcgtatatcatgattgccatctatggcaaaaatttttgcgtgtccgccaagaacgcctttatgctcctgatgagaaacattgtcagagtagtcgtgctggataaggtgactgacttactgttgttttttggcaaattgctcgtggtcggtggggtgggcgttctgagcttttttttttttagcgggcgcattcccggattgggcaaggattttaagagtccgcacctgaactactattggctgccgatcatgacctctatcctgggggcttacgtgattgcatccggtttcttctccgtgttcggcatgtgcgtagacacactgtttctgtgcttcttggaagatctagagaggaacaatggctctctggacaggccatactatatgtctaagtcactcctaaagattctcggcaaaaagaacgaggccccccctgacaataagaagaggaaaaaatag

SEQ ID NO: 206304 - DNA, 1905 bp, synthetic construct
  misc_feature 1..1905: note = Description of Artificial Sequence: Synthetic coding sequence
  source 1..1905: mol_type = other DNA
atgggcgagaacaaggacaagccctacctgctgtacttcaacatcttttcatgtattttgtcatccaatattatcagcgtggccgagaacggcctgcagtgtcccacccctcaggtatgcgtgagttcttgcccagaggacccctggacggtcggtaaaaacgagttttctcagacagtcggtgaggtattttataccaagaaccgtaatttctgtctgccgggcgtgccctggaatatgactgtgataacctctcttcagcaagagctctgccctagcttcttgctcccatccgcacccgcgttaggtagatgcttcccgtggacaaatatcactccaccagccctccccggcattacaaatgacacaacgattcaacaaggcatatctgggttaatcgactctctgaacgccagagatatcagcgtgaaaatcttcgaagatttcgcacaatcctggtactggatcttggttgcactcggtgttgccctggtgctttcactactctttatcctcctgctgcgcttagtcgctggacctctagtcctagtgctcatattaggagttctgggggtcctcgcctacgggatctactactgctgggaagagtaccgggtgcttagggataaaggagcctccatcagtcaattgggattcacaaccaacctctccgcctatcagtcagtgcaggagacgtggctagcagcccttatcgtattagcagtgttggaggcgatcttactgctggtgctcatattcctcagacagcggatccggattgctatcgctctgctgaaggaggcatccaaggccgtgggccagatgatgtccacgatgttctatcccctagtcacattcgtgctcttgctcatctgtatcgcttactgggctatgacagccctgtatctggccacttcgggtcagccgcagtacgtcctgtgggcttcaaacatcagtagcccagggtgtgaaaaggtgcctatcaacacatcgtgtaacccaactgctcatttggtgaactcttcctgtccaggactgatgtgcgtctttcagggatactcttctaaaggacttatccagaggagcgtatttaatcttcaaatatatggtgtgctgggtctcttctggactctcaattgggtgctggcacttggccaatgcgtgctggccggagcattcgcctccttctactgggccttccacaaacctcaggacataccaaccttcccgttgatcagcgccttcatcagaacattacgataccacacgggttcactggcctttggggcacttatacttacactcgtgcagatcgccagagtgattttggaatacattgaccataaacttagaggggtccagaacccagtggccaggtgcattatgtgctgtttcaagtgttgtctgtggtgcctggaaaagtttattaaattccttaaccggaatgcatacatcatgatagcaatctacggaaaaaacttttgcgtgtctgctaagaacgcctttatgctgctcatgagaaatatcgtgcgtgtcgtagtcttggacaaggtgacggatctcctcctcttttttggaaagttgctcgtggtgggcggggtcggagtgttgtctttttttttcttcagtggtaggatccccggactgggaaaggacttcaaaagcccccacctcaattactactggctcccaatcatgacctccattcttggggcttatgttatcgcaagtggattctttagcgtgttcggtatgtgtgtcgatacccttttcctttgcttcctggaggatctcgaacggaataatggctcgctggaccgcccctactacatgtctaaaagcctcctgaagattctgggcaagaagaatgaggcccctcctgacaacaaaaaaaggaagaaatag

SEQ ID NO: 206305 - DNA, 2247 bp, synthetic construct
  misc_feature 1..2247: note = Description of Artificial Sequence: Synthetic coding sequence
  source 1..2247: mol_type = other DNA
atgatccccgccgccagcagcaccccccccggcgacgccctgttccctagcgtcgctccacaagatttctggcgcagccaggtcaccggatacagcggatcagtgacaagacacctctcccacagggctaataactttaagaggcacccgaagcgccggaaatgcataagacctagtcctccccctcctcccaacaccccctgccctctcgaactggtcgatttcggagacctccacccacagagatcctttagagagcttttgttcaatggctgtatcctgttcggaatcgagttctcttacgccatggaaacagcctatgtcactcctgtgctgttacagatgggactgcccgaccaactttacagtctggtgtggtttatctcccctatccttgggttcctgctgcagccccttctaggggcatggtcagaccggtgtacttctagattcggtaggaggagaccgttcatattggtcctggccattggcgccttacttggtttgagtctgttactgaatggcagggatatcggcattgctctggccgacgtcaccggaaaccacaaatgggggcttcttctgacagtctgcggggtcgttttgatggatttctcggctgattccgccgacaatccctctcacgcttatatgatggatgtctgctccccagctgaccaggaccgaggccttaatatccacgctttattagcgggattagggggaggtttcggctacgtggtggggggaatacactgggataaaaccggcttcggtcgcgctctggggggacaattacgcgtaatctacctgtttaccgccgtgaccctttctgttactactgtattgactttagtgagcatcccagagcgaccactgagaccgcctagcgagaaacgtgctgccatgaaatccccgtctttgccacttccacccagcccccccgttctgccggaggagggtccaggcgatagtctgccatcccatacagcaaccaacttcagctcccctatttcccccccctcaccacttacacctaagtacgggtcttttatcagtagggattcgagtttaactggtatttccgagtttgcctctagctttggaaccgccaacatcgattccgtgctcatcgactgttttactggtgggcacgactcatatctggcaattccaggctcagttccacgccccccaatctctgttagtttcccacgggcacccgacggattttaccggcaggaccggggcctactagaaggcagggaaggcgcgctcactagcgggtgcgacggcgacatcctcagagtaggatccttagacacatccaagcctcgctcctccgggatcctcaaacggccacagacgcttgcgattcccgatgctgccggcggtggcggtccagagaccagcaggcgtcgcaacgttacgtttagccaacaggtagctaatatcttactgaatggtgttaaatatgagagtgagctaaccggcagctctgagagggctgaacaacccctcagcgtaggcagactgtgcagcaccatatgtaatatgccgaaagcactgcggacactttgcgtcaatcacttccttggttggctgtctttcgagggtatgctgctattttataccgactttatgggagaggtcgtttttcaaggggaccccaaggcgccccatacatcagaggcttaccaaaagtacaactccggagtaacaatgggatgctggggcatgtgtatttacgccttcagcgccgctttctattccgcaattctagaaaagttagaggagttcctgagcgtcagaaccttatatttcatcgcatatcttgccttcggactcggaacggggctggccaccctttctagaaacctctacgtggtcctttccttatgcataacgtacggtatactcttttcaactctgtgcacactcccatactctctgttatgcgactactaccagtcaaaaaagtttgctggtagtagtgcagatggtactcgtagaggaatgggggttgacatatcgctgctcagttgtcaatacttcctggcgcagatattggtgagtctggtgctaggtccgctcacctcggctgtggggtctgcaaatggagtcatgtattttagctccttggtcagctttctgggctgcctctactcatctctttttgttatttacgaaattcctccaagcgatgctgccgacgaagaacaccggccactactgttgaatgtctag

SEQ ID NO: 206306 - DNA, 2349 bp, synthetic construct
  misc_feature 1..2349: note = Description of Artificial Sequence: Synthetic coding sequence
  source 1..2349: mol_type = other DNA
atgctgcagcagcccggcccccggcccggccggcagcagcccagcggcgaccgggacgcttgtcggctccatccccagggtcggcctcccgccctgccaaccatgatccctgctgcaagtagtacgccacccggtgacgcacttttcccctccgtggccccccaagatttttggaggagccaagtaacagggtattctggaagcgtgaccagacacctgtcgcatcgagcaaacaattttaaaaggcaccccaagcgcagaaaatgtattcggcctagcccccctcccccacctaatacaccctgcccactggagctggtggattttggcgacctgcacccccagaggtccttccgggagctgctcttcaatggttgtatcctgtttggtattgaattctcatatgccatggaaactgcatatgtaacacctgtccttctgcaaatgggcttgccagaccaactttacagtctagtgtggttcatctcgccaatactgggattcctcctacaaccactgctcggcgcttggtccgatcgctgtacttcacgtttcggccgaaggaggccatttatccttgtgctggccattggcgcgctgttgggtctctcactcctgctgaatgggcgagacatcgggatagcactggcagacgttaccggcaatcataaatggggactcctgctgacagtttgcggagtcgtcctgatggatttctcagccgactcagccgacaatccatcccatgcttacatgatggacgtatgcagtcccgcagaccaggaccgcgggctcaatatacacgctcttctagcagggctgggcggtggcttcgggtatgtggttggcgggatacattgggataagacaggctttggtcgggcccttgggggccagcttcgggttatttacctgttcaccgccgtaaccctgtcggtgactactgtgctcactctggtgtcaatccctgaacggccactaagacccccaagcgagaaacgagctgccatgaaatctccatcgctgccacttccccctagcccccccgtgcttcctgaagaggggcccggagacagtctgccaagtcatacagccaccaatttctcttcacctatcagccctccctccccattgacacctaagtatggatcatttattagccgtgattccagcctaacaggaattagcgaattcgctagctcctttggcactgccaatatcgatagtgtgttaatcgactgctttactggtggccacgactcctacctcgcaattcctggctctgtgccacgcccccccattagtgtgtctttccctagagcaccagacgggttttataggcaggaccgtggactattggagggcagagaaggcgccctgacatccggctgtgatggggacattttaagggtgggtagtctggatacctctaagccccgtagttctggaattctcaagcgaccacagactttagccatcccagatgcagccggcggcggcgggcccgaaaccagccgacggcggaatgtcaccttctcgcagcaggtggccaatatccttctgaatggtgttaaatacgagtctgagcttacgggtagttctgaacgggccgagcagcctctgtctgtaggtcgcctgtgtagcactatatgtaacatgcctaaggcacttcgcacactgtgcgttaatcattttctaggatggctgtcatttgaagggatgttattgttttataccgattttatgggggaagtcgtgttccagggcgacccaaaagctccccataccagtgaggcttaccagaagtataacagcggcgttaccatgggttgttggggcatgtgtatttatgccttttcggctgccttctacagcgctattctggaaaagttagaagaatttctgtctgtgcggaccctctactttattgcttatcttgccttcgggttgggtaccggcctggcaactctatcaaggaatctctatgttgtgctgagtctgtgcatcacatacggaatactatttagtaccctctgcaccctgccgtactcactgctttgcgactattaccagagcaagaaattcgctggatcctctgctgatggcacaaggcgcggaatgggcgtagatatttccctgctctcctgccaatactttctggcacaaattctggtcagtctggtcttgggtcctctgacttccgctgtgggctccgctaatggggtcatgtacttttcatctctggtaagcttcctgggctgtctgtattcaagtttattcgtcatttatgaaatcccaccgtccgatgcagccgacgaagagcacagacctcttctgctgaatgtgtag

SEQ ID NO: 206307 - DNA, 2247 bp, synthetic construct
  misc_feature 1..2247: note = Description of Artificial Sequence: Synthetic coding sequence
  source 1..2247: mol_type = other DNA
atgatccccgccgccagcagcaccccccccggcgacgccctgttcccctccgtggcaccacaagatttttggagatcacaggtgacaggctactccggatcagtgactcgtcatctgagtcatagagcgaataactttaaacggcacccaaagcgtagaaaatgcatccggcctagcccccctcccccaccaaatactccatgtccactggaactagtcgactttggggacctccaccctcagagatctttcagagagctcttattcaacggctgtatattgttcggtattgagttttcctacgcaatggaaactgcatatgtgacaccagtgctgcttcagatgggtctccctgatcagttatacagtcttgtgtggttcatatccccaattctcggctttctattgcagcctctgcttggagcttggtcagaccgatgtacctccagattcggacgacggagacctttcatcttagtgctcgctatcggtgcactgttgggcctgagcctgctcctaaatggcagagatattggaatcgctctggccgacgtaacaggaaaccacaaatggggtctgctcctgacggtttgcggtgtggttctcatggatttttctgccgactccgccgacaacccctcccacgcgtatatgatggatgtgtgtagtccggcagatcaagaccggggactgaacatccacgccttgctcgcggggctgggcgggggcttcgggtacgtcgtgggcggcatccattgggacaaaaccggctttggtagggctcttggcggacagctgagagtaatttaccttttcaccgctgttactctctctgtgacaacagtactgactctggtttccattccagagcgacctctgcgccctcccagcgagaagcgcgcagcaatgaagagcccctctctgccactaccaccatcacctcccgtactgcctgaggaggggcccggcgactcactgccctcacacactgcaaccaatttcagctcccccatctcccctccttctcctttgactcccaagtatggctcctttataagcagggacagttcattgactggcatcagtgaatttgcctcatccttcggcacggcaaatattgacagcgtgctgatcgactgctttacgggtggccacgattcctacttggccatccccggaagcgtgcccaggccccccatttcagtctcattcccacgagcgccagatggtttctatagacaagacagggggctcctcgaaggaagagagggggccctgacaagtgggtgcgatggagacattctcagggtggggtcacttgacacatcaaagcctagatcttccggaattctcaaaaggcctcagacactggccatccctgacgccgcaggcgggggaggccctgagactagtcggagaaggaacgtgactttctcacagcaagtggcaaatattctcctaaatggggtgaagtatgagtcagaactgacggggtcctctgagcgcgccgagcagcctttatccgtcggcagattgtgctccaccatatgtaatatgcccaaagccttacgcaccctgtgcgtcaaccattttctcgggtggttatccttcgaaggtatgctgctgttttatactgactttatgggcgaggtagtttttcagggagaccctaaagctccccacacctcagaggcgtaccaaaaatataacagcggcgtcacaatgggctgttggggtatgtgtatctacgctttcagtgcagctttttattcagctatcctcgaaaaactggaagaattcttgagcgtccggactctgtacttcatcgcttacctcgcattcggtctcggtacaggtctggctactctgagtcggaacttatacgtcgtgttgtccctgtgtataacatatggaattttgttttctactctatgtacacttccctactcactcctgtgcgactactatcagtccaagaagttcgctggctcttctgctgatggaaccaggaggggcatgggggtagacatctccttactcagttgccaatacttccttgcacagatcctcgtctccctagtccttgggcctctcacgagcgctgtcggatctgcgaatggagtgatgtatttcagctctctggtgtccttcctcgggtgcctgtactccagtttgtttgtcatctatgaaatcccgccatccgacgctgccgacgaggaacatcgcccgctcttattgaacgtctag

SEQ ID NO: 206308 - DNA, 1593 bp, synthetic construct
  misc_feature 1..1593: note = Description of Artificial Sequence: Synthetic coding sequence
  source 1..1593: mol_type = other DNA
atgggcagcaacagcggccaggccggccggcacatctacaagagcttggcagacgatggcccattcgatagcgtggagcctcccaagcggccgacatctcggctgatcatgcactccatggccatgttcggtcgagagttctgctatgccgtcgaggctgcttatgtgacgcccgtcctgctgtctgttgggttgccttcctctctgtatagcatagtatggttcctgtcccccattctcggatttttactccagcccgtcgtggggtctgcatccgatcactgccgaagtcgctggggtagaagaagaccctacatcttaaccttaggagtgatgatgctggtgggtatggcgctttatcttaacggggccaccgtggttgctgcacttattgccaacccccggagaaagttagtttgggcgatttcagtgaccatgatcggagttgtgctattcgacttcgcggccgacttcatcgatggtccaattaaggcatacttgtttgacgtgtgttcccaccaggacaaagagaaaggcttgcattatcatgcactttttaccggatttgggggcgcccttgggtaccttctaggagccatcgactgggcccacctagaactgggtcgtttactgggcacagagttccaggttatgttcttcttctcagctcttgtgctgactctttgctttaccgtacacctatgctccatttccgaagcaccattgacagaggttgccaaaggcatcccaccgcagcagacaccacaagaccccccattatctagcgacggtatgtatgaatacgggtctatcgagaaggtaaagaacggctacgtgaatcctgagctcgccatgcagggggccaaaaataagaatcacgccgagcagacgaggagggctatgactctgaagtcactgctgagggcactggtgaacatgccccctcattataggtatctgtgcatctcccatctaatcggctggacagccttcctctcgaatatgctgttcttcactgacttcatgggtcaaatcgtatatcgtggagacccatactcagcccacaattcaactgagttcctgatttatgaacggggggttgaggtcggatgctggggtctgtgtataaacagcgtattctctagcctgtactcctatttccagaaggtgctcgttagctacattgggctgaaaggactgtacttcaccgggtacctgctgttcggccttgggacaggttttataggcctttttcctaacgtgtattctactctcgttctctgtagcctcttcggtgttatgagctcaacactgtatacagtgcccttcaacctcattactgagtaccacagggaagaggaaaaggaacggcagcaagcacctggtggcgatcccgacaacagcgtgagagggaaagggatggattgcgccactctgacctgcatggtgcaactggcccaaattctcgtgggcggcggcctgggcttcctcgtcaataccgcagggaccgttgtagttgtggtgatcactgcctccgccgttgcgctgatagggtgttgcttcgtggccctgttcgtgcgttatgtagattag

SEQ ID NO: 206309 - DNA, 1416 bp, synthetic construct
  misc_feature 1..1416: note = Description of Artificial Sequence: Synthetic coding sequence
  source 1..1416: mol_type = other DNA
atgggcagcaacagcggccaggccggccggcacatctacaagagcctggccgacgacggaccctttgacagtgtcgagccaccaaagcggccaacaagcagattgattatgcactcaatggccatgttcggacgggagttttgctatgccgtggaggccgcttatgtgacccctgtactgctttccgtcggcctccctagttccctgtacagcatcgtgtggtttctgtctcctatactgggattccttctccaacctgtagttggcagtgcatctgaccattgtcggagtagatgggggcgtaggcgcccctacattttgacccttggggtgatgatgctcgtggggatggctctgtatctgaatggggccaccgtcgtagctggatttggtggggctttgggctacttgctaggggcaattgattgggcccatcttgagctcggtcggctcttaggcaccgagttccaggtcatgtttttttttagtgccctcgtactgactttgtgcttcacggtgcacctttgttcgatcagcgaagcccccctcaccgaggtggccaaaggcatacctccccagcagacaccgcaggacccacctctgagctccgacggcatgtatgagtacggcagtatcgagaaagtcaagaacggttatgtgaaccctgaactcgccatgcaaggagccaagaacaagaatcatgctgagcaaaccagacgcgctatgacgctcaagtcccttctgcgcgccctcgttaatatgccaccacattatcggtatctgtgtatctcccatttgatcgggtggactgcattcctgtcaaacatgttattttttacggacttcatgggccaaatagtctataggggcgatccctacagcgctcacaactctactgagttccttatttatgaacgtggcgtggaggtcgggtgctggggtttgtgtattaatagtgtcttcagtagcctgtacagttacttccaaaaagtcctggtcagctatatcggtctaaaaggactgtacttcaccggatatctcctgttcggccttggaacaggatttatcgggctgtttccgaacgtttatagtaccttggttttatgcagcctgttcggtgtgatgtcctccacgctatacaccgtgccgttcaaccttattactgaataccatcgagaggaagaaaaagaacgccagcaagcacctggcggggaccccgataacagcgtcagaggcaaaggcatggattgcgcgacacttacttgcatggtgcagctggcccagattttagttggaggggggctgggcttcctcgtgaacaccgctggcacagttgtcgtggtcgtcattacagcctccgccgtcgccctgattggatgctgcttcgtagcacttttcgttcggtacgtggattag

SEQ ID NO: 206310 - DNA, 897 bp, synthetic construct
  misc_feature 1..897: note = Description of Artificial Sequence: Synthetic coding sequence
  source 1..897: mol_type = other DNA
atgggcagcaacagcggccaggccggccggcacatctacaagagcctggctgacgatggacctttcgattctgtggagcctcctaaaagaccgacctcccgcctgatcatgcactccatggctatgttcggacgcgaattctgctacgcagtcgaggcagcctacgtgactcctgtcctccttagcgttggacttcccagctctttgtacagtatcgtgtggttccttagcccaatcttgggtttcctgctgcagccagtcgtcggaagcgcgagcgaccactgtcgctcacgttggggtcggaggagaccatacattctgacccttggtgttatgatgttggtcggcatggccctctaccttaacggggcaacggtggtggccgcgctgatcgccaatccccggagaaagctggtgtgggcaatctccgtgacaatgattggagttgtgctgttcgacttcgccgctgatttcatcgatggccctatcaaggcgtacttgttcgacgtttgctcccatcaagacaaggagaaagggctgcattaccatgctctgttcactggcacgagaagagctatgactctgaaaagcctgctgagggccctcgtgaacatgcctcctcattatcgctacctttgcatcagccacctcatcggatggacggcctttctgagtaacatgctgttcttcaccgactttatgggtcaaatagtgtacaggggggatccgtatagtgcccataactcgactgagtttctgatttatgaaaggggagtggaagtgggctgctggggattatgtataaactccgtcttcagctcgctgtatagttgcaagtccttctctttattacgcatgagcagtaagtctttctggtcctccaccacatggatttag

SEQ ID NO: 206311 - DNA, 1383 bp, synthetic construct
  misc_feature 1..1383: note = Description of Artificial Sequence: Synthetic coding sequence
  source 1..1383: mol_type = other DNA
atgggcagcaacagcggccaggccggccggcacatctacaagagccttgccgatgacggcccttttgacagtgtggaaccgcctaagcggcccacatcacggttaatcatgcactccatggcgatgttcgggcgcgagttttgttatgcggtcgaggctgcctacgtgactcccgtcctgttgtctgtagggcttccctctagtctctactccatcgtgtggtttctgagtcccattttaggatttctgctccagcctgtagtgggaagtgcaagtgatcactgtaggagcagatggggccgacgccggccctacatactgactctgggcgtgatgatgctggtcgggatggccctctatctcaacggagccactgtggtagcagcgctgattgctaacccccgcagaaaattggtgtgggcgatttctgtgaccatgattggggtcgttctgtttgactttgcggctgacttcattgatggcccaattaaagcctacttgtttgacgtctgctctcaccaagataaggagaaaggcctgcactatcacgccctgtttaccggatttgggggcgctctaggttacctgttgggtgccattgattgggcccatcttgaacttggccgcctgctaggaacggaatttcaggtgatgttcttctttagcgcactcgtcctgactttatgctttactgtgcacttgtgttctatctccgaagcgccacttaccgaggtagccaaggggatccccccccagcagacgccccaggacccaccgctttcttctgacgggatgtacgagtacgggtctattgagaaggttaagaatggatatgtcaatcctgagctggcaatgcaaggagctaagaacaagaatcatgctgaacagacacggagggctatgaccctgaaaagtctgctccgcgccttggttaacatgccaccgcattataggtatttgtgcatttcccacctgattggatggactgccttcctctccaatatgctgttcttcacagattttatggggcaaatcgtgtataggggcgatccctacagcgcccacaactcgacagagtttctgatctatgagaggggcgtcgaagtgggctgctggggcctgtgcattaattctgtctttagctctttgtattcctatttccagaaagttctcgtctcatatatcggcttaaaagggctttacttcactggatacctattattcggactaggcactggtttcatcgggctgttcccaaacgtctattccaccctcgtcctgtgtagcctcttcggcgtaatgagtagcactttgtacaccgttcccttcaacctcattactgagtatcatcgcgaagaggagaaagaagtgtgttgtcactag

SEQ ID NO: 206312 - DNA, 732 bp, synthetic construct
  misc_feature 1..732: note = Description of Artificial Sequence: Synthetic coding sequence
  source 1..732: mol_type = other DNA
atgggcagcaacagcggccaggccggccggcacatctacaagagcctggctgacgacgggccatttgactctgtggagccacccaaaagacctacttctcggctgatcatgcattctatggctatgtttggccgggagttttgctatgccgtcgaggccgcttatgtcacgccagtgctgctctcagtggggttgccctcttcactgtactctattgtgtggtttttatctcctatcctcggtttcttactgcaacccgtcgtcggctctgcttccgaccattgcaggtcacggtgggggcgcaggcgcccctacatattgacccttggcgtcatgatgttggttggtatggctctgtatctcaacggagctactgtcgtggcagccctgattgcaaatccacggaggaagctggtttgggcaatctcagtgacaatgataggagttgtattattcgattttgcagcggacttcatcgacggacccataaaggcatacctgttcgatgtctgcagccaccaggataaggagaaaggtctccactatcacgcactgttcaccgactcgcaggggaacgatatcaaggtgaccgccgaaagcacaggcgaacacgcctctagcctgcccttacctcttcatcagccaccccactggatggatagcctccctgtccagcatgcggtgttgcacaggtttcacggaccggattgtgtgccccgcgggtccctctag

SEQ ID NO: 206313 - DNA, 741 bp, synthetic construct
  misc_feature 1..741: note = Description of Artificial Sequence: Synthetic coding sequence
  source 1..741: mol_type = other DNA
atggccctgtacctgaacggcgccaccgtggtggccggcttcggcggtgcactggggtatctgcttggcgctatcgattgggctcacctggagctcggaagactcttagggacggagttccaggtaatgttctttttctccgcgctcgttctcacactctgctttacagtgcatttatgcagcatctccgaagcgcctttaaccgaagttgctaaaggaatccccccccaacagacaccgcaggacccaccccttagtagtgatggcatgtatgaatacgggtctatcgaaaaagttaagaacgggtacgtgaatccagagctggctatgcagggagcaaaaaacaagaaccacgcagaacagacacggcgagccatgaccctgaaatcccttctgagggcactggtcaacatgccacctcactatcgctacctgtgcatctcacacctgattgggtggactgcgtttctttcaaatatgctcttcttcaccgacttcatgggacagatagtatacagaggcgacccttattctgcccataacagcacagaatttctgatctatgaaagaggcgtcgaagtgggctgctgggggttgtgtattaacagtgtgtttagctcgctgtactcatactttcagaaggtgttggtgagttacattggactgaagggcttatatttcaccggctatctcctgttcgggctgggtacgggctttattggccttttccctaatgtttag

SEQ ID NO: 206314 - DNA, 1662 bp, synthetic construct
  misc_feature 1..1662: note = Description of Artificial Sequence: Synthetic coding sequence
  source 1..1662: mol_type = other DNA
atggtgcagcggctgtgggtgagccggctgctgcggcaccggaaggcacagctgctcctcgtgaatttattaacatttggattagaggtatgtctggcagctggcattacctatgttccaccactccttcttgaggtgggcgttgaagaaaaattcatgacgatggtgcttggcataggacctgttctgggactcgtctgtgtgccactactgggctctgcgtctgaccactggagaggcagatacggtagacgacgaccctttatctgggcattgagcctgggaatcctactttctttgtttttaattcctcgggctggttggctggccggcctgctgtgcccagatcctagaccacttgagctcgctctgctgatcctgggtgtgggacttctcgacttttgcggccaggtctgtttcacacctcttgaagcactgttgtcagacctattccgcgatcccgaccattgccggcaggcgtactccgtctatgcttttatgatctctctgggcgggtgtctgggctatcttctacccgcaattgactgggatactagcgcactagctccgtatcttggaactcaggaggaatgtttgtttggcctcctgaccctgatctttctcacatgtgtggctgccaccctgctagtggccgaggaagctgctcttggaccgacagagcccgcagaagggctgtccgccccgtctctgtccccccattgttgtccttgtcgtgcgcggcttgctttccggaacttgggagccctgctgccaagactgcatcaactctgttgcagaatgccccgtactcttcgccgcctgttcgtggcagaactgtgctcatggatggccctaatgacgtttaccctattctacactgacttcgtgggggagggcctttaccagggagtacctcgcgctgagcctggaacggaggcacggcgccactacgacgagggggtacgtatgggcagtttggggttatttctccagtgtgcaatttcattagtttttagcctcgtgatggacagacttgttcaacgatttgggactagagctgtttatctggcaagcgtggccgccttccctgtggcagccggggcaacctgtctttcacactccgtggctgtcgtaactgccagcgccgctttgacaggctttactttttcagcactacaaatccttccctacaccttggcaagcttgtaccatagggagaagcaggtttttcttccaaagtaccggggcgataccggaggggcctctagcgaagacagcttgatgactagtttcctgcccggaccaaagcctggcgccccctttcccaatgggcacgtgggcgccggcggatctgggctgctgccgccaccccctgccctgtgtggggccagtgcatgcgatgtttccgtgcgtgtggttgtaggcgagccgacggaggccagggttgtgcctggacgcggaatctgccttgacctggccattctcgacagcgctttccttctgtcacaggtcgcacctagcctgttcatgggctctattgtgcagttatcccaatccgttacagcctatatggtttccgctgccggcttggggctagtggctatctactttgcgactcaagtcgtgtttgacaagtcagatcttgccaaatacagcgcctag

SEQ ID NO: 206315 - DNA, 1293 bp, synthetic construct
  misc_feature 1..1293: note = Description of Artificial Sequence: Synthetic coding sequence
  source 1..1293: mol_type = other DNA
atggagggcagcgccagcccccccgagaagccccgggcccggcccgccgctgctgtgttgtgtagagggccagtggagccactggtgttcctggcaaactttgccctggtattgcaagggcctctgaccacgcagtatctgtggcaccgcttctccgccgacctggggtacaatggcactaggcagcgcggaggatgctcaaatcgcagcgcagacccaactatgcaggaggtggagactctgaccagtcattggaccttatacatgaatgtcggagggttcctggttgggctgttctccagtacgctgctgggcgcttggtcggattcggtgggccgacggcccttactggtgctggcctccctcgggctgcttctgcaagccctggtttccgtcttcgtggtccagctgcagctccacgtgggctattttgtgttgggacgaatcctgtgcgccctcctgggagatttcggaggcctgctcgctgcctccttcgcctctgttgccgatgtgagttcatctaggagtagaacattcagaatggctcttctggaggccagtatcggggttgccggaatgctggcgagcctgttaggcggccactggctgagggctcagggctatgctaacccattctggctggcactggcccttctgatcgccatgactctctacgcagccttctgtttcggggagactctgaaagaaccaaagtctactagactgttcacattccggcaccatcggagtatcgtccagctatacgttgcgcctgcaccagaaaaaagtcggaaacatctggccctatacagcctagctatttttgtggtgatcaccgtgcacttcggcgcccaggatatactcactctgtacgaactgtctacaccgctgtgttgggactctaagctcataggatacggatccgcagctcagcacctgccatacctcacctcactgctggctctcaaactcctgcagtactgcctcgccgatgcttgggttgcagagatcggattagccttcaatattttgggcatggtggttttcgccttcgctacgatcacaccacttatgttcacaggcgcgctgtttagtgctgttgcctgcgtcaacagcttagccatgttgacagcctccggcttcaacagcctatatcctgccacacttaattttatgaagggcttccctttccttctgggagctggtctgctgctaatcccagccgtgctcatcggtatgctggagaaagcagacccgcacctcgagttccagcaattcccccagtcaccttag

SEQ ID NO: 206316 - DNA, 1380 bp, synthetic construct
  misc_feature 1..1380: note = Description of Artificial Sequence: Synthetic coding sequence
  source 1..1380: mol_type = other DNA
atggagggcagcgccagcccccccgagaagccccgggcccggcccgccgcggccgtgctgtgcagagggccggtagagccacttgtctttctcgccaacttcgcgctggtgctacagggtccccttaccacccaatacctttggcacagattctctgctgacctcgggtacaacgggacccgacagagaggcggctgcagcaaccgctcagcagaccccacaatgcaggaagtagagaccctcacatctcactggaccttatacatgaacgtgggtggttttttagtcggtctgttctccagcacactgctgggcgcgtggtccgattctgtcggccgacggccgttactcgtcctggcttccttgggactgctgctgcaagccctggtgtctgtctttgtcgtacagctccagcttcacgtagggtactttgtgcttggacgaattttgtgcgccttattaggggatttcggaggcctactggccgctagtttcgcaagcgttgccgacgtgtcgtcatcaaggtcgagaacctttcgtatggcccttcttgaagctagcattggagtggcaggcatgttggctagcctgcttggcgggcattggctacgtgcccagggctacgctaatcctttttggttagcactggctctcctcatcgccatgacactatatgcggcattctgttttggtgagaccctgaaggaaccaaaatctactaggttattcacgtttaggcatcaccgctctattgtccagctatacgtggcccctgcaccggagaagagtaggaagcacttagcgctctattctctcgccatttttgtcgtcatcacagtgcatttcggcgctcaggacatcctgacactgtacgaactaagcacgccgctttgttgggatagcaaactcatagggtatgggtcagctgcacaacacctgccctacctgacctcgctgctggccttgaagctgttgcaatattgtctcgctgacgcttgggttgctgaaattggactcgcgttcaacattctaggaatggtggtgtttgcctttgctacgatcacccccctcatgttcactggttacggtctcctgtttctgagtttggttatcacaccggtgatacgggcaaagttgagtaagctcgtgagagaaacggaacaaggagcattgttcagtgcggtcgcttgcgtgaatagccttgccatgctgactgcatccggaatctttaatagtctgtatccagcaacactcaatttcatgaaggggttcccatttctccttggcgctgggctgcttctgattcccgcagtgctcattggcatgctggagaaagctgatccccatctcgagtttcagcagttcccacagtcaccttag

SEQ ID NO: 206317 - DNA, 1428 bp, synthetic construct
  misc_feature 1..1428: note = Description of Artificial Sequence: Synthetic coding sequence
  source 1..1428: mol_type = other DNA
atgagccccgaggtgacctgcccccggcggggccacctgccccggttccacccacggacatgggtcgaacccgtcgttgccagtagtcaggttgctgcctccttgtacgacgccgggctgttgctcgtcgtgaaagcttcttatggtaccggtggtagttccaaccactcagcatccccctccccaaggggagctttggaggatcagcagcagcgcgccatttccaacttttacatcatttacaacctggtggtgggcctgtcccctctcttgtctgcctacgggctggggtggctctccgataggtaccacaggaaaatcagtatatgtatgagccttctggggttcctcttgtcacgcctgggccttttgttgaaggttctgctggactggccagtcgaagtcctctatggggccgcagccctcaacggcctgttcggaggcttcagcgccttctggtccggtgtaatggctctggggagcctgggcagttctgaggggcgccgctcagtgcgcctgattctgatcgatttaatgctaggtctggctggtttctgcgggagtatggctagcggacacttgtttaaacagatggcgggtcatagcggacaaggtctgattttaaccgcatgcagcgtatcatgcgcttcctttgcactgctatactctctgctcgtccttaaagtgccagagagcgttgcaaagccaagtcaggagctgccagccgtcgacaccgtctccgggactgtgggtacctaccggaccctcgaccccgatcagctcgaccagcagtacgcggtggggcatcctccatctccggggaaggctaagccccataagacaaccatcgccctgctgttcgtaggagcaataatatatgatctcgccgtggtgggcactgttgacgtgatccctctctttgtcttgcgggagccattaggctggaatcaggtccaggtcggctacgggatggccgcagggtatactatatttattacttcttttctgggtgtcctcgtgtttagcaggtgcttcagagatacaaccatgattatgatcggcatggtgtccttcggctccggagcactgctccttgcttttgtaaaagagacatatatgttctacattgcccgcgcggtgatgctgtttgccttgattccagttaccacgatccggagcgcgatgtcaaagctaattaaggggtctagctacggcaaggtgtttgtcatccttcagcttagcctggccctcacgggtgtggtcaccagcacactgtacaacaaaatctaccagctgacaatggacatgttcgtgggaagctgctttgccctgagctcattcctctctttcctcgctataataccgatctctatcgtggcatataagcaggtgccactgagtccatacggggatatcatcgagaaatag

SEQ ID NO: 206318 - DNA, 1713 bp, synthetic construct
  misc_feature 1..1713: note = Description of Artificial Sequence: Synthetic coding sequence
  source 1..1713: mol_type = other DNA
atggaggcccccgaggagcccgcccccgtgcggggcggccccgaggctacgcttgaagttaggggatcccgttgcttaaggttgtctgccttcagggaagaactgcgggctcttctggttttggccgggcctgcatttttagtgcagcttatggtcttcctcatctcatttatctcaagcgttttctgcggacatctgggcaagttggagctggatgcagtcacactcgcgattgccgtaattaacgtcactggtgtgtcagttggcttcgggttgagttcagcttgtgatacactgattagccagacgtacgggtcgcaaaacctgaaacatgtgggggtcatcctgcagaggagtgccttggttctgctcttatgttgctttccgtgttgggccttatttttaaacacccagcatatcctgttactttttcgccaggaccctgacgtgtcacggctgacccagacctacgtgacaatctttatccctgccttaccagctacatttctctacatgctccaagtaaaataccttttgaaccaggggattgtcctcccccagatcgtgacgggtgttgctgccaatcttgttaacgcccttgccaactatctgtttcttcatcagcttcacctgggcgtgattggcagtgcccttgctaatctcattagccaatacacgcttgctctccttctctttctatatattttaggtaagaaactacatcaggcaacctggggaggctggagcctggagtgcctccaagactgggccagtttcctcaggttagccattccgtcaatgctcatgctgtgcatggaatggtgggcatatgaagttggatcttttctgtctggaatacttggaatggttgagttaggagcacagtcaatcgtgtatgaactggccataatcgtttatatggtgccagccggcttttctgtggccgcgtctgttcgggtgggcaacgccctcggggctggcgacatggagcaagctcggaaatctagcaccgtttccctcctgatcacggtcctgttcgctgtggcattcagcgtactgctgctttcctgtaaggatcatgtaggatacattttcaccacagatcgcgatattatcaacctagtggcccaggtggttcccatctacgcagtatctcatttgttcgaggccctggcttgcacatctgggggtgttttgcggggatccggtaatcagaaagtgggcgccatagtcaatacaatcggatattacgttgtcggcttacccattgggattgcgctcatgtttgcaaccacactaggtgtaatgggcctgtggagcgggatcatcatctgtaccgtattccaggccgtgtgtttcttaggcttcatcattcagttgaactggaaaaaggcctgccagcaggcacaagtccatgctaacctgaaagttaacaatgtacccaggtccggcaactctgcactgccacaggacccacttcatcccggatgcccagaaaacctcgaggggatattgactaatgatgtcgggaaaacgggggagccacaaagcgaccaacagatgagacaagaggagccactgcccgaacatcctcaagacggcgctaaactcagccggaagcagctggtgctaagaagaggcctgctgctgctcggcgtatttttaatccttctggtgggtattctcgttcgcttttacgtccgtatccagtag

SEQ ID NO: 206319 - DNA, 1761 bp, synthetic construct
  misc_feature 1..1761: note = Description of Artificial Sequence: Synthetic coding sequence
  source 1..1761: mol_type = other DNA
atggaggcccccgaggagcccgcccccgtgcggggcggccccgaggccaccctggaggtgagaggctcccggtgcctccgcctcagcgcctttagagaggaactgagggctctattagtgctcgcgggccccgcatttctggtgcaactgatggtcttcttgattagctttatctcttctgttttctgcggccatctggggaaattggaactcgatgccgtgaccttagccattgcagtgatcaatgtgacaggtgtatctgttggatttggactgagttcggcatgcgacaccctgattagtcagacctacggctcccagaacctaaaacacgtgggcgtgatcttacagcgaagtgcacttgtgttgcttttgtgttgttttccctgttgggcattatttttgaacactcagcacatcctcttgctgttccgccaggatcctgatgtctcccgcctgactcaaacttacgtcacgatttttattcccgcgctgccagcaaccttcctatatatgttgcaggtgaaatatctgttaaatcagggaatagtgttaccccaaattgtaacaggagtggccgccaatctcgtcaatgcacttgcaaactacttgttcctacaccagttacatcttggcgtcattgggtccgctttggccaacctgatctctcagtatacacttgccctgcttttgttcctctatatcctgggaaagaaactgcaccaagcaacttgggggggctggagtctggagtgtctgcaggactgggctagctttctgcgactggcgatccccagcatgctgatgctgtgtatggagtggtgggcatacgaggtcggcagctttctcagtggtattctgggcatggtagagttgggtgcacaatccatagtctacgaactcgcaattattgtttatatggtacccgccggcttctctgtggctgcatctgtgagggtcggcaacgcgctaggggccggagacatggagcaggcacgcaagtctagcacagtgagcttgctgattacagtcttgttcgcagtagcatttagtgtgctgctgttatcatgtaaagaccatgtgggctatatttttactacagatcgagacataataaacctcgttgcccaggtggtccccatctatgctgtgagtcacctgttcgaagctctggcctgcacatccggcggagtcctccgcggatctggaaatcagaaggttggtgcaatcgtgaacacaatcggctattatgtcgtggggcttcccatcgggattgcgttaatgttcgctacaaccctgggcgtaatgggcctatggagtggtataatcatatgcacagttttccaggcagtgtgcttcttggggtttataatccagctgaactggaagaaggcatgccagcaggcccaagtccacgctaacctgaaggtgaataacgttcccagatcaggtaattcagcattacctcaggatcccctgcatcccggttgcccggagaatcttgagggcatcctgaccaatgatgtgggcaagactggagagccgcagtccgatcagcagatgagacaggaggaacctttacctgagcacccgcaggacggcgcaaagctctcacgcaagcagctggtcctgcggcggggattgctactgctgggtgtgtttctgattctcctcgcaggagtgcgctggtgcgatcattcttccctgcaaccccgaaccttgggactacaagccatcttactgtgccaaccccctgagtag

SEQ ID NO: 206320 - DNA, 849 bp, synthetic construct
  misc_feature 1..849: note = Description of Artificial Sequence: Synthetic coding sequence
  source 1..849: mol_type = other DNA
atggtggagctgggcgcccagagcatcgtgtacgagctggccatcattgtgtacatggtgcctgccgggttttccgtggcggcaagcgtgcgggtaggtaatgctctaggagctggtgacatggagcaggcgcgcaaatcttccacagttagcctcttgatcaccgtgctattcgccgtggccttcagcgtgttgttgctttcctgtaaggaccatgtgggttatatttttactactgaccgggatatcattaatctggtcgctcaagtagtgcccatatacgcggtgtcacatctgtttgaagccctggcttgcacctccggaggcgtccttcgcggcagtggaaaccagaaggtcggtgctatcgtgaatactattggttactatgtagtaggactccccatcggaatcgccttgatgtttgcgaccacactaggagtcatggggctctggagcgggataattatctgcaccgtatttcaggcagtctgctttctgggattcattatacaacttaattggaaaaaggcttgccagcaggcccaggtgcacgcgaatttgaaggtgaacaatgtgcctagatcaggcaattccgctctgccccaggacccgctccatcctggatgcccagaaaatttggaggggatcctgaccaatgatgttgggaaaaccggtgaacctcagagtgaccagcaaatgcgtcaagaagaacctctacctgagcatccacaagacggagccaagctgagtaggaagcagctagtgctgagaaggggattgctattgttaggggttttccttatcctactggtcggcatcctggtgcggttctatgtcagaattcaatag

SEQ ID NO: 206321 - DNA, 1332 bp, synthetic construct
  misc_feature 1..1332: note = Description of Artificial Sequence: Synthetic coding sequence
  source 1..1332: mol_type = other DNA
atggaggcccccgaggagcccgcccccgtgcggggcggccccgaggctacattagaggtgagaggcagcaggtgcttgcggctgtctgctttccgggaggaattgcgcgcgctcctggttctcgccggacccgctttcttggtccaactaatggtgttccttatcagcttcatttcttcagtgttttgtggccacctggggaagctggagctcgacgcagtgaccctggctatagctacctatggcagtcagaatttaaagcatgtcggcgttatcttacaacgcagtgcactggtgctcttgctttgttgcttcccatgttgggcactttttttaaacactcaacacatcttactgctgttccgacaagatcccgatgtctcaaggctgacccagacgtacgttacgatctttattccagctctgcccgccacgttcctgtatatgctccaagtgaaatacctgttaaatcaaggtatcgttctcccgcagatcgtcacaggagtggctgccaatttggtaaacgcactggccaactatctgtttctacatcagctgcatctaggcgtcattgggtcagccctggcgaaccttatcagccaatacaccctcgcattgctcctgtttctgtatatcctgggcaaaaaactccaccaagcgacttgggggggctggtctttggagtgtctgcaggactgggcatcttttctgaggctcgccattcccagtatgctgatgctttgcatggaatggtgggcatacgaagttgggtcctttctgtccgggatcctggggatggtagagctgggcgcccagtccatcgtttacgagctggcaatcatcgtctacatggtgcccgcggggttcagcgtggccgcatcggtacgcgttgggaatgctttaggggccggcgatatggaacaggcacgaaaatccagcacggtaagcctgctcataactgtgctgtttgctgtggcattttctgttttactgttgtcctgcaaggaccatgtggggtacatctttacgacagaccgtgacatcattaacctggtggcccaggtggtccccatttatgcggttagccacctgtttgaggcacttgcttgtacatcagggggggtgttacgcggtagtggtaaccagaaggtcggggccatcgtgaatacaattggctactatgtggtaggcctgccaatcggcatagctctcatgtttgctaccactttgggtgtgatgggctccgggacacggcagttcgaaagtaagcaacgtgcgtcagagtgggaattctgttcaccctctggaagcgctagcccccgcgtaccgtag

SEQ ID NO: 206322 - DNA, 738 bp, synthetic construct
  misc_feature 1..738: note = Description of Artificial Sequence: Synthetic coding sequence
  source 1..738: mol_type = other DNA
atgctgatgctgtgcatggagtggtgggcctacgaggtgggcagcttcctttctggaatcctgggcatggtggagttgggagcccagagcatcgtttatgaactcgccatcattgtctatatggtcccagcaggattttctgtggctgccagcgtccgtgtaggtaacgctctgggagctggggatatggaacaggcccgcaagtccagcaccgtaagcctcttaattaccgtgctcttcgccgtcgctttttcagtattgttgctgtcttgtaaggaccacgtgggctacattttcaccactgatagagatatcatcaacctcgtcgcccaagtggtcccgatctatgccgtgtcccatctgttcgaggcccttgcgtgcacgtccggcggtgtcctccgtgggtctggaaaccagaaggtgggagccattgtaaacacaatcggttattatgtcgtgggactgcctatcgggatcgccctgatgtttgccactaccctcggggttatgggatgtcccgaaaatctcgaggggattctgacaaacgatgtgggaaaaacaggcgaacctcagtctgatcagcagatgaggcaggaggaacctctgcccgaacacccccaagatggagcaaagctgagccgcaagcagctggttttgcgacgtggcctgctgctactgggggtctttctgatcctactggtgggaatccttgtgaggttttatgtgcggatccagtag

SEQ ID NO: 206323 - DNA, 1761 bp, synthetic construct
  misc_feature 1..1761: note = Description of Artificial Sequence: Synthetic coding sequence
  source 1..1761: mol_type = other DNA
atggaggcccccgaggagcccgcccccgtgcggggcggccccgaggcgactctggaagtgcgtggctcccggtgtctgagattgtccgctttcagggaagagctgcgggcactcctcgtgctcgctgggccagctttcttagtacaattgatggtattcctcatcagcttcataagcagcgtgttctgcggtcacctcggtaagttggaacttgacgcggtcactttagccatcgcggtgattaacgtgaccggcgtttctgtaggttttggcctttcatccgcgtgcgacaccctgatctcgcagacatatggcagccagaacttgaagcacgtgggggtcatattgcagcgctctgccttagtgctgctgctgtgctgcttcccgtgttgggcattgtttcttaatacgcagcacatcctgttgctttttaggcaggaccccgatgtgtcacgactcacccagacttacgtgacaattttcattcctgcactgcctgccaccttcctgtatatgttgcaagtgaagtacctattaaaccaggggatcgtcctgcctcagatcgtgacgggcgtagcagccaacctggtaaatgcgctggccaattatttatttctacaccagctgcacctgggagtcatcggtagtgcactggcaaacctcatctcccagtataccttggctcttctactctttctttatattctcggaaagaagctgcaccaggcaacctgggggggttggagcctggaatgccttcaggactgggccagctttctgcggctagctatcccttccatgctcatgctttgcatggagtggtgggcctatgaagtaggttccttcctcagtgggattttaggtatggtggagcttggcgcccagagcattgtctatgagctggctatcattgtttacatggtgcctgccggcttctcagtggccgcaagcgttagggtgggaaacgccctgggcgctggcgacatggagcaagccaggaagtctagcacggtgagtctgttaatcactgttctgtttgcggtcgcttttagcgtcctgctactcagttgcaaagaccacgttgggtatatttttacgaccgatagagacattataaacttggtggcgcaggtggtacccatttatgcggtttctcacctttttgaggccctcgcatgcacttccgggggagtcctgcgagggagcggcaatcagaaagttggagctatcgtcaacacgataggttactacgtcgtaggccttcccataggcattgcactgatgttcgccaccaccctcggggttatgggactttggtctgggatcatcatttgcacagtttttcaggccgtctgtttcctggggtttatcatccagctgaactggaagaaggcctgccagcaagcacaagtgcacgctaacttgaaagtcaataacgtgcctcgaagcggcaacagtgcactgccccaagatcccctacatccaggatgccctgaaaacctggaggggatactcacgaatgacgtgggcaaaacgggagaacctcaatctgaccagcagatgagacaggaggaacctctgccagagcatcctcaggacggcgcaaagctctcacggaagcagctggtgctgcgtcggggtttactgttgctgggcgtatttctgatcctccttgcgggggtacggtggtgcgaccatagctctctgcagccaagaactctcggacttcaggctattttactctgccagcctccagagtag

SEQ ID NO: 206324 - DNA, 735 bp, synthetic construct
  misc_feature 1..735: note = Description of Artificial Sequence: Synthetic coding sequence
  source 1..735: mol_type = other DNA
atggaggcccccgaggagcccgcccccgtgcggggcggccccgaggccacgcttgaagtgcggggatccaggtgcctgaggctgtcagccttccgtgaagagctaagagcactgctcgttctggcagggccagctttcctcgtgcagctcatggtctttctgatctcattcatcagctccgtattctgcgggcatttggggaagctagaactggatgccgtcactctggccattgcagtaatcaacgtgacaggagtgtctgtaggttttggactgtcttctgcctgcgatactttgatttcacagacctatggatcacagaacttaaagcacgtaggcgtgatcctccagcgctccgcactcgtgttacttctctgttgcttcccttgctgggctctgttcctcaacacccagcacatactgctgctcttcaggcaggacccagacgttagccgtctgacgcagacatatgttaccatcttcatccccgcccttcccgccacattcctgtacatgctgcaggtgaaatacttgcttaatcagcgtctgtgcactggaaaactggactttccagttcatccaggcagcactccccttagcctgcacccacgcgagaagaccgcctcctcctatatgggaagattggtgccccgggtgccagctgggcttggccttttacccccgcctggccacccacaacacgcccacgccgtgcatggtgtggtcggattgtag

SEQ ID NO: 206325 - DNA, 1809 bp, synthetic construct
  misc_feature 1..1809: note = Description of Artificial Sequence: Synthetic coding sequence
  source 1..1809: mol_type = other DNA
atggacagcctgcaggacaccgtggccctggaccacggcggctgctgccctgcactctcacgtctggtgccgcggggcttcggaaccgaaatgtggacattatttgctctctccggtcctttgttcttgttccaagtgctcaccttcatgatctacatcgtaagtaccgtgttctgtggccaccttggcaaggtagaactcgcctccgtgacccttgcagtggctttcgtgaacgtctgcggggtctccgtgggcgtcggactttcctccgcgtgcgataccttaatgagtcagagctttggctctcctaataagaagcacgttggggtgattctgcagaggggggctctcgtcctgttgttgtgctgcctgccctgttgggcattgttcttgaatacacaacacatcctgcttcttttcagacaggaccctgatgtgtcgagactgacgcaagattacgtgatgatctttatccccggcctgccggttatcttcctgtataacttgctggctaaatatctccagaaccaaggctggctgaagggacaggaagaggagtctcctttccaaacccccggcctgagtatcctccatccctctcactctcatttaagtcgcgcctcctttcacttgtttcaaaaaatcacctggccccaggtgctgtccggagtggttggtaattgtgtgaatggggtggctaattacgccctcgtttccgttttgaacttgggggtcagaggaagtgcctatgcaaatattatttcgcagttcgcgcagacggtttttctgctgctgtacatcgtcctcaaaaagctccacttggagacctgggccgggtggagctcccagtgcctacaggactggggccccttctttagtctcgctgtgccaagtatgctgatgatctgcgtggagtggtgggcctacgagattggcagttttctgatggggcttttatcggtggttgacttgagcgctcaggcggtcatctatgaggtagctactgtgacctacatgatccctctgggactgagtatcggtgtttgcgtccgggtgggcatggcactgggcgctgcagacaccgtccaggcgaaaaggagcgcagtgtcaggggtgttaagcattgtgggtataagcctcgtcctcggtactcttatttcaattcttaaaaaccagcttgggcatatctttactaacgatgaggacgtgatcgcattagttagtcaggtgctccctgtatatagtgttttccatgtgtttgaggccatctgttgcgtgtatggaggcgtgttgaggggtaccggaaaacaggcattcggagcagccgtcaatgcaatcacctactacatcatcggactcccccttgggatcctcttaacatttgtggttcgcatgcgtattatgggactgtggctggggatgctcgcttgcgtgtttctggctacggccgccttcgttgcctacaccgccaggctggattggaagctcgcagccgaagaggcaaagaagcactccgggcggcagcagcagcagagagccgaaagcactgcaaccagacctgggcccgaaaaagcagttctctcctcagtggccacgggcagttctcccggtatcactctgacaacatacagccgttcagaatgccacgttgacttcttccggacgcctgaggaggctcatgctctctcggctccgaccagtcgactctctgtcaaacaactggtgattcggagaggagctgccctgggtgccgcaagcgctacattgatggtaggactcaccgtaagaatcctcgccactcgacactag

SEQ ID NO: 206326 - DNA, 1743 bp, synthetic construct
  misc_feature 1..1743: note = Description of Artificial Sequence: Synthetic coding sequence
  source 1..1743: mol_type = other DNA
atggacagcctgcaggacaccgtggccctggaccacggcggctgctgcccagccctgtcaaggcttgtgccccgaggattcggtacagaaatgtggacactgttcgcgctgtcaggccccctcttcttatttcaggtgcttaccttcatgatctatatcgtgagtacggtgttttgtggccatctgggaaaggtcgagctggcctctgtgaccttggcagtggccttcgtgaacgtctgtggagtgagcgtcggggtgggcttgtccagcgcttgcgacaccctaatgagtcagtcctttggttcccccaataagaaacacgtgggggttatcctgcaacgcggagcccttgtgctgctgctgtgttgtctgccctgctgggcattgttccttaatacgcagcacatcctgttactttttcgacaggaccccgacgtgagtcgtcttactcaagactacgtgatgatttttatcccagggctgccggtgatattcctgtacaacctgctggcgaaatatctacagaaccagaagatcacatggccccaggtcctgagtggggtcgttgggaattgtgtcaacggagtagccaactatgccctggtatcagtcctgaatctcggggttcgcgggtcggcttacgctaatatcattagtcagtttgcacagacagtgttcctgctgctgtatattgtgctgaagaagctgcacctggagacttgggctggctggagtagccaatgtctgcaggactggggaccttttttctccttggccgtgccatctatgctgatgatctgcgtggagtggtgggcttacgaaatcggtagttttctaatgggcctgttgagtgtggtagacctgagcgcccaagccgttatttacgaggtggcaacagtaacctatatgcgacactcccacaggctagcctacgctgctcatgtgacaaggatccctctgggattgtccataggagtgtgtgtgcgggtcggaatggccctaggggcggcggacaccgtccaggctaagagatccgcggtcagcggagtcctgtcgattgttggaatcagtctggtgctgggcactttgatcagcatcctgaaaaatcagttaggtcacatctttaccaatgatgaagacgtcattgccctggtgagccaagtgcttcctgtgtactctgtgtttcacgtttttgaggccatctgctgtgtctacggtggggtgctccgggggaccggcaaacaggccttcggagcagcagtgaatgcgattacttactacatcataggactcccactgggaatactgctgacgtttgttgttagaatgaggatcatgggcttgtggcttggcatgctggcctgcgtctttctggctacggctgcattcgtggcttatacagcacggctggattggaagctggcagcggaggaggccaagaaacattctggtaggcaacagcagcagcgcgctgaatccacggccacgagacctgggccggagaaagctgtactcagctcagtcgcgaccggatcttcacctggcattacactcaccacgtattcccgctctgaatgccacgttgacttcttcagaacccccgaagaggctcatgcgctcagcgctcccaccagccgtctttccgttaagcagctggtaatccgaagaggcgccgcccttggagccgccagtgctactctgatggtcggacttacggtccggatcctcgcaacacgccattag

SEQ ID NO: 206327 - DNA, 1092 bp, synthetic construct
  misc_feature 1..1092: note = Description of Artificial Sequence: Synthetic coding sequence
  source 1..1092: mol_type = other DNA
atggacagcctgcaggacaccgtggccctggaccacggcggctgctgcccagccttgtcccgcctggtgccgagggggttcggtacagaaatgtggacactcttcgcgttgtcgggccctctgttcctgtttcaagtgctgaccttcatgatttacatcgtgagcaccgtcttttgcggccacttgggcaaagtcgaactggcctccgtgacactggcggtggcctttgtgaatgtctgcggcgtgtccgtgggggtgggactgagtagcgcctgtgataccctaatgtcacaatccttcggctctccaaacaagaaacacgttggtgtgatcctccaacgtggggctcttgtgctgctgctgtgctgcttgccttgttgggccctgtttctgaatacccagcacattcttttgttatttcgtcaggacccggatgtgagcaggctcacacaagactatgttatgattttcataccaggcctccccgtaattttcctctataatctgttggcaaagtacttgcagaaccagaagataacctggcctcaggtgctgtctggtgtggtggggaattgcgtcaatggcgtggccaattatgcgctcgtaagtgtcctcaacctgggagttcgcggatcagcctatgcaaacattatctctcaatttgcccagactgtgttcctcttgctctatattgttttgaagaaattacatttagagacttgggccgggtggagctcccagtgtttgcaggactgggggccattcttctctctggccgtaccaagtatgctcatgatttgcgtcgagtggtgggcgtacgaaatcggtagctttctcatgggccttctgagcgtagtggacctcagcgcacaggctgtcatctatgaagtcgcaacagttacctatatgatcccacttggactgtctataggcgtttgcgtgcgggtagggatggcactgggggcagccgataccgtgcaggccaagcgcagcgcggtatcaggcgtgcttagcattgtaggcatttcattggtgctaggcaccttgattagtatcttgaagaatcagctgggacacatcttcacgaattag

SEQ ID NO: 206328 - DNA, 891 bp, synthetic construct
  misc_feature 1..891: note = Description of Artificial Sequence: Synthetic coding sequence
  source 1..891: mol_type = other DNA
atgatctacatcgtgagcaccgtgttctgcggccacctgggcaaggtcgagttggcgtcagtcacccttgctgttgcatttgtgaatgtgtgtggcgtaagcgttggcgtgggtctgagctcagcttgtgatactcttatgagtcagtccttcggctcgccaaataaaaagcacgtcggggtgatcttgcagagaggggccctggtgctgctgctgtgttgcttgccatgctgggccctgttcctgaacactcagcatatcctgctgctctttaggcaagatccagacgtgagcagacttactcaggattacgtcatgatcttcattcctggcttgcctgtcatttttctctacaacctgctggccaagtacctgcagaaccagaagattacatggccacaagtgctctcaggtgtcgtagggaactgtgtcaacggtgtcgcgaactacgcgctggtctctgtgctgaacctgggtgtgcggggcagcgcctacgccaacattatatcccagtttgcccagaccgtcttcctgcttttgtatatcgtccttaaaaaactgcacctggaaacttgggcaggatggagctcccagtgcctacaggactggggcccttttttctctctcgccgtgccatccatgctgatgatctgcgtggaatggtgggcctacgagatcggatcattcctcatgggactgctgtctgtggtagatctgtccgcccaagcggtcatttacgaggtggctacagttacgtacatgatccctctgggactcagtataggcgtgtgcgtgagagtcggaatggccctaggagcggcagacaccgtccaggccaaacggagcgccgtgtccggggtgctgagtatcgctcggtctgatccttggtag

SEQ ID NO: 206329 - DNA, 531 bp, synthetic construct
  misc_feature 1..531: note = Description of Artificial Sequence: Synthetic coding sequence
  source 1..531: mol_type = other DNA
atgaaggccagcggcaccctgcgggagtacaaggtggtgggccggtgcctgcctacacctaaatgtcacacaccacccctctaccgtatgcgcatattcgcacctaaccatgttgtggccaagtccaggttctggtatttcgtctcccagctcaaaaaaatgaaaaagtccagcggggaaatcgtgtattgcgggcaggtcttcgagaaaagcccactcagagtgaagaactttggaatttggttgagatatgacagtcgatctggtactcacaatatgtacagggagtaccgtgacctgacgaccgctggagccgtcacacaatgttatcgcgacatgggggctcggcacagagcacgagcccattcgattcagatcatgaaagtcgaggagattgctgccagcaagtgccgcagaccagctgtgaaacagtttcacgattcaaagatcaaatttcctctcccacatcgagtcttaaggcgacagcacaagccccggtttaccacgaagcgtccgaatacctttttctag

SEQ ID NO: 206330 - DNA, 1995 bp, synthetic construct
  misc_feature 1..1995: note = Description of Artificial Sequence: Synthetic coding sequence
  source 1..1995: mol_type = other DNA
atggacagcagcacctggagccccaagaccaccgccgtgacccggcctgtggaaactcacgaattgattaggaacgccgcagacatctcaatcattgtgatctacttcgtcgtggtgatggccgtgggcctctgggcaatgttttctacaaatagaggcactgtaggaggtttttttcttgccgggagatctatggtttggtggccaattggggccagcttgttcgcctccaatattgggtccggtcacttcgtgggactagccggtaccggtgcggcatcaggaattgccattggcggcttcgagtggaatgccctcgtcctagttgtagtgctcgggtggttgttcgtccccatatacattaaggctggggtcgttaccatgcctgagtaccttcggaagcgatttgggggtcagagaattcaagtctatctgtccttgctgagcctgttactgtatattttcacaaagatctcagccgacattttctccggcgctatttttatcaatctagccctggggcttaacttgtacctagcgatttttctgctgctcgccatcaccgcactctatactataacaggcggactcgcagccgtgatctatacagatacactgcagacggtaataatgttggtgggaagccttatacttaccggattcgccttccacgaagtaggtggttacgatgccttcatggagaagtatatgaaagccattcccaccattgtgagtgatggcaacaccacattccaggagaagtgttacactcctcgcgctgactcttttcacatctttagggaccctctcacaggggacctgccttggccggggttcatcttcggcatgagcatcctcactttgtggtattggtgtactgaccaggtgattgtgcagagatgcctttctgcgaaaaacatgtcccacgttaaaggcgggtgtattctgtgcggctatttgaagctcatgccaatgttcattatggtgatgccaggaatgatttcacggattttatatacagaaaaaattgcatgcgtggtcccatctgagtgcgaaaagtattgtggcaccaaagtaggatgtaccaatatagcctaccctacactggttgtggagttaatgcccaatgggttgcgaggcctgatgctgtcggtgatgcttgctagtctgatgtccagcctgactagcatcttcaattctgcctcaacactgtttactatggacatatacgccaaggtgcgcaaaagagcctcggagaaggagctgatgatcgctgggcgattgtttattctcgtgcttattgggatcagtattgcgtgggtgcccattgtccagagcgcgcagagtggacagttatttgattatatccagagcatcactagctatctgggtccccccatcgcagctgtgtttctgctcgccatattttggaagagagtcaacgagcccggggctttttggggtctgattttaggcctcctgatagggatatctcgcatgatcacagagttcgcctacggcacaggaagctgcatggaacccagcaactgtcccaccataatttgtggggtgcactatctttattttgccatcatccttttcgcaattagcttcattactatcgtggtgatctcactactaacaaagccaattcctgacgtgcatctctaccgactgtgctggagcctgcgtaactccaaggaagaacgtatcgaccttgacgccgaggaggagaatatacaggagggcccaaaggaaacaatcgagattgagacccaagtcccagagaagaagaagggtatcttccggagagcttatgacttgttctgcggcctggaacagcatggtgcacccaagatgacagaagaagaggaaaaagctatgaaaatgaagatgaccgacaccagtgagaagccgctgtggcggacagttctgaacgtgaacggcatcatacttgtaaccgttgcagttttttgtcatgcatatttcgcttag

SEQ ID NO: 206331 - DNA, 1614 bp, synthetic construct
  misc_feature 1..1614: note = Description of Artificial Sequence: Synthetic coding sequence
  source 1..1614: mol_type = other DNA
atgcccgagtacctgcggaagcggttcggcggccagcggatccaggtgtacctttccctcctaagcctccttctgtacatctttacaaagatctctgctgacatcttttcaggcgccatcttcatcaacttggctttgggcctcaacttgtatttagcaatattcctgctcctggcaattacggcattgtataccattacaggaggactggccgccgtgatctacaccgatacacttcagaccgtgatcatgctggtgggaagccttatcttaaccggcttcgctttccacgaggttggtggttacgacgcctttatggaaaagtacatgaaggcgatccccactatcgtttcagatgggaacaccacgtttcaggagaagtgctatacaccccgagctgatagctttcacatctttcgagacccactcacaggcgacctcccatggccggggtttatcttcggcatgtcaatccttactctgtggtactggtgcaccgaccaagtgatagtacagagatgcttaagtgcaaaaaacatgtcacatgtcaaaggcggttgcattctgtgcggatatttgaaactgatgcccatgtttatcatggtgatgccaggcatgatatccaggatcctgtatacggaaaaaatagcatgcgttgtgccatcggagtgcgagaaatattgcggcaccaaagttggctgcacgaacattgcctatcctactctggtagttgagctgatgccgaacggccttcgagggctgatgttaagcgtgatgctcgctagcctaatgtcttccctgacctccatctttaattcagcttccacgctctttacaatggacatctacgccaaagtcaggaagagagcttccgagaaagaacttatgatagcggggcgactgttcatactggtactcatcggaataagcatagcctgggtgccgattgttcagagtgcccaatctggtcagctgtttgattacattcagagtattaccagctatctggggccccctattgcggccgtgtttctattagcaattttctggaagcgcgttaatgagcctggagccttctggggtcttatacttgggctccttattgggatttcccgtatgattacagaattcgcctacggcacgggtagttgcatggaacccagcaactgtcccacaatcatctgcggagtgcactacctgtatttcgcaattatcctctttgcaatcagtttcatcacgatcgtggtcatcagtctgctcacaaagccaattcctgatgtgcacctctaccggctgtgctggagcctgagaaacagcaaggaagagcgcatagacttggatgccgaagaagagaacattcaggaaggtcccaaggaaacaatcgaaattgagactcaagttcccgagaagaaaaaaggaatttttcgcagagcttatgacctgttttgtgggctagagcagcatggagccccaaagatgacagaagaggaggagaaggccatgaaaatgaagatgacggatacgtctgaaaaacccctatggcggactgtattaaatgtaaacggcatcatcttagttaccgttgccgtcttttgtcacgcgtattttgcttag

SEQ ID NO: 206332 - DNA, 1191 bp, synthetic construct
  misc_feature 1..1191: note = Description of Artificial Sequence: Synthetic coding sequence
  source 1..1191: mol_type = other DNA
atggaggtgaagaacttcgccgtgtgggactacgtggtgttcgccgctttgttctttatctcatcgggcatcggggtgttctttgctatcaaagagcgtaaaaaagctaccagcagggagtttcttgtggggggccgccagatgtcttttggcccagttgggctgtctttaaccgcctcatttatgtccgccgtcacagtcttgggaacaccctccgaggtctatcggttcggcgcctcatttctggtgtttttcatcgcctatttgttcgtgatcctgctaacctcagagctcttccttccagttttctatcggagcggcattaccagcacctatgaatatctgcaattacgctttaataaacccgtgcgctacgccgccaccgtcatctatatagtgcagaccatcctctacacaggtgttgtcgtctacgcccctgctttggccctgaatcaagtcaccggattcgatctatggggcagtgtttttgctacggggatcgtctgcaccttctactgcacacttggaggactgaaagctgtggtatggacagatgcattccaaatggtggtgatgatcgtcggcttccttaccgttctcatccaagggagtactcatgcaggaggcttccataatgtgctggagcagtctactaatgggagtagactacatatattcgacttcgacgtggatccattaagacggcatactttttggactattacagtaggaggcacatttacttggcttggcatctatggagtgaaccagagcaccatccagcggtgtatttcatgtaagactgaaaagcacgcaaagctggccctctactttaatctactgggcctgtggatcattctcgtgtgtgccgtgttttctgggctgataatgtacagccactttaaagattgcgatccatggacatcaggcattatctccgcgccagatcagctgatgccttatttcgtgatggagattttcgctaccatgcctggccttccaggtctgttcgtagcctgcgctttcagtggcactctctcaacagttgcttcatcaatcaatgccctggccactgtgactttcgaggactttgttaaaagttgttttcctcacctgtctgacaaactatcaacctggattagtaaagggctgtgcaggtactcatggtggaccttctattccattagctag

SEQ ID NO: 206333 - DNA, 1857 bp, synthetic construct
  misc_feature 1..1857: note = Description of Artificial Sequence: Synthetic coding sequence
  source 1..1857: mol_type = other DNA
atggaggtgaagaacttcgccgtgtgggactacgtggtgttcgccgcactgttttttatttcgagcggaatcggggttttttttgccatcaaagaacggaaaaaagcaactagtcgggaattccttgtgggaggacgccaaatgagctttggccctgtgggcctgtctttgacagcctccttcatgtctgccgtaaccgtcctcggaacaccttcagaggtgtatcgtttcggagcaagcttcctagtgttcttcattgcttatctgttcgtaatcctcctcacatctgaactcttcctaccagtcttctataggtctggcatcacatccacttacgagtacctacagcttcgtttcaataagccagttagatacgccgctacagtcatatacatagtgcagaccatcttgtatacaggcgtggtggtgtatgcccccgcactcgctttgaatcaggtgacgggcttcgatctttgggggagtgtctttgcaaccggtatcgtgtgcacattctactgcaccctaggggggctgaaggccgtggtatggacagacgcctttcagatggtggttatgattgtgggctttctgacagtcctgatacagggcagtacccacgccgggggctttcacaacgtcctggaacaatctacgaacggtagcaggctgcatatattcgacttcgatgtggaccccctgcgccgccacaccttttggaccataactgtgggcggtactttcacatggcttgggatctacggggtgaaccagagcaccatccagagatgtattagctgtaaaaccgagaagcatgccaaactcgctctctatttcaatctcctcgggctctggataattcttgtctgtgccgtttttagcggcctgataatgtacagccacttcaaggattgtgatccgtggacttccgggatcatcagcgccccggatcagctcatgccttacttcgtgatggagatcttcgcaacgatgcctggccttcctggactgttcgtcgcctgcgcattttccgggaccttatccaccgtagcgtcatctataaatgcccttgctacagtgactttcgaagatttcgtgaagtcctgcttcccacatctctccgacaaattatcaacatggatctccaaggggctgtgcctcctctttggcgtaatgtgcacatcaatggccgtagctgctagcgtcatgggtggggtggtgcaggcatcactcagtatccacgggatgtgcggtggccctatgcttgggttgttttctcttggcattgtgttcccttttgtgaattggaaaggggccctcggagggctgctgaccggcattactctgtctttttgggtggctatcggcgcattcatttaccccgcacccgcttccaaaacctggcccctgcccctgtctacagatcaatgcattaagagtaatgtgaccgcgaccggcccgcctgttttgtctagtagaccagggatcgctgacacctggtattctattagctatttgtattattcggccgtcggctgccttgggtgtatcgttgccggtgtaataattagcctaattacgggaagacagcggggagaagatatacagccgttgctgatacgccctgtgtgcaatctattctgcttttggtctaaaaaatacaagacactgtgctggtgcggcgttcagcacgacagcgggacggagcaagaaaatctcgagaacggaagcgcccgcaagcaaggagcggaaagtgtcctccagaacggactgcggcgtgaaagccttgtgcatgtccctggatatgacccaaaagataagtcctataacaatatggcctttgaaacaactcacttctag

SEQ ID NO: 206334 - DNA, 834 bp, synthetic construct
  misc_feature 1..834: note = Description of Artificial Sequence: Synthetic coding sequence
  source 1..834: mol_type = other DNA
atggtggtgatgatcgtgggcttcctgaccgtgctgatccagggctctactcatgccggtggcttccacaacgtgctggaacagagcaccaatgggagtcgcctccacatatttgacttcgacgtggaccctttgcggaggcataccttctggacaataaccgtcgggggcacgttcacatggttgggcatttacggcgtaaaccagtcgacaattcaaaggtgtattagttgtaaaactgagaaacacgctaagcttgcactgtacttcaacttgctgggcctatggatcatcttagtttgcgctgtctttagtggactgattatgtactcccacttcaaggactgcgatccctggacttctggcatcataagcgctccagaccagttgatgccatatttcgtaatggaaatcttcgctactatgcccggtctgccggggctcttcgtcgcctgcgcttttagcggaacactgtctacagttgcaagcagcatcaatgctttagcaactgtgacattcgaagattttgtgaagtcatgtttccctcacctgtctgataagttgtccacctggatctcaaaaggcttgtgccgcagtctgatctggcgcgacgtttacctatacggctgcggatgtatatgtcacggaaggtgttgtgcgggcttcccacagcacagtaggcacgtttggcggaccaatgccgggcttattttacccggcaacagggtccctttctgcgaattggaggggtgcacacgcagatcctcctattggaaccatctggtcattcttgggggccactggggactgcatctcccgtgtacatctctgtag

SEQ ID NO: 206335 - DNA, 2019 bp, synthetic construct
  misc_feature 1..2019: note = Description of Artificial Sequence: Synthetic coding sequence
  source 1..2019: mol_type = other DNA
atggaggagcacaccgaggccggcagcgcccccgagatgggcgcccagaaagcccttatcgacaacccagccgacattctcgtaatcgccgcatatttcctattggtgattggcgtgggcctgtggagcatgtgtagaaccaatcgcggcaccgtaggcggctattttctggccggacgctctatggtctggtggccagtgggagcgtctctgttcgcatcaaacattggctcaggccacttcgttggtctagctggcactggagcagctagtggactggctgttgcaggattcgaatggaacgccctgttcgttgtcctgttactgggatggttatttgcgcccgtctatctgaccgccggagtgataactatgccgcagtacttgcggaagaggttcggggggcgaaggattcgtctgtatctgagcgtccttagtctcttcctttatattttcactaagattagcgtcgatatgttttcaggagcagtattcatacagcaggcccttggctggaatatttatgcttcggtaatagccctgctgggtattaccatgatttataccgttacaggggggttggctgctctgatgtatacagataccgttcaaacattcgtcatcttagggggggcctgcatactcatgggatatgcattccatgaagtgggcggatacagtggattgtttgataagtacctcggtgccgcgacttccctcacagtttctgaagaccccgccgtgggcaacattagcagcttttgctatagaccgaggcccgattcctatcatctcctgaggcaccctgtgactggagacttaccctggccggcgctcctcctgggactgacgattgtttctggctggtactggtgttcagatcaggtaatagtgcagaggtgtttagccggaaaatccctgacacacataaaggctggctgcattctctgtggctatctgaaactgacaccaatgttcctgatggtgatgccgggcatgatttcccgaatactataccctgacgaggtcgcctgtgtagttcccgaggtgtgcaggagagtttgtggtaccgaggtgggttgcagcaacattgcatatccacgtctagtcgtaaaattgatgccgaatggactcagagggctcatgctggccgtcatgctcgccgcgctgatgtcttctttagcaagcatttttaactctagctccacactattcacaatggatatctacacccggctgagaccgcgggccggagaccgtgagctacttctggtcggcagactctgggttgtgttcattgtggtggtttccgtggcctggctcccagttgtacaggctgcccagggcggtcagctgtttgattacattcaggccgtgtcttcctacttggctcccccagtgtccgctgtgttcgttcttgctctatttgtaccccgggtgaacgagcaaggcgctttctggggactgatcggtggccttctgatggggcttgctagactgatacccgagttttcctttggatccggcagctgtgtccagccttccgcctgtccagctttcctgtgcggtgtccactacctgtattttgctatcgtactattcttttgctcaggactcttaaccctgaccgtgagcttgtgtacagcccccataccaaggaaacacctccaccgcctggtcttcagcctgagacattccaaggaagagcgcgaggatctggacgctgatgaacaacaggggagttctctccctgtgcagaacggttgtcctgagtcagccatggaaatgaacgagccacaggcccccgctccctccctgttcagacagtgcctgttgtggttctgtggaatgtcacgagggggggtgggctcccctcctcctctcacccaggaagaggctgccgccgctgcacgcaggctcgaggacattagcgaagaccccagttgggcccgcgttgtcaacttaaacgcactcctcatgatggctgtggcagtgtttctgtggggcttttacgcatag

SEQ ID NO: 206336 - DNA, 1377 bp, synthetic construct
  misc_feature 1..1377: note = Description of Artificial Sequence: Synthetic coding sequence
  source 1..1377: mol_type = other DNA
atggaggagcacaccgaggccggcagcgcccccgagatgggcgcccagaaggccttgatcgataaccctgcagacatcctggttatcgccgcctactttctactggtgataggggtgggcctatggagtatgtgcagaaccaaccggggcacggtggggggctactttctggcggggagatccatggtgtggtggcccgtaggcgcaagcctcttcgctagcaacatagggagtggacactttgtcggtttggccggcacaggagcagccagtgggctggcggtcgccggcttcgagtggaatgccctgttcgtagtgttacttctgggttggttgttcgctcccgtgtacctcaccgccggcgtcatcactatgccacagtatttgaggaagagattcggcggccgccgcatacggttgtacctgagcgtgctttcactctttctttatatttttactaagatttctgtggatatgtttagcggcgccgtatttattcagcaggccctggggtggaacatctacgctagtgtcattgccctgcttgggattactatgatatacaccgtaactggcggtctggccgctctaatgtacacagacaccgtgcaaacgtttgtcattctggggggcgcctgcatcctgatgggatacgcatttcatgaggtcggtggctatagtgggctttttgataaataccttggggcagctacatctctgaccgtgtccgaagacccagccgtgggcaacattagcagtttctgctatcgcccccggccggattcgtaccatctacttagacacccagtgacaggtgacctcccatggccagccctgttgttgggcctcacaatcgtgagcggctggtattggtgttccgatcaggtgatcgtccaacgctgtctcgccggcaaaagcctcacccatattaaagctggttgcatcctgtgcggatatctgaagctgacaccaatgtttctgatggtgatgccggggatgatctctagaatcctataccccgacgaagtcgcatgtgtggttcctgaggtgtgcagacgggtgtgtggcaccgaagtgggctgtagcaacattgcataccctaggctggtggtgaagctcatgccaaacggcagattgcttggtactcacaggggaccagctgatggccccgggacccctgacagcagagtcctgcttaggcttggccagttgtgcgcagcactgggagtgccctctttcccgctgcgccgcgccctgcctctcttgaggcactgcgcggtattgctgctttggccgccccacccccacggacttcctgtgcaccgagcccatccacagaaagccccccctccaccagggttgcaatcgcccgcatag

SEQ ID NO: 206337 - DNA, 2157 bp, synthetic construct
  misc_feature 1..2157: note = Description of Artificial Sequence: Synthetic coding sequence
  source 1..2157: mol_type = other DNA
atgcgggccgtgctggacaccgccgacatcgccatcgtggccctgtacttcattctggtcatgtgcattggattttttgcaatgtggaagtctaacagatcgaccgtgtcaggatacttcctggccggccggagcatgacctgggtgactatcggcgcatctttattcgtgtctaacattggcagtgaacatttcattggacttgcggggagcggcgccgctagcgggttcgctgtgggcgcttgggaattcaacgcactgttactgctgcagcttctgggatgggtgtttattcccatctatataaggagcggagtttacacaatgccagagtacctatctaaaaggtttggtggccaccgtattcaggtctacttcgcagctttgtcactcatcctgtatattttcaccaaactttccgtggatctttattccggtgctctttttatccaggagagcctgggctggaacctctacgtcagcgtcatactgctcatcggcatgacagccctcctgacagttaccggaggcctcgtggcagtgatttataccgatacgcttcaagctctgctcatgattatcggtgctctgaccttaatgatcatcagtataatggaaatcggcgggttcgaggaagtgaagcgacgatacatgttggctagccccgatgtcacgagcatccttctgacctacaacctgtctaacaccaattcctgcaatgtcagtcctaaaaaagaagccctgaaaatgctgcgcaatcctacggatgaggatgtgccgtggcccgggttcattctgggccagacaccagcatccgtatggtactggtgtgctgaccaggtgattgtccagagagtacttgcagctaaaaatattgcccatgcaaaggggagtacccttatggcaggttttctgaaactcctgcccatgttcataatcgtagttcccggtatgatttctaggattctgtttacagacgacattgcctgcataaatccagagcactgcatgctcgtttgtgggtccagggcaggctgctccaacattgcctatcccaggctggttatgaagctcgtgccagtgggcttaaggggtctgatgatggccgtgatgatcgccgcgctcatgtctgatctcgattcaattttcaactctgccagtactattttcaccctggacgtgtacaaactcatccgtaaatccgcaagtagtcgagagctgatgattgttggccggatcttcgtggcgttcatggtcgtgatctccatcgcctgggtgcctattatagtggaaatgcaaggaggacagatgtatctgtacattcaggaggtcgcagactatctcaccccccctgtcgcagccctcttcctgctggcaatcttctggaaacgatgcaacgagcagggagccttttacggcgggatggcgggctttgtgctgggggccgtccgcctcatcctggcctttgcttacagggcgccggagtgcgaccaaccagataatcgacctggatttataaaggacatccattacatgtacgtagcgacagggctgttttgggtgacaggactgatcaccgttatcgtgtcactgctgacgcctccaccaaccaaagagcagatacggaccacaactttttggagtaaaaagaacctggttgtcaaggagaactgttcccctaaagaggagccttatcagatgcaagaaaagagtattcttaggtgttccgaaaataatgaaaccattaatcacattattcccaatggtaagtcagaggacagcattaaaggcttacagcccgaagacgttaacctcctcgtcacatgccgggaagaggggaacccagtcgctagtctaggacactctgaagccgagacccccgtggatgcctattcaaatggacaggcagccctgatgggcgaaaaggaacgaaagaaggaaaccgatgatggagggcggtactggaagttcatagactggttctgcgggtttaagtctaagtccctgagcaagaggtctctgagggacctgatggaggaagaggcagtttgtcttcagatgctcgaggaaactaggcaggttaaagtgatactgaacattggactgttcgccgtgtgttcactaggcatttttatgtttgtctatttctcactctag

SEQ ID NO: 206338 - DNA, 504 bp, synthetic construct
  misc_feature 1..504: note = Description of Artificial Sequence: Synthetic coding sequence
  source 1..504: mol_type = other DNA
atggaggccggcggcttcctggacagcctgatctacggcgcctgcgttgtctttaccctggggatgtttagtgccggtctgtcggatcttaggcacatgcggatgaccaggtctgttgacaacgtgcagtttttaccattcctaacaaccgaggtgaacaacttagggtggctcagttatggagcactgaagggagatggaattctgattgtggtaaacacggttggggcagcgttacagactctgtacattctggcgtatctgcattattgccctagaaaagctaaagtgatccagacgaaatcaacccagtgcctctcgtatcctctgactatagcaacattattgactagtgccagctggtgcctctacggtttccgcctcagggacccttacattatggtaagtaactttcccggcatcgtgacaagtttcattagattctggttgttttggaaatatccccaggagcaggatcgtaactattggctgcttcagacctag

SEQ ID NO: 206339 - DNA, 501 bp, synthetic construct
  misc_feature 1..501: note = Description of Artificial Sequence: Synthetic coding sequence
  source 1..501: mol_type = other DNA
atgcggggcctgcacccctggcacgtgctgcggcggcccctgggcccacaggcacacgcaaatgacccagagtgtggtcaaaggcccgtccccgcgctgtcccaccacggatctcagcgcgtcgtgcttttgcagactgctactctgctgggggtactgcttttgggatacggatacttctggcttctggttcccaatcccgaagccaggctccagcagctgggactgttttgcagtgtctttaccataagcatgtatcttagccccctggcagatctagccaaagtgatccagaccaagtccacacagtgtctgagttaccctttaacgatcgcaacccttttgacttctgcctcctggtgcctgtatgggttcagactcagggatccatacatcatggtgtccaatttcccaggcatcgtgacctcattcattagattctggctgttttggaaataccctcaggagcaggatcgaaactattggttactgcaaacgtag

SEQ ID NO: 206340 - DNA, 666 bp, synthetic construct
  misc_feature 1..666: note = Description of Artificial Sequence: Synthetic coding sequence
  source 1..666: mol_type = other DNA
atggaggccggcggcttcctggacagcctgatctacggcgcctgcgttgtgttcaccctgggcatgttttcggccggactgagcgatctgcgacatatgcgcatgaccagatcggtcgacaatgttcagttccttccgtttctcacgaccgaggtaaataatctcgggtggctgagttacggcgcactgaagggagacggaatattaattgtggttaacactgttggcgccgccctccaaaccctgtacattctggcttacttgcattactgccccagaaagagagtcgtgctgctccagacagctacgctgctgggcgtgctgctcctaggttatggatatttttggctgctagttcctaatccagaggcaaggctgcaacaactgggactgttttgttctgtcttcaccatctctatgtacctttcaccactggctgatctggctaaggtcatccagacgaagtctacgcagtgtctgagctaccctctgaccatagcaacactcctcacttccgccagctggtgcctctatggtttccgtttgcgggacccttacattatggtctctaactttccgggcatagtgacatctttcattcgattctggctgttctggaaatacccacaggaacaggacaggaactactggttactgcagacgtag

SEQ ID NO: 206341 - DNA, 471 bp, synthetic construct
  misc_feature 1..471: note = Description of Artificial Sequence: Synthetic coding sequence
  source 1..471: mol_type = other DNA
atggaggagctgggcccccaggcccacgccaacgaccccgagtgcggacagcgtccagtgccagccctatcccaccacggtagtcaaagagtcgtgctgctacagaccgctactctgctgggcgtgctgcttcttggctatggttatttctggctgctggtgcccaaccccgaagctcgtctgcagcagttgggcctgttctgctctgtctttacaatttctatgtatctcagtccacttgccgatctcgctaaggtgattcaaactaaatcaacgcagtgcctctcataccctctgactatcgccacgttactgacatctgcgtcatggtgtctatatggattccggctgcgagacccctatataatggtgtctaattttccaggaatagtgacatcctttattaggttctggctattttggaaataccctcaggagcaggatcgaaactactggctcctgcaaacctag

SEQ ID NO: 206342 - DNA, 1929 bp, synthetic construct
  misc_feature 1..1929: note = Description of Artificial Sequence: Synthetic coding sequence
  source 1..1929: mol_type = other DNA
atggacaagctgaagtgccccagcttcttcaagtgccgggagaaggaaaaggtgtctgcgagctcagaaaattttcacgttggggaaaacgacgagaatcaggatcggggcaactggtctaaaaaatcagattacctcctcagtatgataggctacgcagtcgggttaggcaacgtgtggcgattcccatacttgacctactctaatggaggcggtgctttcctgatcccatacgctataatgcttgctttggctggattgccactgttcttcctggaatgctcacttgggcaatttgccagcttagggcctgtgtcagtgtggaggatcctccctctattccagggagtcggcataacaatggtcctcatcagcattttcgttaccatctattacaatgtgatcatagcatacagtctgtactatatgttcgcctcattccagagcgagcttccctggaagaactgcagctcatggtctgataaaaactgttctaggagtcccattgtgacccactgtaacgttagcacagtgaataagggtattcaggaaattatccagatgaacaaatcctgggtggacattaataactttacatgtatcaacggaagcgagatttaccagccgggtcagttaccatccgagcagtactggaacaaagtggcacttcagcgctccagcggtatgaacgagacaggagtgatcgtgtggtatcttgccttgtgccttcttctggcttggttgatagtgggcgccgccctcttcaagggaattaaatccagtgggaaagtggtctacttcactgccttatttccatacgtggttcttctaatactactcgtgaggggtgcaacgctggaaggagccagcaaagggatttcgtactacatcggcgcccagtccaacttcacaaagttgaaggaagctgaagtttggaaggatgccgcaacacagattttttattctctatcagtcgcctggggcggcctcgtggcactgtcaagttacaataaatttaagaataactgtttctcagatgcaatcgtggtatgcctgactaactgccttacaagcgtatttgctggattcgcgatcttttctatactcggacacatggcccatattagcggtaaagaggtgagccaggtggtcaaaagtggctttgacctggcattcatagcatacccggaggccctagctcagctgcccggcggtcccttctggtctatattgttttttttcatgctacttacactgggactggactctcagtttgcttccattgagaccataaccactaccatacaagacctcttccccaaggtaatgaagaagatgagagtgcctattacgctggggtgttgtttggtgctcttcttactcgggctggtttgcgtgacgcaggctgggatttactgggttcacctgattgaccatttctgcgcggggtggggcatactcattgcggcgattctggagttggtcggtataatctggatttacggcgggaaccgctttatcgaggacaccgagatgatgataggtgcaaagaggtggatattctggctgtggtggcgggcctgttggttcgtcatcacccctatcctcctcattgcaatctttatctggtccctggtacagtttcaccgcccaaactatggcgccatcccctatcctgactggggcgtggccttggggtggtgtatgattgtcttctgcatcatctggataccgataatggccataatcaagattattcaggccaagggaaacatttttcagcggctcatctcttgttgcagaccagcctcaaattgggggccctatctggaacagcaccggggagagaggtataaggatatggtggatcccaagaaagaggctgaccatgagattcccaccgtgtcgggctccagaaaacctgaatag

SEQ ID NO: 206343 - DNA, 1539 bp, synthetic construct
  misc_feature 1..1539: note = Description of Artificial Sequence: Synthetic coding sequence
  source 1..1539: mol_type = other DNA
atgggcgtgcagtggtggagccacacccagggcgaggtggccgtgggcctggggttgggtgactcttacctgactccttgcccctgccctggggtcggctatgccgtgattttgatagccctgtatgtgggtttctattacaatgtcattattgcatggtccctgtattaccttttcagcagcttcacactgaatctcccatggaccgactgtggacacacatggaatagccctaactgcactgaccccaagctgttgaacgggagtgtcctgggaaatcacacaaaatattccaaatacaaatttactcccgctgcagaattttatgaaagaggggtgcttcacttgcatgaatcaagcggtatccacgatatcggcctcccccagtggcaactcctgctgtgtttaatggtcgtggtcattgtgctgtatttcagcctctggaagggcgtgaaaacgtccgggaaagtggtgtggattactgccaccctcccttacttcgttctgttcgtgcttctggtgcacggtgtgaccttgccaggcgctagtaacggtatcaacgcgtacttacacatcgatttttaccgcctgaaagaggcaacggtgtggatcgatgccgcaacgcagattttctttagcctcggggcagggttcggggtgctaatagcctttgcatcttataacaaattcgacaacaattgctatagggacgcacttctgacatccagcattaattgtattacatcgtttgtatccggattcgctattttctctattcttggctacatggcgcatgagcacaaggtcaacatagaagacgtagccaccgaaggagcaggtctggtgtttatcctgtatccagaagccattagcacgctttccggaagtacattttgggctgtggttttcttcgtgatgctgctggcactgggtctcgactctagcatgggtggcatggaagcggttattaccggccttgccgacgacttccaggtattgaaaagacatcggaagcttttcacctttggagtaacgttcagcacctttctgctcgccctcttttgcattactaaagggggaatctacgtgctgacgctgttggatacgttcgccgctggtacgtcgatcctgtttgcggtccttatggaggccataggcgtgagttggttctacggtgtggatcgctttagcaacgacattcagcagatgatgggcttcaggccgggtctttattggcgcctatgctggaagttcgtgagccccgcctttcttttgttcgtcgtggtggtgtctattatcaacttcaagccactgacatacgatgactacattttccccccgtgggccaattgggtcgggtggggcatagccctgtcttcgatggtactcgtgccaatctacgtgatttataagtttctctctacacaaggaagcttgtgggagcgacttgcttatggaatcaccccggagaatgagcatcatctggtagcccagagagatatccggcagttccagctgcagcactggctggccatctag

SEQ ID NO: 206344 - DNA, 1845 bp, synthetic construct
  misc_feature 1..1845: note = Description of Artificial Sequence: Synthetic coding sequence
  source 1..1845: mol_type = other DNA
atggacggcaaggtggccgtgcaggagtgcggcccccccgccgtgtcctgggtccccgaagaaggggaaaagttagaccaagaggatgaggatcaggtcaaggaccgggggcagtggaccaataaaatggagtttgtactctctgtggccggagaaatcattggactgggtaatgtgtggcgctttccctatctgtgttacaaaaatggcggcggggccttcttcattccttactttattttcttcttcgtgtgcggcatcccagtcttcttcctcgaggttgccctggggcagtatacctcccaagggtcagtgacagcctggcgtaagatttgtccgctttttcagggtatagggctcgcctcagtcgtcatagagtcatacctaaacgtatattacattatcatcttggcatgggctcttttctatttgttttctagcttcacctccgaacttccatggaccacatgcaacaatttttggaatacagagcattgcacagactttctgaatcatagtggagcgggaactgtgacaccattcgagaactttacctcaccagtaatggagttttgggagcgacgcgtgttaggcatcacctccggcatacacgatctcggcagcctgcggtgggagttggctctctgcctgttactggcctgggtgatatgttacttctgtatctggaaaggcgttaagtccactggaaaggtggtctattttacagcaactttcccttacttgatgctagtgattctgttgatccgaggcgtcactctgcccggggcttaccagggaattatatattacctgaaacctgacctgttccgcctgaaggatccgcaggtctggatggatgccggcacccagatatttttttcttttgcgatctgtcaaggctgtttgaccgccctgggaagctataataagtatcacaacaactgttacaaggattgcatcgctctgtgctttctgaattcagccacttcttttgtggcaggatttgtagtattttctatcctgggattcatgtcacaagagcagggggtgcctattagtgaagttgcggagagcggcccagggctcgcctttatagcgttccccaaggctgtgaccatgatgcccttgagccagctttggtcttgtctgttttttattatgctcatatttctgggcctcgatagccagtttgtctgcgtagagtgtctggtaactgcaagcattgatatgtttccgaggcagctgaggaaatctggacgaagagagctgctgatcctgactattgcagtgatgtgttatttaattggtctgtttcttgtcactgaaggaggtatgtatattttccagttgtttgattattacgcctcctccgggatctgcttactatttctaagtttgttcgaagtcgtgtgtatatcttgggtctatggggcagaccggttctatgataatatagaagacatgattggctaccggccctggcccctcgtgaaaataagctggctctttctcacaccaggattatgtctggcaacattcctgttctcactgagtaagtatacgcccctgaagtataataatgtgtatgtgtatcctccctggggctattcaatcggttggtttttggccttatcctccatggtgtgtgtccctctttttgtggtgattacccttctcaagaccagaggtcccttccgaaagcggctgcgccagctcatcacaccagactcatcccttcctcagcctaagcagcacccctgcctagatgggtctgccggccgaaactttggaccatcacctactagagaaggtctgattgctggagaaaaggaaacacatctgtag

SEQ ID NO: 206345 - DNA, 1845 bp, synthetic construct
  misc_feature 1..1845: note = Description of Artificial Sequence: Synthetic coding sequence
  source 1..1845: mol_type = other DNA
atggacggcaaggtggccgtgcaggagtgcggcccccccgccgtgagttgggtccctgaggagggagagaaactcgatcaggaagacgaagaccaggtgaaggatcgcggacagtggactaacaagatggagttcgtattgtctgtcgccggagaaatcataggactcggtaacgtgtggcggttcccctacctctgctacaagaacggcggcggggcattcttcatcccatacttcatctttttcttcgtgtgtggcatccccgtgttcttcctagaggttgcgttagggcaatacacctctcagggttccgtcaccgcctggcggaagatctgtccactattccagggcatagggttggcgtcggtggttattgaaagctacctcaacgtgtactatatcattattttagcctgggctctcttctacttattctccagctttacaagcgagttaccgtggactacatgcaacaatttttggaatactgaacactgtacggatttcctgaaccattcgggcgctggcacagttactccatttgaaaacttcacctcaccagtgatggagttctgggagagacgggtccttgggatcacatccggtatccacgatctgggctctttgcggtgggaactggctctttgtctgctgctagcttgggtgatttgctacttttgcatttggaaaggggtcaagagcactggcaaggtggtctacttcactgcgacattcccctatctgatgttagttatcctactgatcagaggcgtgaccttaccaggagcataccagggaattatatattatctcaagccggaccttttccggctgaaggatccacaggtatggatggatgccggtacccaaatattcttcagctttgcaatctgccagggatgtcttaccgctctcggctcttacaataaataccataacaattgttacaaggattgcatcgccctttgcttccttaactccgccactagcttcgtcgctggtttcgtggtgttttccatcctcgggtttatgtcacaggaacagggagttccaataagcgaagtagccgaatccgggcctggcttagccttcatcgccttcccaaaggcagtgactatgatgccgctctcacaactgtggtcatgcctgtttttcatcatgttgattttcctgggcctcgacagccagtttgtctgcgtcgagtgcctggtcacggctagtattgacatgttcccacgccagctgagaaaatcgggtcgacgcgagctgctcatcttgactatcgcagtcatgtgctacttgattggactgtttctggtaacggagggcggcatgtacatattccagctttttgattattatgcttctagcggcatttgcctactgtttttgagcctgtttgaggttgtctgcataagttgggtttatggggctgaccgcttctatgacaatattgaagacatgatcggatacaggccgtggccactggtaaagattagttggctatttttaactccaggtctgtgcctcgctacatttttgttcagtcttagtaagtatacacccctaaaatataataacgtctatgtttatcccccgtggggatattcgataggatggtttctcgctttgtcctccatggtctgtgtgccactcttcgtggtcatcacactgttaaaaacccgcggacccttcaggaaacggctgcgacagctgatcacccccgatagcagcctcccccagcctaagcaacatccctgtcttgacggctctgctggtcgcaacttcggcccgagccctactcgggagggcctaattgccggcgagaaggaaacgcatttgtag

SEQ ID NO: 206346 - DNA, 1845 bp, synthetic construct
  misc_feature 1..1845: note = Description of Artificial Sequence: Synthetic coding sequence
  source 1..1845: mol_type = other DNA
atggacggcaaggtggccgtgcaggagtgcggcccccccgccgtgtcctgggtgccagaggagggggaaaagctcgaccaggaggatgaggatcaggttaaggatcgcggacagtggacaaacaaaatggagttcgtcctcagcgtggctggcgaaattattggactcggtaatgtatggcgctttccttatctctgctacaagaatggcgggggagctttctttattccctatttcatctttttcttcgtctgcgggattcctgtgttttttctcgaggttgccttggggcagtacacgagccagggcagtgttaccgcttggcgcaaaatctgtcctttgtttcagggtatcggcctcgcctccgtggtcatcgagtcctatcttaacgtgtattatatcatcatccttgcctgggcccttttttacttgttcagtagttttacttcagagctgccttggacaacctgtaataacttctggaataccgagcactgtacagattttctgaaccattccggtgctgggactgttaccccatttgaaaacttcacatcccccgtgatggaattctgggagcgacgtgtactgggtatcacttcaggcatccatgatctgggctccctcagatgggagttggcattatgcctcctgctggcatgggtcatctgctacttctgcatctggaagggggtaaaatctactggcaaggtcgtgtattttaccgcaactttcccctacctgatgctggtgatccttcttatccgcggggtaacactacctggggcttatcagggtatcatttattatttgaagcctgacttgttccgcttgaaagatccacaggtttggatggacgctgggacccagatctttttctcttttgccatttgccagggctgtctgaccgccctcgggagttacaacaaataccacaataactgttacaaggattgcatcgccctgtgtttcctgaattctgccaccagttttgtggcgggctttgtcgtgttcagtatcttgggctttatgagtcaggagcagggcgtccctatctctgaggtcgccgaatctggccctgggctggcttttattgccttccctaaagcagtcacaatgatgccgctgtcccagctctggtcttgccttttcttcattatgttgatattcctcggtctggattctcagtttgtttgcgtcgagtgcctggtgacagcttccatagatatgtttccccgccaactgagaaaatcaggcagacgcgaactgttaatactgacaatcgccgtgatgtgctatctcatcggcctgttccttgtgacagagggtggaatgtatattttccagctcttcgattattacgcatcctctggtatttgtctcctgtttctttcactgtttgaggttgtttgcatcagctgggtttacggcgctgatagattctacgacaacatagaagacatgatcgggtaccgcccatggccattggtgaaaatatcttggctgtttcttacacccggtctctgtctcgccacttttctgttttctttgtctaagtacacccccttaaaatacaacaacgtgtacgtgtatccaccatggggttattccatcggatggttcttggccctgtcaagcatggtgtgtgtgcccctattcgttgtgatcacactgcttaagactcgcgggccttttcggaagcgcctgagacaactcataacgccagattcctcactgccacagcccaaacagcatccctgcttggacggatctgcaggaaggaattttggaccttcacccactagagaagggcttatcgccggcgaaaaggagacccatctgtag

SEQ ID NO: 206347 - DNA, 1845 bp, synthetic construct
  misc_feature 1..1845: note = Description of Artificial Sequence: Synthetic coding sequence
  source 1..1845: mol_type = other DNA
atggacggcaaggtggccgtgcaggagtgcggcccccccgccgtgagctgggtgcccgaggagggagaaaagctggaccaggaggatgaggaccaggtaaaagatcgggggcagtggaccaataagatggagtttgtgctgtctgtcgcaggggagatcatcggacttggtaatgtttggaggtttccctatttgtgttacaagaatggcggaggcgccttcttcatcccctatttcatcttcttcttcgtctgtggcatacctgtatttttcttggaggtggcgctgggacaatatacctctcaggggagtgttacagcttggaggaaaatttgcccactctttcagggtatcgggctggctagcgtggtgatcgaatcttacctcaacgtatactatatcattatcctggcctgggctttgttttacttattttccagttttaccagcgaactcccttggacaacatgcaacaatttctggaacaccgagcactgcacagatttcctgaaccactcaggggctggaaccgtgactccattcgaaaacttcacatcgcccgtgatggagttctgggaaagaagggtgttggggattacaagtgggatccacgatttaggctccctgagatgggaacttgctttatgcctgctcctggcctgggtcatctgttacttttgtatatggaaaggggtgaaaagcactgggaaagttgtgtatttcaccgcgacctttccttacctgatgttggtgattctgcttattagaggcgtgaccctacccggagcctatcaggggatcatatactacctgaaacctgacttgtttcgacttaaggaccctcaggtttggatggatgccggcacccagatcttcttctcctttgcaatctgtcagggctgcttaaccgccctcggctcatacaataaataccataacaactgctataaggattgtatcgcactttgcttcctaaattcagcaacttccttcgtggctgggttcgtggtgttctctatcctgggatttatgtcccaggagcagggggtgcccatctcagaggtcgcggagtccggacctgggctagcgttcattgcttttccgaaggccgtgacgatgatgccactgtcccagctctggtcttgtctgttttttatcatgctgatctttctcggcctggattcacagtttgtgtgcgtcgagtgcctggtaaccgcgagcatcgacatgttcccacgccagctccgaaagtccgggcgtcgtgaactgttgatactgacaattgccgtcatgtgttatctgattgggctttttttggttacagaggggggcatgtatatctttcagttgtttgattattacgccagcagtggaatttgtctactcttcctgagcctctttgaggtagtgtgtatttcttgggtttacggcgccgatcgcttttacgataatatcgaggatatgattggttacaggccctggcccctggtgaagatctcttggctgtttctcacacctggcctttgtttggctacatttttgtttagcctatctaaatacactccactgaaatataataacgtgtatgtgtaccctccctggggctacagcatcggctggtttcttgcgctgtccagcatggtgtgtgtgcctctgtttgtcgtcatcaccttactgaagacaagaggacccttccgaaagagactgcgtcagctgataacccctgacagctcgctgcctcagccaaagcagcacccatgccttgacggctcagccggtagaaattttggcccttccccaacacgggaggggctcatagctggcgaaaaagaaactcacctctag

SEQ ID NO: 206348 - DNA, 1845 bp, synthetic construct
  misc_feature 1..1845: note = Description of Artificial Sequence: Synthetic coding sequence
  source 1..1845: mol_type = other DNA
atggacggcaaggtggccgtgcaggagtgcggcccccccgccgtgtcctgggtccccgaggaaggagagaaactggatcaggaagatgaggaccaagtgaaagatagagggcagtggacaaataaaatggaattcgtgctgtccgtcgcaggggagatcatcggtctgggtaacgtgtggcgcttcccatacctctgttacaagaacggaggaggtgccttctttatcccttacttcattttctttttcgtttgcggaattcccgtctttttcctagaagtcgctctgggccagtacacaagccaaggatccgtgaccgcttggcgtaaaatatgtcctctcttccaaggcattgggttggcaagtgtcgttatcgagagctatttgaatgtgtactacattatcatcctagcttgggccttattttacctgttctcctccttcacctccgagctcccttggaccacgtgtaacaacttttggaacaccgaacattgtactgacttcttgaaccattccggtgcagggaccgtgaccccctttgagaatttcaccagcccagtgatggaattctgggagcgcagagtcctgggcataacatccggcatccatgacctgggcagtctgagatgggaactggccctctgcctcttgctggcctgggtaatttgctatttttgcatttggaagggagttaagtcaaccggcaaagttgtgtattttactgctacttttccatacctcatgctggtgatactactgatccgaggagtgacacttcccggggcttatcaggggattatctattatcttaagcccgatctttttcgcctgaaagacccccaggtgtggatggacgctgggacccagatattcttctcttttgctatctgccagggctgtctgactgccctgggatcatacaacaagtatcacaataattgctacaaggactgcatcgccttatgtttcttgaactcggccacctcttttgtggcgggctttgtcgtgtttagtatcctaggatttatgtcgcaagaacagggcgtacccatttccgaagtggcagagtctgggccaggtctggctttcattgccttccccaaagccgtgaccatgatgcctctgagccagctgtggagctgcctttttttcataatgcttattttcctgggtttggattctcaattcgtgtgtgtggaatgcctggtgactgcgtccatcgatatgtttccacgccaactgaggaagagcgggcggcgtgaactcctgattctcactatcgcagtgatgtgctatctgatcggtctattcctggttacagagggaggcatgtacatcttccagctctttgattattacgcctcatctggtatttgtttgctgtttctcagccttttcgaagtggtttgtatttcatgggtgtacggagccgaccgcttctacgacaatatcgaggatatgataggttaccggccctggccactcgttaagatttcatggctgttcctgactcctggtctgtgtctggccacattcctcttctccttgagtaagtacacccctttaaaatacaacaatgtctacgtgtatccgccgtggggatactcgatcgggtggttcttagcattatcttctatggtatgcgtgccactgttcgtggtgattacactgctcaaaactcgcggcccttttcggaaacgtctgagacagctgatcacacccgactcaagccttccacagccaaagcagcacccatgtttagacgggagcgccgggaggaattttggaccctcacccacacgggagggcctgatagcaggagaaaaagagacccatctgtag

SEQ ID NO: 206349 - DNA, 441 bp, synthetic construct
  misc_feature 1..441: note = Description of Artificial Sequence: Synthetic coding sequence
  source 1..441: mol_type = other DNA
atggacggcaaggtggccgtgcaggagtgcggcccccccgccgtgtcttgggtgccagaggaaggagagaaattggatcaagaggacgaggaccaggtcaaggatcggggacagtggaccaataaaatggaattcgtgctcagtgttgccggggagattattgggttagggaatgtctggaggtttccttacctgtgttacaaaaatggcggcggagcattctttattccgtatttcatctttttctttgtctgtgggatccccgtcttctttctggaagtggccctaggccagtatacttcccagggctccgtgaccgcctggagaaaaatctgcccactctttcaagggattggcctggcgtctgtggttattgagtcctatctgaacgtgtactacattattatcttggcttgggctcttttttatttatttagctag

SEQ ID NO: 206350 - DNA, 1908 bp, synthetic construct
  misc_feature 1..1908: note = Description of Artificial Sequence: Synthetic coding sequence
  source 1..1908: mol_type = other DNA
atggccaagaagagcgccgagaacggcatctacagcgtgagcggcgacgagaagaaaggcccgcttatcgccccggggccggacggagcccctgccaaaggggacggccctgtgggtctcgggactcccggagggagactggctgtgccaccgcgcgagacatggacgcgccagatggactttattatgagttgcgttggctttgccgtaggcctggggaacgtctggcgcttcccgtacctatgctacaagaacggtgggggggtttttctgatcccctatgtactaatcgccctggtgggcggcattccaatctttttcctggaaatcagcttgggacaatttatgaaggctggttcaatcaacgtgtggaatatttgtcccctcttcaaaggactgggttacgcttctatggtaatcgtgttttattgcaatacctactacatcatggtgctggcctggggattctattacctggtaaaatccttcacaacaacgctcccttgggccacttgtgggcacacctggaacactcctgattgcgtagagatttttaggcacgaggactgtgcgaacgcaagtttggctaatctgacctgcgatcagcttgcagatagacgcagcccagtaattgaattttgggaaaataaagtcttgcgccttagcggaggactggaagtacccggagccctcaactgggaagtgaccctctgtctgcttgcctgttgggtgctggtttacttttgtgtgtggaagggagtgaaatcaacaggaaagattgtctacttcaccgccactttcccttacgtcgtgctggtagtgctgttagtgaggggcgtgctcctgcctggcgcactggacggtataatttactacctcaagccagattggtcaaagctgggcagtccacaggtctggattgacgcagggactcagatctttttcagctacgcgattgggctgggtgccctcacagcgctcggatcatataataggtttaataataactgttacaaggacgccatcatcctcgcccttatcaacagcgggactagctttttcgccggattcgttgttttttctatattgggcttcatggccgctgagcagggcgtccatatttccaaggtggccgagtccggtcccggtttagccttcattgcttaccctagggcagtgaccctgatgcccgttgcaccgctctgggcagcgctctttttctttatgctgctgctcctgggcctggacagtcaatttgtaggagtagagggtttcataaccgggctgctcgatctcctgccagcatcatattattttcgatttcaaagggaaatcagcgttgctttgtgctgcgccctgtgctttgtaatcgatctctccatggtcaccgatggtggaatgtacgtgttccagctattcgattattattctgcatccggcacaactctactctggcaggccttttgggaatgtgtggtggtcgcttgggtgtacggcgcagatcgcttcatggatgacattgcgtgcatgattggatatagaccctgcccttggatgaagtggtgctggtccttctttactccgctagtgtgtatgggcattttcatttttaacgtcgtgtattacgaacctctggtatacaataacacatatgtgtacccctggtggggagaggcaatgggatgggcctttgccttaagttctatgctttgtgtgccattacacctgctgggatgtctcctccgcgccaagggaacaatggctgagcgctggcagcatcttacccagcctatttggggactgcatcatctggaatatcgagctcaggacgccgatgtgagaggactgaccaccctgacccccgtgtcagagtcctcaaaggtggtcgtcgtcgagagcgtaatgtag

SEQ ID NO: 206351 - DNA, 2190 bp, synthetic construct
  misc_feature 1..2190: note = Description of Artificial Sequence: Synthetic coding sequence
  source 1..2190: mol_type = other DNA
atgctgcccaccctgcagatccagggccccgccgccttcgcccccggtgatcggggtccagggcggcattgcccctttcccgtgcctatcaccccaaccggagccctgctgccagtgagcgacagttgcgactcgctcgttgacctagtctggccctctgtcacatacttagcactgggcacccagtccagggtgtggccacaccctttgggggctcctggccaggccggcgaaagcccagagcagcggcgccaatgcctggaactctgggacatggcctctagtttgggtgacaaagtgccaagagcagcatgtggcaagcggggacagactgtgtggcagctgcatctggcctgcctctgtctggcacaatttcacagtcctccggcccagcctcctccattgtcgagacgtgggggtgggcccgatcccgatcccatttcacgctcactccccgggccaccaacccctgccctgcccacccactcatacagctcacattcaccgagggctccacgcctgctttcacccctcaggcgggcgccaagaggctcacccgctccccaccgtcacgcctccctgcagaccaatgaagcccccagagagttgccccattgcacatggcccggcttacccggacggagcttagccccctctttcctgtggagggagccgtggcttggtggacagtggggcccacttaacatcccagcccgaaagggcgacaggcgtaggtgggagtggggctgcgagggtggaggcgcaacagcaagtgctgagcagccggggccccagatagtctactttactgcgacttttccttacgtagtcctggttgtgctgctagtcagaggtgtcttgctccctggagcattggatggaatcatttattatttaaaacctgattggagtaaattggggagcccacaggtgtggatcgatgctgggacgcagatcttcttctcctacgcaataggattgggggctctgacagccctgggatcttacaatcgcttcaacaataactgttataaagatgccatcattctcgcgctgattaatagtggcacttcgttctttgctgggttcgtagtgttttcgatcttaggatttatggctgctgagcagggcgttcatatttcaaaagtcgctgagagcggccccggtcttgcttttatcgcctaccctcgcgcagtgaccctgatgccggtcgcacctctttgggcggcacttttcttttttatgcttcttctcttaggcctggacagtcaggtgtgcatgggcttgtgggaccgcgagccaggtggagggagaagggaggggtgtcggcagggaaagggatggcggcgttgtggggctcgacccgagctcccctggccccagttcgtgggagtcgaggggttcattaccggcctcttggacttgctccccgcctcctactatttcagatttcaacgggaaatcagtgtcgcattatgttgtgccctttgtttcgtgattgatttgtccatggtgaccgacgttagtggcgtgggcggcttgccggtcacctccggaggcagactgccttcttctctcacaggactgtgcccacaagggggtatgtatgtcttccaacttttcgactactacagtgcttccggcaccactctgttatggcaggctttctgggagtgtgtagtcgtggcctgggtgtatggcagatcatggctccgcgccgggctgggtgatgggggcggcgagggcaggtcccccgcttggcctgctagtccacggggggcagacaggtttatggatgatatagcctgtatgattggttaccgaccttgtccttggatgaagtggtgttggagtttttttacacctctcgtttgcatgggcatctttattttcaatgtggtgtattacgaaccactcgtttacaacaatacatatgtttacccgtggtggggcgaagccatgggctgggcctttgctctttcttccatgctgtgcgtgcctctccatctgctcggatgtctcttgcgggccaagggtacgatggccgagcgctggcagcatctcacccagccaatctggggactgcaccatctggaatacagagcacaggatgcagacgtacggggacttaccactctgaccccagtaagcgagtcaagcaaggtcgtagttgtcgagtctgtcatgtag

SEQ ID NO: 206352 - DNA, 471 bp, synthetic construct
  misc_feature 1..471: note = Description of Artificial Sequence: Synthetic coding sequence
  source 1..471: mol_type = other DNA
ctgctgcacagccccacctggagctggagctgctgctggtgcgtggaatgctgttgcctcgctccatggatggcctcttttactattagctcactgactggtcagtcatggggccccctgtctcccggccagctgcagcctctgcagcagcagttgctgcaatgggaccagctcctgtgttggttgcggggcctgttgcatcctggtcttcacggatgtagagcgggccgtgcgcacctccagggcggacgtgttagggagatttcagttgctttgtgttgcgctctttgtttcgtcatcgatctgtccatggtgacagacggaggaatgtatgttttccaactgttcgactactattctgctagcggtactacgttactgtggcaggcgttttgggagtgcgtggtcgtggcgtgggtgtatggtgcggacagatttatggatgacattgcatgtatgatcggatattag

SEQ ID NO: 206353 - DNA, 339 bp, synthetic construct
  misc_feature 1..339: note = Description of Artificial Sequence: Synthetic coding sequence
  source 1..339: mol_type = other DNA
tgattccggcacgaggactgcgccaacgccagcctggccaacctgacatgcgatcagctggcggacagaaggtcacccgtgatcgagttctgggaaaacaaagttctgaggctatctggaggcctggaggtgcctggggctctgaactgggaagttaccttgtgcctgcttgcctgttgggtactcgtgtatttttgcgtctggaaaggagtcaagtctaccgggaaagtgccattagaagcctgttcgggcgaaggaggcagcgctctcggtgccggctgtctttgtcaagcacatctgtggcagcgtgaagttacaagacagtctctagcgttgtag

SEQ ID NO: 206354 - DNA, 1563 bp, synthetic construct
  misc_feature 1..1563: note = Description of Artificial Sequence: Synthetic coding sequence
  source 1..1563: mol_type = other DNA
atgaaggccggcagcatcaacgtgtggaacatctgccccctgttcaagggtctgggttatgcatctatggtgatcgtattctattgcaatacatactacatcatggtgctggcgtggggtttctattacttggtgaagtccttcacaacaacattaccttgggccacctgtgggcatacttggaacaccccagactgcgtggagattttcagacacgaggactgcgcaaatgcttcactggccaatctgacctgtgaccaactggccgatcgtagatccccagtcatcgagttttgggagaataaagtgctccggctgagcggtggcctagaggttcctggtgctctgaattgggaagtgaccctgtgtctgcttgcttgctgggtcttagtgtacttctgtgtgtggaaaggggtgaagagtacaggcaagattgtatattttacagccactttcccgtatgtggttttggtggtgttgctcgtgcgtggggtcctactgccgggggcactggacgggataatctactacctgaagcccgactggtccaagctggggtcaccacaagtgtggatagatgcgggcactcagattttttttagctacgcaataggcttgggagcactgaccgccctcgggtcctataaccgattcaacaataattgttataaggacgctataatcctggcactcataaatagcggcacatctttcttcgcaggctttgttgtgttcagcatcctgggcttcatggccgcggagcaaggtgtgcacatttctaaggttgctgagtccggccccggcctcgctttcattgcgtaccctcgagcagtcactctgatgccagtcgccccgttatgggccgcactgtttttcttcatgctcctgctgctcggactggatagccagtttgtgggagtcgaaggttttatcactggactccttgacctgcttccagcaagttattatttccggttccagcgggaaatctctgtggcgctatgctgtgccttatgctttgtcatcgatcttagcatggtaacggacggcggaatgtatgtatttcagttattcgattactactccgcgagtggtacaacattgctgtggcaagccttttgggagtgtgtcgttgtggcctgggtgtatggcgccgatcgctttatggacgacattgcatgcatgatcggataccgcccatgtccttggatgaaatggtgttggagcttcttcacccccttggtgtgcatgggcattttcatcttcaacgtcgtttactacgaaccgctggtttacaataacacctacgtctacccatggtggggagaggccatgggttgggcctttgcactgtcttccatgctgtgcgtacctctccaccttctggggtgtttgcttagagccaaaggaaccatggctgagcgttggcagcatcttacgcaacccatttgggggcttcatcacctggagtatagagctcaggatgctgacgtgagaggacttaccactctcacccctgtgagtgaaagtagcaaagtcgtagtggtcgagagcgtgatgtag

SEQ ID NO: 206355 - DNA, 525 bp, synthetic construct
  misc_feature 1..525: note = Description of Artificial Sequence: Synthetic coding sequence
  source 1..525: mol_type = other DNA
tgaatcgacgccggcacccagatcttcttcagctacgccatcggcctaggcgcacttactgctctgggttcatataatagattcaacaacaactgctacaatgggacctctttctttgccggattcgtggtgttcagcattcttgggtttatggcagccgaacagggagtacacatcagtaaggtggccgagtctggccccgggctggcattcattgcctaccctagggctgtcacgctcatgcctgtcgcgccactgtgggctgccttgtttttcttcatgttactgcttctcgggctggactcccagttcgtgggtgtagaggggttcattacgggacttttggatctgctgccggcctcatactacttcaggttccagagggagattagtgtggctctttgttgtgccctctgcttcgtgattgatctgagcatggtcacagacggaggcatgtacgttttccagttgttcgactactatagtgcgtctgggaccactcttctgtggcaggctttttggtag

SEQ ID NO: 206356 - DNA, 270 bp, synthetic construct
  misc_feature 1..270: note = Description of Artificial Sequence: Synthetic coding sequence
  source 1..270: mol_type = other DNA
ggccggcaccaccccggcagccaccagcagtgggaccagctgctgtgctggctgagaggtttgctccatcccggtttgcatgggtgtcgtgccggtagggcgcaccttcagggagggcgcgttagggctggacccggtctgcatcgactgccagctggctgtcacgccgacgctagtggacctaccctaggatgccctgtgttactccatgcagtagccgcttggtcccgtcagccgggcgtggaaggctttattacagggttactttag

SEQ ID NO: 206357 - DNA, 1863 bp, synthetic construct
  misc_feature 1..1863: note = Description of Artificial Sequence: Synthetic coding sequence
  source 1..1863: mol_type = other DNA
atgagcaagagcaagtgcagcgtgggcctgatgagcagcgtggtggctcccgctaaggaaccaaacgccgttggtcccaaagaggttgaacttatcttagttaaggagcagaacggggtgcagttgacaagctccaccctcactaatcccaggcagagccccgtggaggcccaggacagggaaacatggggcaaaaaaatcgacttccttctgtcagtcatcggatttgcggtcgatctggccaacgtgtggagatttccatacctttgctacaagaatggagggggagctttcctggtgccctacctgctgttcatggtgattgcagggatgccgttgttttacatggagctggctctaggtcagtttaatagggagggcgctgccggcgtatggaaaatctgccctattctgaagggagtggggttcacagtgattttgatctcactgtacgtcggctttttctacaacgtaattatagcctgggcgctgcactatctcttctcttcttttaccacggagctcccctggatccactgtaataactcttggaacagccccaactgttctgacgcgcacccaggagacagctctggggacagtagcggactcaacgatacattcggaacgaccccagccgctgagtattttgagcggggagtccttcacctccaccaatcacacggaattgacgacctcggccccccccgctggcaattaactgcatgcctcgtgctcgtgatcgtgctgctctatttctcactgtggaaaggcgttaagaccagtggaaaggtggtgtggatcacggccaccatgccttacgtcgtcctgacggcattacttctgagaggcgtaaccctccccggagccatcgacgggatccgcgcctatttatcagttgacttctatcggctctgcgaagcaagcgtctggatagatgctgcaacgcaggtgtgtttctccctcggcgtgggatttggagtgctgatcgccttttcctcgtataataaattcacgaacaattgctacagagacgcaatagttacaacaagcatcaacagcctgactagtttcagcagtggattcgtggtctttagtttccttggctacatggctcagaagcatagtgtgcccatcggcgatgtggctaaagacggacctgggctcattttcattatctatcccgaggcaatcgccacactgcctctcagctcagcttgggctgtcgtattcttcattatgctgctgacgctgggcatagattccgccatgggcgggatggagtccgtgattacaggcctgatcgacgaattccagttactccatagacatagagaactgtttactttgttcattgttctggctacatttttattgtctctgttctgcgtcaccaacgggggtatctacgtcttcaccttgctcgaccacttcgcagctgggacaagcatattattcggggtgctcattgaagctattggggtcgcctggttctatggcgtcgggcagttctctgacgacattcagcagatgacggggcagcgcccgtccctgtactggagactatgttggaagctggtttcaccttgttttcttttgtttgtcgtagtggtgtctatcgtaacattcaggcctccacactacggggcatatatcttccctgattgggctaacgctctgggatgggtgattgccacatcaagcatggcaatggtgcctatatatgccgcctataaattctgtagtttgcctggttcctttagggaaaaacttgcctatgccatagcaccggaaaaggacagggaattggtggaccggggggaggtccgtcaattcaccctgagacattggttaaaggtgtag

SEQ ID NO: 206358 - DNA, 1863 bp, synthetic construct
  misc_feature 1..1863: note = Description of Artificial Sequence: Synthetic coding sequence
  source 1..1863: mol_type = other DNA
atgagcaagagcaagtgcagcgtgggcctgatgagcagcgtggtggcacctgccaaagagccgaacgccgtgggcccaaaagaagtggagctgatactggtgaaggaacagaatggggtccaacttactagttccacccttactaatcctcgccagagtcccgtggaggcacaagatagagagacttggggaaaaaaaattgacttcttactgtccgtaatcggatttgccgtggacctcgcaaatgtatggaggtttccttacctgtgctataagaacggcggtggcgcgtttttggtcccttatctgctctttatggtcatcgccgggatgcctttgttctacatggaactcgcattaggacagttcaatagggagggagcagcgggtgtctggaaaatctgcccaattctaaagggagtcggctttactgtgattctgatcagtctgtacgttggttttttctacaatgtcatcattgcgtgggcactccattatctcttctcatcatttaccacagaactcccatggattcactgcaataacagttggaactctcccaattgctcagatgcccatcctggggattcttctggcgattcttcgggtctgaacgatactttcggaaccacaccagctgcagagtattttgaaagaggagttctacacctgcaccagtcccatgggattgatgacctaggccccccacggtggcagctaaccgcatgcctggtcctggtcattgttctgctgtacttctccctgtggaagggggtgaagacatccggaaaagtagtctggatcactgctactatgccatatgtggtgttaaccgccctgttgctgcgaggggtgacactacctggagcaatcgacggtattcgggcatatctctcagtcgatttctaccgactttgtgaagcgagcgtctggattgatgccgcaactcaggtgtgttttagtctgggcgttgggtttggggtgctcatagctttttcctcatataacaagttcactaataattgttatcgcgacgcaatagtgactaccagcatcaacagcctgacaagcttctcgagtggcttcgtcgtcttttcttttctggggtatatggcccagaaacattcagtgcctatcggagacgtggccaaggatggtccggggctaattttcattatctacccagaggcgatcgccactttacccctcagcagcgcctgggccgttgttttctttatcatgctgttaaccctcggaattgacagtgcgatgggtggcatggaaagcgtaatcacggggctgattgacgaattccagttgctgcacagacaccgggaactgttcacacttttcatcgtactggccacctttctgctttcgctattttgcgtgactaacggtggcatttatgtgtttacactcttagatcactttgctgccgggacttcaatcctctttggtgtattaattgaggcaatcggtgtcgcttggttctatggtgtgggccagttctccgacgacattcagcagatgaccggacaaagacctagcctgtattggcgtctgtgctggaagcttgtaagcccctgctttctgctgttcgtggttgtggtgtccatcgtcacatttaggccgccacattacggcgcctacatctttcccgattgggccaacgcactgggatgggttatcgccacttccagcatggctatggtgccaatctatgctgcatataagttttgttccttgcccggcagttttcgcgagaaattggcatatgcaatcgccccagagaaggacagagagctggtcgaccggggcgaagtgaggcagtttaccctcaggcattggctgaaagtatag

SEQ ID NO: 206359 - DNA, 1800 bp, synthetic construct
  misc_feature 1..1800: note = Description of Artificial Sequence: Synthetic coding sequence
  source 1..1800: mol_type = other DNA
atggccaccaacggcagcaaggtggccgacggccagatcagcaccgaggtgtctgaagcgcccgtggcaaacgacaagcctaagactctggtcgttaaagtacagaagaaagctgctgacctccctgaccgagacacgtggaaagggcgctttgatttcctgatgagttgcgttggatacgcaatcggactcggcaacgtgtggaggttcccgtatctgtgtggaaagaatgggggtggagccttcctgatcccttacttcctcacactcatcttcgctggagttcccctctttctgttggaatgttccctgggccagtacacctccattggaggactcggcgtttggaagctcgctcctatgtttaagggagtcggcctggcagctgcagtgctgagtttttggctgaacatatattacatcgtcatcatttcttgggccatatactatttgtacaacagcttcacaaccacgctgccctggaagcagtgtgacaacccatggaacaccgatagatgtttttccaactatagtatggttaatactactaatatgacctcagccgtggtcgaattctgggagagaaacatgcaccagatgactgatggtctggataagccgggccagattcggtggcctttggctatcactctagcaatcgcctggatcctcgtctatttctgtatttggaagggagtgggttggaccggaaaagtggtttacttcagcgcaacctacccttacattatgttaatcatactgtttttccggggagtgactctcccaggagccaaagaaggaattctgttttatatcacaccaaacttccggaagctgtccgacagcgaggtctggctggacgccgccacccagatctttttttcatacggcctgggcctcggaagtctgattgcactgggtagctacaactcctttcacaacaacgtgtaccgggactccatcatcgtgtgttgtattaacagttgtacaagtatgttcgctgggttcgtgatcttttcaatagtgggattcatggctcacgttaccaagaggtccatagcagacgttgctgctagcggtcccggcttggcttttcttgcttacccagaagcagtgactcagctgcctattagtccgctgtgggcaatcctattcttttcaatgttgctgatgctgggaatcgatagccagttttgcaccgtcgaaggctttatcactgcccttgtggatgagtatcctagacttttgcggaacagacgtgaattatttattgcagcagtgtgcatcattagctatctgattggattgagcaatatcactcagggcggcatctatgtctttaaactgttcgattactactctgcttctggcatgtctctcctgtttctagtgttcttcgagtgtgtgtccatctcatggttttacggggtcaacagattctacgataatatccaggaaatggttggctccagaccttgcatctggtggaagctctgctggagcttctttacaccaattatcgtggccggcgttttcatcttctccgccgttcagatgacccctctgaccatggggaactacgtttttcccaagtgggggcagggcgtagggtggctaatggctctgtcctcaatggtgctgatcccaggatacatggcctatatgtttcttacactgaaagggtctctaaaacaacgtatccaggtgatggtacagccgtcggaggatatcgtacgccccgaaaatgggccagagcagcctcaggcagggtcatccaccagtaaagaggcctacatttag

SEQ ID NO: 206360 - DNA, 120 bp, synthetic construct
  misc_feature 1..120: note = Description of Artificial Sequence: Synthetic coding sequence
  source 1..120: mol_type = other DNA
atggccaccaacggcagcaaggtggccgacggccagatcagcaccgaagtgtccgaagcccccgtcgcgaatgataagcctaagactctggtggtcaaggtccagaagaaggcggcatag

SEQ ID NO: 206361 - DNA, 1266 bp, synthetic construct
  misc_feature 1..1266: note = Description of Artificial Sequence: Synthetic coding sequence
  source 1..1266: mol_type = other DNA
atggtgaacaccaccaacatgaccagcgccgtggtggagttctgggagcgcaatatgcaccagatgactgacggcctggacaagccaggccagattcggtggcccttggcaatcaccctcgccatcgcctggattctggtttacttttgtatctggaagggtgttgggtggactgggaaggtggtctacttcagtgctacttatccctacataatgctgattatccttttttttcggggggtgaccttacctggagctaaggaaggcatcttgttctatataacccccaattttcgaaaattgtctgacagcgaagtatggctggatgccgctacacaaatctttttctcctatggattgggtcttgggtcattgatcgcactgggctcgtataatagtttccacaacaatgtctacagagacagcatcatcgtgtgttgcatcaactcttgcacctctatgttcgccggctttgtaatcttcagcatcgtggggtttatggcccatgtaacgaaaagatctatcgcggacgtcgccgcctccgggcccggcctggcttttctggcataccccgaagcggtcacgcaactcccaatctctcccctctgggctatcctcttttttagtatgctgttgatgctgggtatcgactctcagttctgcaccgtcgaagggtttatcactgctctggtagacgagtacccccggctactcaggaacagacgggaactctttatcgccgctgtctgcattattagctacttgattgggctgagtaacattacccagggaggcatttatgtgtttaaactttttgattattattctgccagcggaatgtcgctgctgttcttagttttctttgagtgcgtcagcatctcttggttttacggcgtgaataggttctatgataacattcaagagatggtgggctccagaccctgtatttggtggaagctgtgctggtccttctttactccgatcatcgtcgccggagtcttcatcttttcggccgtacaaatgaccccattgaccatgggcaattacgtctttccaaagtggggccagggcgtggggtggttgatggctctgagctcgatggtgctgatccccggatatatggcctacatgtttctcaccctgaaggggagcctgaagcagaggatccaagtcatggttcagccctccgaggatatagttagacccgaaaacggccccgaacagcctcaagctggatcgtctacctccaaagaggcttacatctag

SEQ ID NO: 206362 - DNA, 1899 bp, synthetic construct
  misc_feature 1..1899: note = Description of Artificial Sequence: Synthetic coding sequence
  source 1..1899: mol_type = other DNA
atgaccgccgagaaggccctgcccctgggcaacggcaaggccgccgaagaggcgcgggaatctgaagccccaggcggggggtgttccagcgggggtgccgctcccgcgaggcacccaagggtcaagagagacaaagctgtccatgagcgaggtcactggaacaacaaggtagaatttgtgctgtcagtggcaggcgagataattggattgggtaacgtatggcgcttcccttacctctgctacaaaaatggagggggtgccttcctgatcccatatgtggtgttctttatctgttgcgggattcccgtttttttcctggagactgcgttgggccagtttacatccgagggaggaattacgtgctggagaaaagtctgcccgctgtttgagggcattggatatgcaacacaggtgatcgaagcccacctgaatgtctactatatcatcatcctcgcatgggccatcttctatttgtcgaactgctttactacggaactgccttgggccacctgcggtcacgagtggaataccgagaactgtgtggaattccaaaaactgaatgtcagcaactactcacacgttagcctgcagaacgccacaagccccgttatggagttctgggagcaccgggtgctggctatctctgatggcattgagcatatcggaaatctgcgatgggagctggcactgtgccttttagctgcttggactatctgctacttctgcatttggaagggcaccaaaagtactgggaaggtggtgtacgtaacagctacctttccctacatcatgttgttaattctgctgattagaggagtgacccttcctggagctagtgagggcatcaaattctatctttaccccgatcttagtcgcctcagtgacccccaggtgtgggtggatgcgggaacccagatcttcttctcatatgccatctgcttgggctgccttactgcactcgggagctataataactacaataataattgctaccgggactgcatcatgttgtgctgcctgaattccggaacaagtttcgtggctgggtttgcaatcttttcggtcctgggctttatggcttacgaacagggggtccccattgccgaggtggccgaatcaggacccggactagccttcatcgcataccctaaggcggtcactatgatgcctctttccccactttgggcaacattattctttatgatgttaatctttttaggactcgacagtcagttcgtctgcgtcgaaagcctggtgaccgctgttgtcgacatgtatcccaaggtgtttcggaggggatataggcgcgaactgttaatcctggctctgagcgttatatcttatttcctgggattggtgatgctcacagaaggcgggatgtatatcttccagctctttgacagttatgcggcctccggtatgtgcctgctattcgtagcaatttttgagtgcatctgcatcggctgggtctacggaagtaaccgcttttacgacaatatcgaggatatgattggttacaggcctccatcactgattaagtggtgctggatgattatgactcctggaatttgcgccgggatttttattttttttctgataaagtataaaccactcaaatataataacatatacacttacccggcttggggttacggaatcggctggctcatggctctctccagtatgttgtgcatcccattatggatatgtattacagtctggaaaaccgagggaactctccctgagaagttgcagaagctcacgactcctagtaccgatcttaagatgaggggtaagctaggggtcagtccccgcatggtgacagttaatgattgcgacgcgaaattgaaaagtgacggcaccattgctgccataaccgaaaaggagactcacttctag

SEQ ID NO: 206363 - DNA, 627 bp, synthetic construct
  misc_feature 1..627: note = Description of Artificial Sequence: Synthetic coding sequence
  source 1..627: mol_type = other DNA
atgaccgccgagaaggccctgcccctgggcaacggcaaggccgccgaggaggctcgcgagtccgaggcccccggaggtggctgctcctctgggggggctgcacccgcccgtcatcccagggtgaaacgcgataaggcagttcatgagaggggtcattggaataataaagttgaattcgtcctgagcgtcgctggggagataatcggcctaggaaacgtttggaggttcccttacctctgctacaagaatggaggaggcgcttttttgataccgtatgtggtatttttcatatgctgtgggatcccagtgttttttctcgagaccgctttgggccagtttacgagcgagggtgggatcacctgttggaggaaggtttgtccattgtttgaaggcatcggttacgctacacaagtgatcgaggctcatctgaatgtttactacataattattttggcatgggccattttttacttgtcaaattgcttcacgacagagctaccctgggccacttgtggccacgaatggaacacagaaaactgtgttgagtttcaaaaactaaacgtgagtaactactcacatgtgagcctgcagaatgctaccagcccagttatggagttttgggagtag

SEQ ID NO: 206364 - DNA, 2394 bp, synthetic construct
  misc_feature 1..2394: note = Description of Artificial Sequence: Synthetic coding sequence
  source 1..2394: mol_type = other DNA
atggactgcagcgcccccaaggagatgaacaagctgcccgccaactcccctgaagccgccgccgcacaaggccaccccgatggcccttgtgcaccccggactagcccagagcaggagttgcctgctgcggccgccccccctccgccacgggtaccgcgtagtgcgtccacgggcgcgcagacattccagagcgccgacgctcgggcctgtgaggcagagcgtcctggagtgggctcatgtaaactttcctccccgagggcccaagcggcttctgccgcactgcgtgatttgcgcgaggcccagggagcccaggccagtccccctcccggctccagcggcccaggaaacgcgcttcattgcaaaatcccttttctccgaggaccggagggggatgccaacgtgtcagttgggaaaggcactttggagagaaataacacccccgttgtgggctgggtgaatatgagtcagtcaacagtagtgctggcaacagacggaatcactagcgttttgccagggagcgttgctactgttgcaacccaagaagacgaacagggggacgagaacaaagccagaggcaactggtccagcaagctcgacttcatcctgtctatggtgggatacgccgtcggcctcgggaatgtgtggcgttttccttatctagcttttcagaacgggggaggagcgtttctcatcccttatctgatgatgttagcactcgcaggcctgcctatctttttcctagaggtatccctgggccagtttgcctcccagggcccggtgtcagtttggaaggccattcccgccctgcagggatgtggtatcgctatgctgatcatcagcgtgctgatcgccatctattacaacgttatcatctgctatacattgttttatctgttcgcatcctttgtgtccgtgctgccttggggttcctgcaataatccctggaacacgcctgaatgtaaggacaagaccaagctgctgctcgattcatgcgttatatctgaccatccaaaaatacagataaaaaatagtaccttttgcatgacagcatatcccaacgtgacaatggtcaatttcacaagccaagcaaataagactttcgtttccggtagcgaggagtacttcaaatactttgtcctgaaaatctctgccggcatagaataccctggcgagattcgctggccactcgcgctatgtctgttcctggcgtgggtgattgtgtatgcctcattggccaaaggcatcaaaaccagcggtaaggtagtctacttcaccgctacgtttccatacgtggtactcgtgatcctgctgattcgtggggtgaccctgccgggtgccggtgccgggatctggtactttattacccccaagtgggagaagcttaccgacgctaccgtgtggaaagacgcggccacgcagatattcttctcgctctctgcagcctggggcgggttgataaccctgtctagctacaacaagttccataacaactgttatcgggacacattaatcgtgacctgtaccaacagtgctacttccattttcgccggcttcgtgatcttctctgtgattggattcatggccaacgagcgcaaagtcaacatcgagaatgtggcggaccagggacctggtatcgccttcgtagtgtaccccgaggctctcacccgtctgcctctgagtcctttttgggcaatcatctttttccttatgctgttgacacttggacttgataccatgttcgctaccatcgaaaccattgtgacctcaatctccgacgagttcccaaaataccttcgaacccacaagccggtgttcacactgggctgttgcatatgttttttcattatgggcttccccatgatcactcaaggcggtatctacatgttccaactggtcgatacttatgcagcgagttacgctttggtaattattgccatttttgaactcgtggggatctcctacgtctatggattgcaacgcttttgtgaggacattgaaatgatgatcggcttccagcccaacattttctggaaagtgtgctgggcattcgtgacacccaccatattgacttttatcctgtgtttttctttctaccaatgggagccaatgacctatggcagttatcgctatcctaactggtctatggtattgggatggttgatgcttgcgtgttccgtgatctggatacctatcatgtttgtgatcaagatgcatctggctcccggcaggttcatcgaaagacttaaactcgtgtgcagcccccaacccgactggggacctttcttagcgcagcacaggggcgagcgctacaagaatatgattgacccactgggcacaagttcgctcgggctcaagctgcccgtgaaagacctcgaattaggaactcagtgttag

SEQ ID NO: 206365 - DNA, 1959 bp, synthetic construct
  misc_feature 1..1959: note = Description of Artificial Sequence: Synthetic coding sequence
  source 1..1959: mol_type = other DNA
atgagcggcggcgacacccgggccgccatcgcccggccccggatggccgcagcacacggacccgtcgcaccatcttccccggaacagaacggcgcggtgcctagtgaagcaactaagagggaccagaacctgaagcgcggcaattggggtaaccagattgagtttgtgctcacctccgttggctacgcggtgggccttgggaatgtatggagattcccctacctgtgctacaggaacggcgggggggccttcatgtttccatattttatcatgctgatcttttgcggcattccactgttcttcatggagctgtcttttgggcagttcgctagccagggctgtctgggggtttggaggatctcacctatgttcaaaggcgtcgggtatggcatgatggtcgtttccacttatatcggcatctactacaatgttgtgatctgcatcgccttttactactttttttcttccatgacccatgtgctgccttgggcgtattgcaacaatccctggaatactcatgactgcgctggagttctggatgccagcaatctgaccaacggaagcagacctgccgcactgcccagtaacctgagtcacctgctgaaccattccctgcagcgcaccagcccaagcgaagaatattggcgcctgtatgtccttaagctgagcgatgacattggcaacttcggcgaagtgcggctccccttgctgggttgtctcggcgtcagttggctggtagttttcctctgtcttatccggggcgtgaaatctagtggcaaagtagtttacttcaccgccactttcccctacgtggtcctcacgatcctgtttgtcagaggcgtgacgttggagggagctttcgatggcatcatgtattaccttacaccacaatgggataaaatactggaagccaaagtctggggagacgccgccagtcagatcttttacagtctgggatgcgcctggggaggactaataacaatggccagctacaacaagttccataataactgctatcgggatagtgttattatttcaataaccaattgtgctacaagcgtctacgctgggttcgttattttctctattctgggatttatggccaaccaccttggcgtggacgtgtctagggttgcggatcacggacctgggctggcttttgtggcgtaccctgaggccctaactctgcttcccatttctcccttgtggtcccttctgttcttcttcatgctgatccttctgggactgggtactcagttctgtttgcttgagaccctggtaaccgccatcgtggatgaagtcgggaacgaatggatccttcaaaagaagacctacgtgacccttggcgtggcagtcgccggattcctgttaggcatccccttgacctctcaagcaggcatctactggcttttgctgatggataactacgccgcatcctttagtttggttgtgatttcctgtataatgtgcgttgcgattatgtatatctacgggcatcgaaattattttcaggacatccagatgatgttggggttccctcctccgctctttttccagatctgttggcgctttgtgagccctgcaatcatcttcttcatcctggtctttacagtaatacagtaccagcccatcacttataaccactatcagtaccccgggtgggccgtcgctattggctttctgatggctctgtcttctgtgctgtgtataccgctctacgcaatgtttagactgtgtcggacagatggggacactcttctccaacgcttaaaaaacgccacgaagcctagccgggattggggcccagccctgctggagcaccggactggcagatacgcccccactattgctccctcacctgaggatggatttgaagtgcagcccctccacccagacaaagcccaaattccgatcgtggggagtaatggatctagtcgactgcaagactctaggatctag

SEQ ID NO: 206366 - DNA, 2121 bp, synthetic construct
  misc_feature 1..2121: note = Description of Artificial Sequence: Synthetic coding sequence
  source 1..2121: mol_type = other DNA
atgagcggcggcgacacccgggccgccatcgcccggccccggatggctgctgcccacggtcctgtcgccccatcatctccagaacaggtgactctcctgcctgtgcagaggtcgtttttcctgccacctttttctggagccactccttcaacgtcacttgccgaatctgtacttaaagtctggcatggtgcgtataactctggccttctgccgcagctgatggcccaacacagcctcgcaatggcccagaatggtgctgttcctagcgaagctaccaaacgtgaccagaatttgaaacgtggaaattgggggaaccagattgagtttgttctcaccagcgtgggctatgctgttggcttaggaaatgtgtggcgattcccgtatctgtgttatcgcaatggcgggggcgctttcatgtttccctattttattatgctgattttttgtgggatccccctgttcttcatggaactaagctttggacagtttgccagtcaaggttgtcttggtgtttggcggatatctcctatgttcaagggggtgggttacggaatgatggttgtcagcacgtacattggcatatattacaacgtcgtgatctgcatcgctttctactatttcttctcctccatgacacatgtcctgccatgggcctactgcaacaatccctggaatacccacgactgcgccggcgtgctcgacgcttccaacctgactaatggctccagaccagcagcattaccatcaaatctgtctcatcttctgaaccactctctccagcgaacgtcccccagtgaggaatactggaggctctacgtcctcaagctgagtgacgacatcggcaactttggagaagtacgtttgccattgttaggatgcttgggcgttagctggctggtggtgttcctctgtctgatcaggggagtaaagtcttcaggcaaagtggtgtattttaccgccactttcccctatgttgtactcactatcctgtttgttagaggcgttacactagagggcgcatttgacggcatcatgtattacctcacccctcagtgggacaaaatattggaggccaaggtgtggggcgatgcagcttcccagattttttactcactcggctgtgcctggggcggtctgatcactatggcctcttataataagtttcacaacaactgttatcgcgactcagttataatctccataacaaattgcgctactagcgtgtatgcgggattcgtgatttttagcatcctaggtttcatggccaaccaccttggcgttgatgtgtcacgggtggcagatcatggcccagggctagctttcgtggcatacccagaagcgcttactctgctgcccatttccccgctatggagcttactgtttttttttatgctgattctgctaggcttgggaacccaattttgtctcctcgagactctggtcaccgcgatcgtcgacgaggtgggaaacgagtggatcctgcaaaagaaaacatatgtcactctaggcgttgcagtggcagggttcctgctcggcattcccctcacgtcacaagcgggcatctactggcttttactgatggataactacgccgctagcttctctctggtggttatcagctgcattatgtgtgtggccattatgtacatttacggacatagaaactacttccaagacatccaaatgatgctgggattcccgcctcctctgtttttccagatatgctggcgtttcgtatcccctgcaataattttctttatcctcgtttttacagtgattcaataccagccgattacctacaatcactatcagtatcccggctgggctgtcgcgataggctttcttatggcactttctagtgtcctgtgtattcctctctatgcaatgttcaggttatgtagaacagacggcgatacgttattacagcggctcaaaaacgccacaaagccttcaagggattggggaccagctcttcttgaacataggaccggccgctacgcaccaactatagcgccatcccccgaagacggcttcgaggtgcagccacttcatcctgacaaggctcagattcctatcgtcgggtcgaatggctcttccagattacaggattcaagaatttag

SEQ ID NO: 206367 - DNA, 1725 bp, synthetic construct
  misc_feature 1..1725: note = Description of Artificial Sequence: Synthetic coding sequence
  source 1..1725: mol_type = other DNA
atgttcccctacttcatcatgctgatcttctgcggcatccccctgttcttcatggagctcagctttggtcagtttgcatcacaaggctgtctcggagtctggagaataagtccgatgttcaaaggtgtggggtacggaatgatggttgtgtccacatatattggcatttactacaacgtcgtcatttgtattgcgttctattatttcttctcttcgatgactcatgttctgccctgggcctattgcaacaacccgtggaacactcacgattgcgccggggtgctcgacgcctccaacttaaccaacggcagtcggcccgctgctttaccctctaatctgagtcatctgctgaaccattccctgcagcgcactagtcccagcgaggagtactggagactctatgtgttaaagttaagtgacgacataggcaacttcggtgaagtcagactccccctgcttggttgcctcggcgtgtcatggctcgtagtgttcttatgcctcattagaggcgtgaaatctagcgggaaagtggtctactttaccgctaccttcccctatgtggtccttacgatcctgttcgtccgaggcgtaactctggagggggcctttgacggtattatgtactacctcaccccccaatgggacaagatcctcgaggccaaagtatggggcgatgccgccagtcaaatattctactcactgggttgcgcatggggtggtctaatcactatggctagctataataaatttcacaacaactgctatagggactcagtgattatttctatcaccaattgtgccacctctgtctacgcaggtttcgttattttcagcattctgggcttcatggcgaaccacctgggggtggatgttagcagggtggcggaccatggccccggactcgccttcgtcgcttaccccgaagcactcactctgctgccgattagccctctgtggtccctgctgtttttctttatgttgattctgctggggctggggacacagttctgcctccttgagacgttggtcacggctatcgtggacgaggtcggtaatgaatggatcctgcaaaagaagacctacgtcactctcggcgtggctgtggcgggcttcctgctcggcatcccgctgacctcccaggctggcatctactggctactgctcatggacaactacgcagccagctttagtctcgtcgtaatctcctgcatcatgtgcgtggccatcatgtatatttacggacaccgtaactattttcaggacattcaaatgatgttggggtttccacctcctttattttttcagatctgttggagatttgtcagtccagctatcatctttctccaggcccaggtccataggcgcctcccccagaatcccctacattttgcttctttgcccgaaagaaacgtgctgctgcaccaacttcctcaaaggggcggggtccccgaacacgatcctcctactccaccctcgcctgctagaacctatggaccccaggtgcgtgtgagggaggtgccacgggcccggcggcagcgatcccccaaccccgctccgctgtgggcacctccatctcccaaaccgcacccctgttcggctgccggaccactcggatgggattgtccctttaggaactgtcagtctcttgccctcagctctgctcgcctgctggcagactctgatgcaggaggtccagaaacccggcagtgggagcctggaccctag

SEQ ID NO: 206368 - DNA, 1902 bp, synthetic construct
  misc_feature 1..1902: note = Description of Artificial Sequence: Synthetic coding sequence
  source 1..1902: mol_type = other DNA
atggtgggcaagggcgccaagggcatgctgaacggcgccgtgcccagtgaggccactaagagggaccagaacctgaaaagaggcaactggggcaatcagatagagtttgtgctcacgtcagtagggtatgccgttggcctgggaaacgtgtggagattcccatacctttgctaccgaaacggtgggggcgctttcatgtttccctactttataatgcttatcttttgcgggattcccctgttttttatggagctgtccttcggccaatttgctagccagggttgtctgggcgtgtggagaattagcccaatgtttaagggagtcggttacggcatgatggtggtgagcacatatattggtatctactacaacgttgtcatttgcatcgccttctactacttctttagctctatgacacacgtattgccgtgggcatattgcaataacccatggaatactcacgactgtgccggcgtgcttgatgcgtcgaatctgacaaatggaagcagacccgctgctctgccttctaatctctcacatctcttaaaccactcgttacaacgcacaagtccatccgaggagtactggaggctgtatgtcttaaaattgtccgacgacatcggcaactttggcgaggttcggctccccctgctaggatgtcttggagtctcctggctcgtcgtattcctgtgtctgattagaggcgttaagagttccgggaaggtggtctattttaccgccacgtttccttacgtcgtccttacaatcctttttgttagaggcgttaccttggaaggcgcctttgatgggatcatgtactacctgacccctcagtgggataaaattctagaggccaaagtgtggggagacgctgcctcacagattttttatagccttggttgcgcctggggtggattgattactatggcatcgtacaataagttccataacaattgttacagagactccgtgattatttctattacgaattgtgcgacgtctgtgtatgcaggtttcgtcattttcagcatattaggattcatggctaaccatctaggtgttgacgtctcaagggttgctgatcacgggcccggcttggcctttgtagcttacccagaggccctcaccttacttccaatcagtccgttatggagtctgctcttcttttttatgctcatattgttggggttgggcacacagttttgccttctggagacactcgttaccgcaatcgtcgatgaggttgggaatgaatggatcctccaaaagaagacctatgtgacactgggcgtcgccgttgccggatttctactgggcatcccattgacttcgcaagcaggcatctactggttgctactaatggacaattacgccgcaagcttttcactggttgtgatctcctgcattatgtgtgtcgctattatgtatatctatggccaccgcaactatttccaggatatccagatgatgctaggttttccaccacctttgttcttccagatctgttggagatttgtcagccctgccatcatcttcttcattttggtgttcaccgttatacagtaccagcccattacctataatcattatcaataccctggctgggccgttgccatcggcttcctgatggctttgtcctcagtgctctgcatccctttatatgcaatgttcaggctgtgccgaacagacggtgacactcttctccagaggctcaaaaacgctacaaaacccagcagagactgggggcccgcccttttggagcaccgtaccggaaggtacgccccgactattgccccctctccagaggacggctttgaagtgcagcctctccatcccgataaggctcagatccccatcgtggggtcaaacgggtctagccggcttcaggacagtaggatatag

SEQ ID NO: 206369 - DNA, 1569 bp, synthetic construct
  misc_feature 1..1569: note = Description of Artificial Sequence: Synthetic coding sequence
  source 1..1569: mol_type = other DNA
atgatggtggtgagcacctacatcggcatctactacaacgtggtgatttgtatcgctttctattactttttctcatcaatgacccatgtgctgccttgggcctattgcaacaatccttggaacacacacgactgcgcaggtgtgttggacgcttccaatctgaccaacggctctagacctgccgctcttcccagcaacctgagtcaccttctgaaccattccctgcagcgcacaagcccatctgaggaatactggcggctgtacgtgctgaagctatctgacgatatcggcaactttggcgaggtacgcctgcccctgttagggtgtctaggagtctcctggttagtcgtcttcctctgcttgatccgcggcgtcaagtcttctggtaaggtagtctacttcaccgccacatttccatatgttgtgcttactattctcttcgtccggggcgtgacgctagaaggggcattcgatgggatcatgtattacctcacccctcagtgggacaagatcctagaggccaaggtttggggcgacgccgccagtcagattttctactccctcggctgtgcatggggcgggcttatcactatggcatcctacaacaaattccataataactgttatcgtgatagtgtaattatctccattactaactgtgcaacgtccgtttacgccgggtttgtcatattctcaatcctgggttttatggccaaccaccttggcgtggacgtgtctcgagtagccgaccatggtccgggcttggcatttgtcgcttatcccgaggccctcacacttcttcctatttctccactatggagcttgctgttcttctttatgcttatcctgctgggccttggaacccagttctgtctactggagaccctagtgaccgccattgtggacgaggtaggaaatgaatggatactccagaagaagacatatgtgactctcggtgttgcagttgcagggtttctgctagggatccccctcacatcccaggctggcatatattggttgctgcttatggacaactacgccgcctctttttcactcgttgtcatcagctgtatcatgtgcgttgctatcatgtacatctatggacatcgtaactattttcaggatattcagatgatgctggggtttcccccacctctgttctttcaaatttgctggagatttgtgagccccgctatcatcttctttatcttggtcttcacagtgatccaatatcagccgatcacttataatcattatcaataccccggctgggccgtggcaattgggtttttgatggcgctttcctctgtactctgtatccctttatacgctatgttcaggctctgccgtacagatggcgataccctgcttcaacgtctgaaaaacgcgactaaaccttccagggactggggacccgccctgctggaacacagaacaggaaggtacgcacctacaattgcgcctagcccggaggatggtttcgaagtccaacctctgcacccagataaagctcagatccccattgtgggtagcaatggttctagccgactgcaggactcccgtatatag

SEQ ID NO: 206370 - DNA, 405 bp, synthetic construct
  misc_feature 1..405: note = Description of Artificial Sequence: Synthetic coding sequence
  source 1..405: mol_type = other DNA
atgagcggcggcgacacccgggccgccatcgcccggccccggatggctgccgctcacggcccagtcgccccgagttcccccgaacaaaacggagcggtaccgagtgaagctaccaagcgagaccagaatcttaaaagagggaattggggcaaccaaatagaattcgttttgacatccgtcggatacgcagtgggcctgggaaacgtgtggagatttccttatctgtgctatcgtaacgggggcggcgcctttatgtttccatatttcatcatgcttattttttgcggcattccattgtttttcatggagttgagctttggccagttcgctagtcagggctgtctcggcgtgtggcggatctccccgatgttcaaaggggttgggtatgggatgatggtggtgtag

SEQ ID NO: 206371 - DNA, 1161 bp, synthetic construct
  misc_feature 1..1161: note = Description of Artificial Sequence: Synthetic coding sequence
  source 1..1161: mol_type = other DNA
atgttcccctacttcatcatgctgatcttctgcggcatccccctgttctttatggagctgtcattcggtcagttcgcctcacagggatgtctgggcgtgtggaggatcagcccaatgttcaaaggggtcggctacggaatgatggtcgtgtccacctatatcggcatttattacaatgtggttatatgcatcgcattttactacttcttctcttccatgacccatgtactgccatgggcatattgtaataacccttggaatacacacgattgtgcgggggtacttgacgccagcaacctgacgaacgggtctaggcccgccgctttaccttcaaacctctcccacctgctcaatcatagccttcagcggacctctcctagcgaggagtattggcggctctacgtgctgaaactgagtgacgacatcggtaacttcggggaggtccggttacccttattggggtgcctgggcgtttcgtggctggtggtgttcctgtgcttgatacgcggagttaaaagttctggcaaagtcgtttactttacagccacatttccctacgtggtgctgaccatcttgttcgttaggggggtaacgctggaaggggcgttcgacggaatcatgtactaccttacgcctcagtgggataagatcctggaagccaaggtttggggcgacgccgcttctcagattttctatagcctgggatgcgcatggggtggattaattaccatggcatcctataataagtttcacaataactgctacagagacagcgtgatcatttccatcaccaactgcgcaacttctgtatatgcagggtttgtcatattttctattctgggttttatggctaatcatctaggcgtcgacgtctctagggtggctgaccatgggcctggactggcttttgtggcttatcccgaggctttaacacttttgcctataagcccattatggtccttgctgttctttttcatgctgatactcctcggtctggggacccagttttgtttgttagagaccctcgtgacagcaattgtcgatgaagttggaaacgaatggatactccagaaaaagacatacgtgactctgggcgttgccgtggctggctttctcttagggattccacttacttcgcaagctagcatcggctgctgttag

SEQ ID NO: 206372 - DNA, 1050 bp, synthetic construct
  misc_feature 1..1050: note = Description of Artificial Sequence: Synthetic coding sequence
  source 1..1050: mol_type = other DNA
atgggcgacatgggcgacccccccaagaagaagcggctgatcagcctgtgcgttggctgtggcaaccagatacacgaccagtatattctgcgagtgtcccctgacctggaatggcacgccgcctgtctaaaatgcgccgagtgtaaccaatatctggatgagagctgtacctgcttcgtgagagacggtaaaacctattgcaagcgcgactatatcagattgtatgggattaagtgtgcaaaatgtagcatcgggttctctaagaacgacttcgtgatgcgagcaagatctaaggtgtatcacatagagtgcttccgttgcgtggcctgctctagacagctcatccctggcgacgagttcgctctgagagaggacgggctcttttgcagggccgatcatgacgtggtggagcgcgcttcgctgggcgccggcgatcctctgtcccccctgcatccggcacgacctctgcagatggcggctgaaccaatctcagcccgacagcctgctcttcgtccacacgttcacaaacagcctgaaaagacgacacgcgttaggaccgtgctgaacgagaaacagctgcatacactgcgtacctgctatgccgcaaatcccaggcccgacgccctgatgaaggaacaactggttgagatgactgggctgagcccccgcgtgattagagtgtggttccagaataaaaggtgtaaggacaagaaacggtccattatgatgaagcagctgcagcagcagcagccaaatgacaaaacaaatatacagggtatgaccggcacccctatggtagccgcttctccagagcgacatgacggtggtctgcaggccaacccggttgaggtccagtcctaccaaccaccttggaaggtattgtctgattttgcactacagtcggacattgaccagcccgcctttcagcagttggttaactttagcgagggggggcccggcagcaactcgacaggtagtgaagtggcatctatgagctctcagttgcccgacacacctaattctatggtagctagtcccatagaggcgtag

SEQ ID NO: 206373 - DNA, 2283 bp, synthetic construct
  misc_feature 1..2283: note = Description of Artificial Sequence: Synthetic coding sequence
  source 1..2283: mol_type = other DNA
atgctgagcgacgaccacgtgaacgagatcatcatccaggtggagaatgtgtcgtctggtgtccaaagccatccatccagcaaccagatctttcaggaaaaagtgctgctagactcctctattaacatggttttgagcatctccgatatcgatgtgattgatagtcagacagtatcgaagcggaacgaccagaaaggtaaccaggtcctgaggtttagcaccagcctcaacgaaagtatgtcccagaccctgcacagcctcgaatgcatgggaattgatacaccagggtctagccatgaaactgtgcaggggcagaaactaatcgcttcgctcataccaatgacgtccagggatcgaattaaggcaattcggaaccagcctagaaccatggaagaaaaaagaaatttgcgtaagattgtggataaagaaaagtccaaacagacccatagaattctgcagttgaattgttgtattcagtgcctgaactctatcagtagagcttataggcgctctaaaaactcactgtccgagattctcaactctatatctctctggcagaaaaccctcaaaataattggtggcaaatttggcacgtctgtcctgtcctacttcaacttccttaggtggctcctgaaattcaacatatttagctttatcctgaatttcagtttcattattattccccagtttactgtcgcgaagaaaaatacacttcaatttacaggcctggagtttttcaccggggtcggttacttccgtgataccgtaatgtactacggcttttatacaaactcgactatccagcacggcaattcaggtgcctcatataatatgcagctcgcttatatcttcactattggggcatgccttactacttgtttcttttccctgctgttctctatggccaaatatttccgaaacaattttattaatcctcatatttactcaggtgggatcactaaattgatcttttgctgggatttcactgtaacccatgaaaaagcagtcaagctgaaacagaagaaccttagcactgaaattcgggaaaacctctccgagctgcggcaggagaactctaaactgacttttaaccaactgcttacaagattctcggcctacatggtcgcatgggttgtctccactggagttgccattgcttgttgtgcggccgtctattacctagccgagtataaccttgaattcttaaagacacattccaatcctggtgccgtgctccttctcccctttgtcgttagctgtatcaacctggccgtcccctgcatctattcaatgttccgtttggtggagaggtacgagatgccccgtcatgaggtttatgtcctgctgattcgtaacatcttccttaagatttccatcatcggcatcctgtgctattactggctgaatactgttgctctctctggagaggaatgctgggagacattgattgggcaggacatctaccggcttctattgatggattttgtgttcagccttgtgaacagtttccttggggagtttctccgacggatcataggcatgcagctcatcacatccctgggcttgcaggagtttgatattgccaggaatgttctggagctgatttacgctcaaacactggtatggatagggatcttcttctgtccattgctcccattcatacagatgattatgcttttcatcatgttctactctaagaacatttcactgatgatgaactttcaaccgcctagcaaggcctggcgtgccagccagatgatgacgttttttatattcctgctgttctttccttcatttacgggcgtcctttgtacactggctatcacgatttggaggcttaagccgtcggccgattgcggtccttttcgcggcctccctctctttatacattcaatttactcctggatagacaccttatcgactagacccggctatctgtgggtggtctggatctatcgtaacctgatcggtagtgtacattttttcttcatcctgacgctgatcgtcctcataattacttacctctactggcagatcacagagggcaggaaaattatgatacgtctgctgcatgagcagataattaatgaaggcaaggacaaaatgttcttgatagaaaagctcattaagctgcaggacatggagaagaaggcaaaccctagtagtcttgttctagaaagacgggaggtcgagcaacaggggttcctccacttgggagaacatgacggcagcctcgacctgcgttccagacgctccgtccaagaggggaacccccgagcctag

SEQ ID NO: 206374 - DNA, 1854 bp, synthetic construct
  misc_feature 1..1854: note = Description of Artificial Sequence: Synthetic coding sequence
  source 1..1854: mol_type = other DNA
atgctgctggcccggatgaacccccaggtgcagcccgagaacaacggcgccgacacaggacctgagcagccgctacgtgcccgtaagaccgcagagctgctggtggtgaaagagagaaatggggtgcagtgcctcctggctccacgagatggtgatgcccaaccaagagagacctggggcaaaaagattgacttcctgctgtcggtggtaggttttgccgtggatctggccaacgtgtggcgcttcccctatctctgctataagaacgggggaggcgccttcctcataccctataccttgttcctgatcattgcgggaatgcctcttttctacatggagctggccctggggcagtataatagagagggagcagctactgtgtggaaaatctgtcccttttttaagggagttggatacgcagtcattcttatcgctttgtacgttggcttttactacaacgtgattatcgcttggagtctgtactacctgtttagttcgttcaccctcaacctgccttggactgactgtggccatacatggaactcgcctaattgcacagatcctaagctactcaacggctcagttctgggcaaccataccaagtacagtaagtataaattcactcccgccgccgaattttacgaacggggggtcctgcacctgcacgagagctccggtattcatgacataggattaccccagtggcaactgttgctgtgcttaatggtggtagtaatagtcctgtactttagtttatggaagggagtcaagaccagcggtaaagtggtctggattaccgcaactttaccttatttcgtcctgttcgtgctgctggtccacggtgtgacgcttcctggggcgtctaatggcatcaatgcgtacctgcacattgacttttatcgcctgaaagaggcaactgtctggattgacgcagccacacagatcttcttctccctaggagccggtttcggcgttttgatcgcattcgccagttataacaagttcgacaacaactgttatagggacgcactgcttacgtcatcaataaattgcataacaagcttcgtgtctggcttcgccatctttagtattctgggttacatggcccacgagcacaaggttaatatcgaggacgtggctaccgagggtgccggactggtcttcatcctctatccagaagctattagtacactctcaggttctactttctgggctgtcgtgttttttgtcatgctcctggcactgggtctggatagtagcatgggagggatggaggcggtgatcactggcctcgcagatgatttccaggtacttaagcggcatcgaaaactctttaccttcggcgtcactttttcaacttttttgctagccctattttgcataacaaagggcggcatctacgtccttactctcctggacaccttcgccgccgggaccagcattcttttcgccgtgctcatggaagccattggcgtgtcgtggttctatggcgttgatcggtttagcaatgacatccagcagatgatgggcttccgacctggcctgtattggagactgtgttggaagttcgtgtctcccgctttcctcctattcgtggtcgtggtgtctataattaattttaaaccactgacctatgacgattacatattcccaccttgggctaattgggtggggtgggggatagcacttagctcaatggtgctggtgccaatttacgttatttacaagtttctcagcacccagggatctctgtgggagagactggcctacggcattactcccgagaatgagcatcacctcgttgcccagagggacatcagacagttccagctccaacattggctggctatttag

SEQ ID NO: 206375 - DNA, 1854 bp, synthetic construct
  misc_feature 1..1854: note = Description of Artificial Sequence: Synthetic coding sequence
  source 1..1854: mol_type = other DNA
atgctgctggcccggatgaacccccaggtgcagcccgagaacaacggtgcagatacgggtcctgaacagccactccgggctcgcaaaacagctgaactgctggtcgtcaaagagaggaatggggtacagtgcctgctcgcgccaagggacggtgacgcccagccccgagagacttggggcaagaaaatcgactttctgctgagcgtcgtggggtttgcggtggacttagctaatgtctggcgctttccctacctgtgttacaagaacggcggcggtgcgtttttaataccttatacgctgttcctaataatcgccggcatgcccctgttttatatggaactggctctgggtcagtataaccgcgagggggcagcaaccgtatggaagatttgccccttctttaagggtgttggctacgccgttatactcatcgctctctatgtcggattttactataacgtcatcattgcttggtctctttactacttgttctcctcatttactctgaacttgccgtggaccgattgcggtcacacgtggaactcaccaaactgcactgaccctaagctgttgaatgggtccgtgctgggcaatcatactaagtattctaagtataagtttactcccgccgccgagttttacgagcgaggcgtgctgcacctccatgaaagttccggaattcatgatatcggactgcctcagtggcagttgctgctgtgtctgatggtggttgtgatagtgctttattttagtctgtggaaaggcgttaaaacttcaggcaaggtggtttggattaccgccacactcccttacttcgtcctgtttgtgttgttggttcacggtgttactctgccaggggcttcaaacggaatcaacgcctatctgcatattgacttctaccggctcaaggaagcaacagtttggatagacgcagcaacacagatttttttttccctgggagctggttttggcgtgctgattgccttcgcgtcatataacaagttcgataataattgttatagagacgcgctcctgacaagctccattaactgtattacctcgtttgtgtccggtttcgcgatcttcagcattctcggctacatggctcacgagcataaagtcaatatcgaggatgtagctaccgagggggcgggattggtctttatactgtatccagaggctatcagcacactgtcagggagcacattctgggcggtggtgttctttgtgatgctgttggctttgggactggactccagcatgggaggaatggaggccgttataacaggcctggccgatgatttccaggttttgaaacgccaccgcaagctgtttacgttcggcgtgacattctccacatttctgctcgccctgttctgcatcacaaagggcgggatctatgtgctgaccttgcttgacacattcgcagcgggtacatcgatccttttcgccgtgttgatggaggccatcggcgtgtcttggttttacggtgtagaccgattctccaacgatatccagcaaatgatgggttttcgccccgggttgtactggcggctatgctggaagtttgtctctcctgcatttctgttgtttgtcgtggtcgtctctattatcaatttcaagccactgacatatgatgattatatcttccccccttgggccaattgggtggggtggggaattgccctgagcagcatggtgctggttcccatttatgtcatctataaattcctcagcacccagggcagcttgtgggaaaggcttgcgtacgggatcactccggagaacgagcatcacttagttgctcagcgcgatatcagacagtttcaactgcagcactggttggcaatatag

SEQ ID NO: 206376 - DNA, 996 bp, synthetic construct
  misc_feature 1..996: note = Description of Artificial Sequence: Synthetic coding sequence
  source 1..996: mol_type = other DNA
atggtggtggtgatcgtgctgtacttcagcctgtggaagggcgtgaagacctctggaaaggtctggatcgatgctgccacccaaatttttttttccctcggggccggcttcggcgtcctcatcgcatttgctagctacaacaagtttgataataactgttatcgcgatgccctgctgacatccagtattaactgtataaccagtttcgtctcaggttttgctatcttttctatccttggttacatggcccacgagcataaagtgaatattgaggatgtggccacagaaggcgccgggcttgtatttattttgtaccccgaagctatttcaaccctgagtggaagcacattctgggcggtggtgtttttcgttatgctccttgccttaggactagattcttccatgggggggatggaggctgtgatcaccgggcttgcggacgactttcaagttctcaagcggcatagaaagctgttcacattcggtgtgaccttctccacgttcctcctggctttgttttgcatcaccaagggcggtatctatgtgctgactctactggataccttcgctgctgggaccagtatcttgtttgctgtgctcatggaggcaataggcgtgtcgtggttctacggtgtcgatcgattctctaacgacatccagcagatgatgggtttccgacccggcctgtattggaggctgtgttggaagtttgtgagtccagcatttctgttattcgtagtggtcgtctcaataattaactttaaaccactgacttacgacgattacatctttcccccttgggcgaattgggtgggctggggcatcgccctcagcagcatggttctcgtccccatctacgtaatatataagtttctctcaacacaaggtagcctctgggaaagattggcttatgggatcactcctgaaaacgaacaccacctggtggcacagagagacatccgtcagtttcagctacagcattggcttgccatctag

SEQ ID NO: 206377 - DNA, 1893 bp, synthetic construct
  misc_feature 1..1893: note = Description of Artificial Sequence: Synthetic coding sequence
  source 1..1893: mol_type = other DNA
atggagaccacccccctgaacagccagaagcagctgagcgcctgcgaggacggcgaagattgccaggaaaacggagtcctccagaaggtggtgccgaccccaggcgacaaggtcgaatccgggcagatcagcaacggctactctgctgtgccaagccccggggcaggagatgacactcgccacagcatccctgcaaccaccaccacgctagtggctgaactgcatcagggggagcgggaaacctgggggaagaaggtggacttcctcctttctgtgatcggctacgcagttgaccttgggaatgtttggagatttccctacatttgctatcaaaatggcggaggggcatttctcctaccttacacaattatggcaatatttggcggcattccactgttttatatggaactggcccttgggcagtaccaccgaaacggctgtatatccatttggaggaaaatttgcccaatttttaaagggatcggctatgcaatctgtatcatagccttctacatcgcctcctattacaatactattatggcctgggcactgtattatcttattagttccttcacggatcaactgccctggactagttgtaagaatagttggaacacagggaactgcacgaattatttttcagaggataatattacctggactctccattccaccagcccagcagaagagttctatacgcgccacgttctgcagatacaccgaagcaaggggctacaagacctgggagggatttcctggcagctggctctgtgcattatgctgattttcacagtgatttacttctcaatatggaagggcgtcaagacgtcaggcaaagtcgtgtgggttaccgccacattcccttatatcatcctcagcgtccttctggttcgcggagctaccctccctggcgcctggcggggcgtgctgttttatcttaaacccaattggcagaagctgctggaaacaggggtttggatagacgcagccgcccagatcttcttttccctagggcccggttttggtgtgctccttgctttcgcatcatacaacaagttcaataacaattgctaccaggatgccctggtgacgtctgtggtgaattgtatgacatctttcgtgtctggattcgtgattttcacggtactcggctatatggcggaaatgcgcaatgaggatgtgtctgaagtcgcaaaagacgccgggccttctctgctttttatcacatacgctgaggccattgccaatatgccagcttccaccttctttgcaatcatattcttcctgatgctcataaccctgggtctggactccactttcgccgggctggagggcgtcatcaccgccgtattggacgagttcccacacgtgtgggcgaaaagaagagagcggtttgtcttggcggtggtgattacgtgcttcttcgggagcctggtcacactcactttcggcggcgcttacgtcgtaaaactgctggaagagtacgcaactgggccagctgtcctgactgtcgccctgattgaagctgtcgccgtctcctggttctatggcataactcagttctgccgggatgtgaaagagatgctgggatttagcccaggttggttttggcggatctgctgggtggcaatctcaccacttttcttgctgtttattatttgcagctttttgatgtcccctccccagctgcgtctgttccagtataactacccatactggtcaatcatactcggatactgcattggcacatcaagtttcatctgtatccctacgtacatcgcttaccgccttataatcacaccaggcacatttaaggaacgcatcattaagagcatcactcctgagacgcctactgagatcccatgtggggatatcagactcaatgccgtatag

SEQ ID NO: 206378 - DNA, 2019 bp, synthetic construct
  misc_feature 1..2019: note = Description of Artificial Sequence: Synthetic coding sequence
  source 1..2019: mol_type = other DNA
atgagccagagccggcgggtgaaccccgacgaccgggagctgggcggagatccgcaaattcaggcaccacgagatcagttgggtagcctcgctgacggccaccagtgtcatttactgacaagcagaatggaaactaccccgctgaacagccagaagcagctttccgcctgtgaagacggtgaagactgtcaggagaatggcgtgttgcagaaagtcgtccccactcccggcgataaagtggagagtgggcagatctctaatggttatagtgccgtccccagccccggggcgggcgatgatacacggcatagcatcccagcgaccaccaccacactggtcgcagagctccaccaaggagagcgggaaacttggggtaaaaaagttgactttctactcagtgtgattgggtacgcagtcgacttggggaatgtgtggcgctttccctacatctgttaccagaatggcggcggcgcgttcttactgccctacaccatcatggcaatctttggcggaatccccttattttacatggagctggccctggggcaataccataggaacggctgcatctcaatttggcgaaaaatttgtcctatatttaaaggcatagggtacgccatatgcataatcgctttctatattgcatcgtactataacaccattatggcgtgggccctctattacctgatctcctcattcactgatcaactgccatggaccagttgcaaaaacagctggaacacgggaaattgcacaaactacttctctgaagacaatatcacctggaccctgcacagtaccagtccagccgaagagttctatacaaggcacgtcttgcagattcaccgctctaaaggtctgcaggacctcggcggtatctcatggcaactggctctttgtatcatgctgattttcacagtcatttacttcagcatttggaagggggtaaagacttctggaaaggtggtctgggtgaccgccacctttccttacataattctttcagtcctcctggtgagaggggctaccctccccggtgcatggagaggtgtgcttttttatctgaaaccaaactggcagaagctactagagacaggcgtctggatcgatgccgccgcccaaatttttttctcacttggaccagggtttggtgttctactggcctttgcatcttataataaattcaataacaactgttaccaagacgcactagtgacgtccgtcgtgaactgcatgaccagctttgtgagcgggttcgttattttcacagtgttagggtatatggcagaaatgcgcaatgaggacgttagcgaggtggctaaggacgcaggtccatctctgttgttcatcacctacgcagaagcgatagcaaacatgccagcctctacattcttcgcaattatcttcttcttgatgctgatcactctcggcctcgacagcaccttcgccggactggagggcgttatcaccgctgtattggatgagtttccacatgtgtgggctaagcggcgggaacggttcgtcctggccgtggtcataacatgttttttcggcagtttagtcacgctcacattcggcggcgcctacgtcgtcaagctcctggaagagtatgccaccggcccagcggtgttgaccgtcgcactgatcgaagccgtggcagttagttggttttacggtattacgcagttttgccgtgatgtgaaagagatgctcggtttcagtccgggatggttctggaggatctgttgggtagccatatctcccctgtttctactatttattatatgttcattcctgatgtcacctccccagctgcgtctatttcagtataattacccctactggtctatcatactgggctactgcataggaacgagctcattcatttgtatacctacatacattgcatacagattgatcattacccctggaacgtttaaggagagaatcataaagtccatcaccccagagacccctactgagataccctgtggagacataaggctgaacgctgtgtag

SEQ ID NO: 206379 - DNA, 1893 bp, synthetic construct
  misc_feature 1..1893: note = Description of Artificial Sequence: Synthetic coding sequence
  source 1..1893: mol_type = other DNA
atggagaccacccccctgaacagccagaagcagctgagcgcctgcgaggatggtgaggactgccaggagaacggggtcctgcagaaggtagtgcccacgcctggcgacaaggttgaaagcggacagataagtaatgggtactcggcagttccgagcccaggggccggagacgacaccagacacagcatacccgccaccacgaccacactcgtagccgaactgcaccagggggaaagagagacctggggaaagaaagttgactttcttctgagcgttattgggtacgccgtagacctgggaaatgtgtggagatttccctacatctgctaccagaatggaggcggagcgtttctcctgccttatacgattatggctatttttggtgggattcccttgttttacatggagctcgcactgggacagtaccatcgaaatggctgcattagcatttggagaaagatctgtccaatcttcaagggcatcggctatgctatttgtattatagccttctacatcgcgtcgtactacaatactattatggcctgggccctgtattatctaatatcgagctttacagatcagctgccgtggacatcttgtaagaacagctggaacacaggcaattgcaccaactatttctccgaggacaacattacctggaccttacattctacctccccggccgaggaattttacacacggcacgtcctccagattcatcggagcaagggactgcaggaccttggaggtataagttggcagttggctttgtgtatcatgctgatcttcaccgtgatctacttctcaatatggaagggcgtaaagacatctggcaaagtggtgtgggtcactgcaacatttccctacatcatactgagtgtgttactggttagaggtgctacactccccggggcttggagaggtgtgcttttttatcttaaacccaattggcaaaagctgcttgagaccggggtatggatcgacgcagcggcacagatcttcttctcgctcggccccggtttcggggtgctactggcatttgcctcttacaataagtttaacaacaactgctaccaggacgccctcgtgacctcagttgtgaactgcatgacctccttcgtgtcgggcttcgttatatttaccgtcctaggatacatggctgagatgagaaatgaagacgtgtctgaagtcgcaaaggatgctggcccgagcctactctttatcacctacgcggaagccatcgcgaatatgcctgcttcgacctttttcgctataatcttcttcctcatgcttattacgctgggtctggactcgacatttgctggattagagggcgtgatcaccgcagtgcttgacgagtttccccatgtttgggccaagagaagagagcggttcgttttagccgtcgtgatcacctgtttctttggaagcctggtcaccctgacattcggaggcgcctacgtggtgaaactgctggaagaatacgcaaccggacccgcggtgctgactgttgcactcatcgaggccgtagctgtgtcatggttctatggaatcacccaattctgtagagacgtcaaggagatgttaggcttttcccccgggtggttctggcggatctgttgggttgctatctcacctctgtttctcctctttatcatttgctccttcctcatgagccccccacagctgagattgtttcaatataactacccgtactggtccatcattcttggctactgcatcgggacatccagctttatctgtattccaacgtatatagcttatagacttataatcacccctggcacattcaaggagcggattatcaaatctatcaccccagaaacacccactgagatcccatgcggcgatattcgactgaacgccgtttag

SEQ ID NO: 206380 - DNA, 1863 bp, synthetic construct
  misc_feature 1..1863: note = Description of Artificial Sequence: Synthetic coding sequence
  source 1..1863: mol_type = other DNA
atggccaccaaggagaagctgcagtgcctgaaggacttccacaaggatatcttaaaacctagccctggaaagagccctggcacccgacccgaggacgaggccgagggaaagccacctcagcgggagaaatggagttctaaaattgactttgtgctgtcggtggcaggaggattcgtgggcttgggtaatgtgtggcggttcccctacctatgttacaagaacggcggaggcgctttcctgattccatactttattttcctgtttggctccggactgcctgtgtttttcttagagatcataattggccagtatacttcggagggggggataacctgttgggagaagatctgtccgttgttctctgggattggctacgcatctgtggtgattgtgtcgctgttgaacgtttattatatcgtaatcctggcatgggccacctactatctgttccagagcttccaaaaagagctgccctgggcgcactgtaaccactcctggaatactccccactgcatggaggatactatgcggaaaaataagtctgtatggatcaccattagttctaccaatttcacttcaccggtaattgaattttgggagaggaacgtattgagcttaagccccggaatcgatcaccctggttctctgaagtgggatctagccctctgcctgttgcttgtttggctagtctgctttttctgtatttggaagggcgtgaggtcgacagggaaggtcgtatatttcacagccacgttcccattcgctatgctgttagtccttctggtgcgtggactaactctgccaggggctggtgccggaatcaaattttacctgtaccccgatatcacgcgactcgaggacccccaggtgtggattgatgccggcacacagatattttttagctacgcaatctgcttaggagctatgacatctctggggtcctataataaatataagtacaattcctacagagattgcatgcttctgggatgtctcaatagtggtaccagcttcgtgagtgggttcgccatcttctcaattctgggattcatggctcaggagcaaggcgttgatatagccgacgtagctgaaagtggcccaggtcttgcattcatcgcctatcccaaggccgtgaccatgatgcccttgccaactttttggtccattctcttctttatcatgctgctccttctcggattggacagtcagtttgtggaggtggagggacagatcacctccctggtcgatctgtatccttcgtttctgcgtaaaggctatagaagggaaatcttcattgccttcgtgtgttccatcagctatttgctggggttgacaatggtgacggagggaggtatgtacgtttttcaactgtttgattattacgccgcatccggcgtctgcttgctgtgggtagcctttttcgaatgctttgtgatcgcctggatctatggcggagacaacctgtacgatgggattgaggatatgattgggtatcgccctgggccgtggatgaagtacagctgggctgtaatcaccccagtgctttgtgtcggctgtttcatattctccttggtaaagtatgtgccgctgacctataacaaaacctatgtgtacccgaattgggcaatagggctgggttggtccctcgctctatcgagcatgctctgcgtgcctttagtaatcgtcattaggctgtgtcagaccgagggccctttcctggtcagagtaaaatatttgctcactcccagagaacctaatcggtgggccgtagaacgagaaggggcaacgccttacaattcccgtacagtcatgaatggggctctggtgaagccgacccacatcatagtggagacaatgatgtag

SEQ ID NO: 206381 - DNA, 603 bp, synthetic construct
  misc_feature 1..603: note = Description of Artificial Sequence: Synthetic coding sequence
  source 1..603: mol_type = other DNA
atggccaccaaggagaagctgcagtgcctgaaggacttccacaaggatattctcaaaccctcgcccggcaaaagtcctggcactcgtcccgaagatgaagctgaagggaagcctccgcagagagagaagtggagcagcaaaattgacttcgtgttatcagttgccggcggctttgtgggcttggggaacgtctggaggtttccttacctttgctataagaacggaggcggtgccttccttattccatactttatctttttgttcggctcggggctccccgttttttttctcgaaatcataattggacagtatacttctgagggaggcataacatgttgggagaagatctgccccctcttttctggtattggctatgccagcgtggtcatagtgtccttgctcaacgtatattatatcgtcatccttgcctgggcaacatactatctgtttcagagtttccagaaggagctgccatgggctcattgcaaccacagttggaacacccctcattgtatggaagacacaatgaggaagaacaagtcggtttggataaccatcagcagcaccaatttcacctccccagtgattgaattttgggaatag

SEQ ID NO: 206382 - DNA, 1080 bp, synthetic construct
  misc_feature 1..1080: note = Description of Artificial Sequence: Synthetic coding sequence
  source 1..1080: mol_type = other DNA
atggccaccaaggagaagctgcagtgcctgaaggacttccacaaggatatcctgaaaccctcgcccggaaaaagtccaggcactaggccggaggatgaggccgaagggaaacctccacagagggagaaatggagcagcaaaattgacttcgtcctttctgttgccggcgggttcgttggcctcggaaatgtgtggcggttcccctatctgtgttataagaacggcggcggggcgtttttgattccatatttcattttcctgttcggctctggactacccgtgtttttcctcgagataattattgggcagtatacgtccgaggggggcattacttgttgggagaagatttgcccactattcagcggaatcggttacgcatcagtggtgattgtgtcgttactgaatgtctactatatcgtgatcctcgcctgggcaacctattacctgttccagagcttccaaaaagagttaccctgggcccactgtaaccactcttggaacacgcctcactgtatggaggacaccatgagaaagaataaaagcgtgtggatcaccatctcatccaccaattttacaagcccagtgatcgaattttgggaaagaaacgttctgagcttatcaccaggcattgatcatcctgggtccttgaagtgggatctggcactatgcctcttgctagtctggcttgtttgcttcttctgcatctggaagggggtgcgaagcacgggaaaagtagtctactttaccgccacatttcctttcgcaatgctgctggtcctgctggttaggggtctaaccttaccaggcgcaggagctggtatcaagttctatctgtacccagacatcaccaggctagaagatccacaagtctggattgatgcaggcacacagatcttcttctcatacgctatttgtttgggcgctatgacttctctgggctcatataataagtataagtacaattcttaccgtagttggccaggattgcactgcctcccaaaatcgtgcgataatgatgcggctgcacatattctggttcattctttcttttattatgcctctcttgcctggacgggatag

SEQ ID NO: 206383 - DNA, 330 bp, synthetic construct
  misc_feature 1..330: note = Description of Artificial Sequence: Synthetic coding sequence
  source 1..330: mol_type = other DNA
atggccaccaaggagaagctgcagtgcctgaaggacttccacaaggacattctgaaacccagtccaggcaaaagcccaggcaccaggccagaggacgaggcagaagggaaacctccacagcgggagaaatggagctccaaaatagattttgtcttaagcgtggccggtggctttgtcgggctgggtaatgtatggcgcttcccctacctctgctacaagaatggcggaggggcctttctaataccttattttatctttctgttcggaagcggattacctgtgtttttcctggaaataattatcggacaatacacctcagagggcggctag

SEQ ID NO: 206384 - DNA, 1863 bp, synthetic construct
  misc_feature 1..1863: note = Description of Artificial Sequence: Synthetic coding sequence
  source 1..1863: mol_type = other DNA
atggccaccaaggagaagctgcagtgcctgaaggacttccacaaggatattctgaaaccaagccccggcaaaagccctggcaccaggccagaagacgaagcagaaggtaagcccccccagagggagaaatggtccagcaagattgacttcgttttgtcggtggcaggagggttcgtgggacttggcaacgtgtggcggtttccatatttgtgttacaaaaacggggggggtgcctttctaataccctactttatttttctctttggctctgggctgcccgtgtttttccttgagatcatcatcgggcagtacacttctgaggggggaatcacatgctgggagaaaatctgccccctgttctccgggattgggtacgctagtgttgtgatcgtctcattgctcaatgtgtactatatcgtcatactggcctgggcaacgtactaccttttccagtcctttcaaaaggaactgccctgggcacattgcaatcacagctggaacacgccacactgcatggaagacaccatgcgcaagaataaatccgtttggatcaccattagctcgaccaacttcacttcccccgtgatagagttttgggagcggaacgtactaagtctctcccccggcattgatcaccccggcagccttaagtgggatttggccctgtgtctgctgctggtatggctcgtgtgctttttctgtatttggaaaggtgtgcggagtaccggcaaagtcgtttatttcacagccaccttccctttcgccatgttactggtgcttctggtccgcggcctgacactgcctggcgctggagcgggaattaaattctacttgtatcccgacattacgcgactggaagacccccaagtgtggattgacgcagggacccagatcttcttttcgtatgcaatttgcctgggcgccatgacctctctcggatcatacaataagtataagtataatagctaccgcgactgtatgctcttgggctgcctcaacagcggcacatccttcgtgtcaggcttcgcaatctttagcatactgggatttatggcacaagaacagggggtcgatatcgctgacgtggcagaatccgggccgggtctggcttttattgcctaccctaaggctgttaccatgatgcccttaccaactttctggtcgattctattcttcataatgctgctcctcctgggcttggacagccagtttgtggaagtggagggacagatcacttctctggtggacctctacccatcattcttacgaaaaggttataggcgagagatatttatcgcttttgtgtgtagtatatcctacttgctcgggctcacaatggtcacagagggtggaatgtacgtttttcagctctttgattactatgctgcctcgggagtctgcttgctgtgggttgctttcttcgagtgtttcgttatcgcttggatttacggaggggacaatctttatgacggcattgaggatatgatcggatataggccaggtccctggatgaagtatagctgggccgtgatcacacctgttctgtgcgtaggatgctttatcttttcactggtcaaatacgtgcctttgacttacaataagacctatgtatatcccaactgggccataggcctagggtggtccttagccttatctagcatgctttgtgtgcctctggtgattgtgatccgcctttgtcagactgagggtccatttctggtaagggtaaagtacctcctcacccctcgcgagccaaaccggtgggctgtcgagcgcgaaggcgctaccccctacaacagccgaaccgtgatgaacggcgcgctcgtaaagccaacccacattatcgtggagactatgatgtag

SEQ ID NO: 206385 - DNA, 1080 bp, synthetic construct
  misc_feature 1..1080: note = Description of Artificial Sequence: Synthetic coding sequence
  source 1..1080: mol_type = other DNA
atggccaccaaggagaagctgcagtgcctgaaggacttccacaaggatatcctgaagccttccccggggaaaagcccaggaaccaggccagaggatgaggccgaagggaaacctcctcaacgggaaaaatggtcaagtaaaatcgacttcgttttatctgtggctggaggctttgtgggcctcggaaacgtctggagatttccctacttgtgctacaagaacgggggcggggctttcctgataccctacttcatctttttgtttggatcaggactgccggtgttcttcttggaaattatcatcggacagtacactagtgaggggggcattacctgctgggaaaaaatatgccctctgttctcaggcattgggtatgcatcagtggtgattgtgtctttgcttaatgtgtattacattgtgatcctcgcctgggccacttactaccttttccagagctttcagaaagaactgccgtgggcacactgcaaccatagttggaatactccccactgcatggaggacaccatgcgcaagaacaagtcggtgtggattacaatttcctcaacgaacttcacaagtcccgtgatcgagttttgggagcggaacgttctcagcctgagtccaggcattgatcacccaggcagcctgaaatgggaccttgccctctgtctgctcctggtttggcttgtttgctttttctgtatttggaaaggcgtgcgctctactggtaaagtggtgtattttacagcaacatttccttttgcaatgctgttagtgttgctggtacgcggcttaactttacctggcgcaggagccgggattaagttctatctgtacccggacatcacccgtttggaggacccacaggtgtggatcgatgccggtactcagattttcttcagctacgctatctgcttgggggcgatgactagcctgggcagctataacaaatataaatacaacagctaccgctcatggccagggctccactgcctgccaaaatcctgcgataacgatgcggccgcacatatattggttcatagcttcttttattatgcgtctctcgcttggaccgggtag

SEQ ID NO: 206386 - DNA, 1905 bp, synthetic construct
  misc_feature 1..1905: note = Description of Artificial Sequence: Synthetic coding sequence
  source 1..1905: mol_type = other DNA
atggtgcggctggtgctgcccaaccccggcctggacgcccggatcccaagtctcgctgaactggagacaattgagcaagaagaggcttcttctcgaccgaaatgggataataaggctcagtacatgctcacttgcctcggattctgtgtcggcctgggtaatgtatggcggttcccgtatctatgtcagagccatggcggtggagcattcatgataccatttctaattctgttagtcctggaaggaatcccactcctctaccttgaatttgccatcggacagcgcctaagaaggggctccctgggcgtgtggtcgtcaatccaccctgccctgaagggcctggggttggcttccatgctcacctcgttcatggtagggctatactataataccatcattagctggatcatgtggtaccttttcaatagcttccaagaaccgctaccgtggtccgattgcccattaaatgagaatcagaccggctacgtggatgagtgtgcacggtcctcaccggtcgactacttttggtacagagaaaccttgaacatctctacctcaatcagtgactctggtagtatacagtggtggatgctcctttgtctggcatgcgcatggagtgttttgtatatgtgtacaatcagaggaattgaaacaaccggcaaggcggtctacattactagtactctgccatatgtagttctcaccatctttctcataaggggattgacgctcaaaggtgccacaaatggtattgtgttcctgtttacccccaacgtcactgaactggcgcagcccgatacctggctggacgcaggggctcaagtgtttttctccttttccctggcgttcgggggtctgatatcattttcttcctacaacagtgtgcataataactgtgaaaaggactcagtaattgttagcatcatcaacggattcacatccgtgtatgttgctatcgtggtctattctgttatcggatttcgcgcgacccagcgatacgacgattgtttttccacgaatattttgaccctcatcaacggcttcgacctgccagagggtaatgttacccaggagaattttgtcgacatgcagcagaggtgcaatgcttcagaccccgccgcatacgcacagctggtgtttcagacctgtgatattaatgcattcttgagcgaggccgttgaaggtacaggcctggcttttatcgtcttcaccgaggccatcaccaagatgcctctctccccactctggtccgtcctgttctttatcatgctgttctgtctgggtctgagctctatgttcgggaacatggaaggcgtcgttgttcctttgcaagatttacgggtgataccgccgaaatggcccaaggaggtgctgaccggtctcatttgtctgggaactttcttaattggattcatcttcaccttgaacagtggccagtattggctgtctttgctcgactcctatgctggttcaatcccactgctcatcatcgctttctgcgagatgtttagcgtagtttatgtgtatggcgtggaccgattcaataaggacatagagtttatgattggccataagccgaacattttttggcaggtgacatggcgcgtggtgtcaccccttctgatgctgattatctttctctttttctttgtggttgaagtctctcaggagctcacttactcaatctgggatcctggatacgaggaattccctaagtctcagaagatctcatatcccaactgggtatacgtggttgtcgtcattgtggcgggcgtgccttccctcaccatccctggatatgccatttataagctaattaggaaccattgccaaaagccaggcgatcaccaagggctagtgtctacattatctaccgcaagcatgaatggtgatctgaaatactag

SEQ ID NO: 206387 - DNA, 1668 bp, synthetic construct
  misc_feature 1..1668: note = Description of Artificial Sequence: Synthetic coding sequence
  source 1..1668: mol_type = other DNA
atggagaaggcccggcccctgtgggccaacagcctgcagttcgtgtttgcttgtatctcctacgctgtgggcctcgggaatgtatggagattcccatacctttgtcagatgtatgggggcggatcattcttggtcccttatataattatgctcatcgtggaaggtatgccgttgctgtatctggaattggctgtgggacagcgcatgagacaggggtcaatcggggcttggcgcaccataagcccatatttgtcaggtgtgggcgtggctagtgtcgtcgtcagcttttttctatcaatgtactataacgttattaacgcctgggcgttctggtacctcttccattctttccaggatccgctaccttggtctgtctgtcccctgaatggcaaccatacaggatacgacgaagaatgtgagaaagcctcctctactcagtacttctggtaccgcaaaaccttgaatatctccccttctctccaagagaacggaggcgtgcagtgggagccggccttatgcttgctgctagcgtggctcgttgtctacctttgcatcctcagggggaccgagtcaaccggcaagatcgagcagctcgccaatcccaaagcctggatcaatgctgccacccaaattttcttctcactgggccttgggttcggtagcctcatcgcgtttgcctcttacaatgagccctccaataattgccagaagcatgctatcattgtgagccttattaactcctttaccagcattttcgcgagtatcgtgacattctccatttatggctttaaagccacttttaattacgaaaattgcctaaaaaaagtgtccctgttgctgacaaatacctttgatctggaagacggctttcttaccgcaagcaacctagaacaggtgaaaggctacctggcatctgcctatcccagcaagtactccgagatgtttccccagatcaagaactgcagtctagagagcgagttggatacagccgtacaggggacaggcctggcctttatcgtgtacaccgaagccatcaagaacatggaggtttctcaattgtggtccgtgctctatttttttatgcttttaatgctaggcattggctcaatgttgggcaacacagcagccatacttacccccctgacagactcaaaaattatttcgagccatctcccaaaagaagccattagcggtctggtctgtttggttaattgcgccatcggtatggttttcacaatggaggccgggaactactggtttgatattttcaatgactatgcagccaccctgagtctcctcctgatcgtgctcgtcgagaccattgccgtctgctatgtgtatggactgcggaggttcgagagcgatctgaaggcaatgacagggagggcggtaagttggtattggaaagttatgtgggcaggggtgtcccctctgctaattgtgtcactgtttgttttctacctgagcgactatattctcacaggaactttaaaatatcaggcgtgggacgctagtcagggacagcttgtgaccaaggactaccctgcgtacgcattggctgtcattgggctgttggtggcctcatctaccatgtgcatccccctcgcagccttggggacattcgtccagcgacgcctgaaacgcggtgatgccgacccggtggcatag

SEQ ID NO: 206388 - DNA, 1779 bp, synthetic construct
  misc_feature 1..1779: note = Description of Artificial Sequence: Synthetic coding sequence
  source 1..1779: mol_type = other DNA
atggagaaggcccggcccctgtgggccaacagcctgcagttcgtgtttgcctgcatttcctatgcagtcggtctgggaaacgtctggagatttccctacttatgccaaatgtatggcggcggaagttttttagtgccctatatcatcatgctgatcgtggaaggcatgccattgctgtatctggaactggccgtaggccagaggatgcggcaaggaagtataggagcctggaggactatctcaccgtacttaagcggtgttggagtggccagtgtggtggtgtcctttttccttagcatgtactataatgtaatcaatgcatgggcattttggtatttgttccatagctttcaggatccattgccatggtccgtctgtccgctgaacggcaaccacactggatatgatgaggagtgcgagaaggcatcgtctacccagtatttctggtatagaaaaacacttaatatctcaccgtccctccaggaaaacgggggcgtccaatgggagccagctctctgtctcttgttggcctggctagtcgtgtacctctgtatcctgcgtgggaccgagtccaccggaaaagtggtgtacttcacagcctctctcccatattgtgtgctcatcatctatctgattcgggggctcacacttcatggagctacaaatggtttaatgtacatgtttactcctaaaatcgaacagctcgccaatcctaaggcgtggattaacgctgccacacaaatattcttctctctcgggctcggcttcggctccctgatcgcatttgccagttataacgagccaagcaacaactgtcagaaacatgccatcattgtgtcgttaattaacagctttacctccatcttcgcctctatagtcactttttccatctacggatttaaggccacatttaactacgaaaactgtctgaaaaaggtctctctgctgctaacaaacacatttgacctggaagatggctttctaaccgcctctaatctggagcaggtaaaggggtatcttgcctcagcctacccgtctaaatatagcgagatgtttccccagatcaagaactgttcactggaatccgaactggacaccgcggttcagggcactggacttgccttcattgtatacactgaggctatcaagaacatggaggtttcccagctatggagcgtgctgtacttttttatgttgctgatgctggggatagggtccatgctgggaaatacggcagccattttgaccccacttactgactcaaaaatcatctctagccatctcccaaaagaagctatatctggactggtgtgtctcgtgaactgcgcaatcggaatggtcttcacaatggaagctgggaattattggttcgatatctttaacgattacgctgctaccctgtctctgctactgattgtgctcgtcgaaactatagcggtctgttacgtttatgggttgcgccggtttgagtccgacctcaaagccatgactgggagagcagtcagctggtattggaaagtgatgtgggccggagtctccccactgttgattgtgtccctttttgttttctacctgtccgattacattctgacaggtaccctgaaataccaggcatgggatgcatcccagggacagctcgtcacgaaggactacccagcatatgctttggccgtgataggtctgcttgtggcgagtagcacaatgtgcatccctctggctgccctggggacattcgtccaacgacggctaaagcggggcgatgccgatccggtggcctag

SEQ ID NO: 206389 - DNA, 1644 bp, synthetic construct
  misc_feature 1..1644: note = Description of Artificial Sequence: Synthetic coding sequence
  source 1..1644: mol_type = other DNA
atggagaaggcccggcccctgtgggccaacagcctgcagttcgtgttcgcttgcatctcctacgccgtcggcttgggcaatgtatggaggtttccttatctgtgccaaatgtatggcggagggagtttccttgtgccgtacattatcatgctgattgtcgaaggcatgcccctactgtatctagagctggctgtgggacagcggatgcggcaaggtagcataggagcctggcgcaccatctctccctatttatctggggtgggagttgcgtctgtggtggtttcattctttctgagcatgtattataacgtcatcaacgcttgggctttctggtatctgtttcatagttttcaggaccctttaccttggtccgtgtgccctctgaatggtaatcatacaggttacgatgaagaatgtgagaaagcgagctctacacagtacttttggtacagaaaaaccttgaacatcagcccttccctgcaggagaacggaggcgtccagtgggagcctgcattgtgcttgcttctggcatggctcgtggtctatctatgcattctgcgggggaccgagtcgacagggaaagtggtctattttacagcttctcttccctattgcgtgctgattatttacctcatcagaggcctgactttgcatggcgctactaatgggctgatgtatatgtttacacctaagatcgagcagctcgcaaacccgaaggcttggatcaacgctgccactcagattttctttagcctgggtcttgggttcgggtcccttatagcattcgcaagttataatgagccatctaacaattgtcagaagcacgcgattattgttagtttgattaacagctttaccagcatttttgcgagcatagtgacattttcgatctatggattcaaagcaactttcaactatgagaactgcctgaaaaaagtgagtctcctgctaacgaacactttcgacctagaagacgggtttctgaccgcatccaatctggagcaggtcaaggggtacctggccagcgcttatcctagtaagtatagcgagatgttccctcagattaaaaattgctctctcgagtcagagctggatacggcagtccagggtaccgggctggcgtttattgtttacacagaagcgatcaaaaatatggaagtgtcacagctgtggagcgtgctttatttttttatgctgctcatgctaggtatcggtagcatgttggggaacacagccgccatcctgacacctttgaccgattctaaaatcatctcttcccacctgcccaaggaggcaatatccggactagtatgtctggttaattgcgcaattgggatggtgtttacaatggaggcagggaattattggttcgacatatttaatgattacgccgccacgctatcccttctgctgattgtgctggtggagaccatagccgtatgctacgtctacgggctaaggcggttcgagtccgatctcaaagccatgaccgggagggccgtatcatggtattggaaagttatgtgggcgggggtgagcccgctgctcatcgtgtccctttttgttttctacctctccgattacatcctgaccggcacacttaagtatcaggcctgggatgctagccaggatgataagttatag

SEQ ID NO: 206390 - DNA, 1194 bp, synthetic construct
  misc_feature 1..1194: note = Description of Artificial Sequence: Synthetic coding sequence
  source 1..1194: mol_type = other DNA
atggcccacgcccccgagcccgaccccgccgcctgcgacctgggcgacgagaggccaaaatgggacaataaagcacaatatttactgtcctgtaccggctttgctgtgggccttggtaatatctggcgattcccctacttgtgtcagacctacggtggtggagcctttctgattccgtatgtcattgccctcgtattcgagggcatcccgatctttcacgttgagctggccattggacagagacttagaaagggcagtgttggtgtgtggacagcaatcagtccatacctttccggggtggggctgggctgtgtgactttgtctttcttgatttctctctactacaacaccattgtggcttgggtcctgtggtacctgttaaattccttccagcacccactcccctggagctcgtgtcctcctgatctcaacagaacaggtttcgtggaggaatgccagggatcttccgccgtatcttacttctggtaccgacagaccctgaatatcactgctgacattaatgattccggatccattcaatggtggctcttgatctgccttgcagccagttgggctgttgtgtacatgtgtgtaattcgagggatcgagacaacgggcaaggtgatatactttaccgccttgttcccttaccttgtgctcaccatttttctcatcagaggtctgactctgcccggcgccacgaaagggctgatatacctgttcacaccaaacaaccccagggtgtggctagatgcagcaactcagatcttctttagcctctctctggccttcgggggccacattgcctttgcgtcttataactcgcctagaaacgattgccaaaaggacgccgtggtcatagcgctcgttaatagaatgactagtctatatgcgtctattgctgttttttctgtgttaggtgcgtccgggcctggacttgcttttgttgtgttcacagagaccgatctgcacatgccaggggcacctgtgtgggccatgctgtttttcggtatgcttttcaccctcggcttgagcaccatgttcggtaccgtggaggccgtgataacacctcttttggattcggggaattattggttggagattttcgacaattttgccgcctctcccaatctactgatgctcgctttcttggaagtggttggggtggtgtacgtttatggcatgaagcgctag

SEQ ID NO: 206391 - DNA, 1887 bp, synthetic construct
  misc_feature 1..1887: note = Description of Artificial Sequence: Synthetic coding sequence
  source 1..1887: mol_type = other DNA
atggcccacgcccccgagcccgaccccgccgcctgcgacctgggcgatgagcgacccaaatgggataacaaagcacaatacctgctctcttgtacagggttcgcggtaggacttgggaacatatggagattcccttacctctgccagacttacggcgggggcgcttttttaattccctatgttatcgcactcgtgttcgagggtataccaatatttcatgttgagctcgcaattggtcagcgacttcgcaaaggctctgtcggcgtgtggacagcaatctccccctacttgagtggggtgggtttgggttgtgtgacattaagttttctgattagtctgtattacaataccattgtcgcttgggtgttatggtacctgctgaactccttccagcaccccctgccttggtcctcctgccccccagacttaaatcgcacaggtttcgtcgaggagtgccaaggcagctcagcggtctcttatttttggtatcgccagactctcaacatcaccgcggacatcaatgactccgggtccatccagtggtggcttctgatttgtctggcggccagctgggctgtcgtgtatatgtgcgtgatacgtggaatcgaaacgaccggcaaagttatttatttcaccgcactgttcccatatttggtcctgacgatattcctgatcaggggtcttacgctgcccggcgccaccaagggactcatctatctctttactcctaacatgcacatcctccagaaccctcgggtgtggctggacgccgcaactcagatcttcttcagcctgtccctagcctttgggggccacattgccttcgcatcttacaattccccacggaacgactgccagaaggacgctgtggtgatcgcactggtgaatcgcatgacctcactatatgctagcatagctgtgttttccgttctcggattcaaggcgactaacgactacgagcactgtctcgataggaatatcctgtccctgatcaatgattttgactttcctgaacagtccattagcagggacgactatccagcagttctgatgcatctcaacgcaacatggcctaagagggtggcgcagctgcctctgaaagcttgcctgttggaggacttcctcgacaaaagtgcttctggccccggcctcgctttcgtggtctttacggaaacagatttgcatatgcctggggctccagtgtgggcaatgcttttcttcggcatgttattcactttaggcctctctacgatgtttggtaccgttgaggcggtcatcacaccgctgctggacgtcggcgtcctgccccgctgggttcccaaagaagccctgaccggtctagtatgcctcgtgtgctttcttagcgccacatgcttcaccctgcagtccggtaactattggctcgaaattttcgataacttcgccgcaagtccaaacctgctgatgctggcctttctggaagttgtcggggtcgtgtacgtgtatggaatgaagcgcttctgtgatgatatagcctggatgacaggtcggcgaccttctccttactggcggctgacatggagggtggtttctcccctcctgctgacgatcttcgtcgcctatatcatcctgttgttctggaagcctcttagatacaaggcatggaaccccaaatacgagttgtttccctcaagacaggaaaagctttacccaggttgggctagagcagcatgtgtcctgctctccctgcttccagttttgtgggttcccgtggcagcgctggctcaacttttgacccgccgccgccgcacctggcgcgaccgggacgcacgtcccgatacagacatgaggcccgacactgacacccgccctgacactgacatgaggccggatacagacatgaggtag

SEQ ID NO: 206392 - DNA, 1548 bp, synthetic construct
  misc_feature 1..1548: note = Description of Artificial Sequence: Synthetic coding sequence
  source 1..1548: mol_type = other DNA
atggaggcccgggagcccggccggcccacccccacctaccacctggtacctaacacaagtcagtctcaggtggaggaagacgtgtcttctcccccccagcgcagcagcgaaacaatgcagctgaagaaggagatctctttgctcaatggagtaagcttggtggttggcaatatgattgggtcgggcatttttgtgtcacccaagggcgttttagtacataccgccagctatggcatgtccctgatagtgtgggccataggcggtctgttcagcgtagtgggggccctgtgctacgcagaacttggaactaccatcacgaagtcaggcgcaagctacgcatatattctggaggccttcggcggttttattgcttttattcgactttgggtgagcctactcgtggtcgagccaaccggccaggccataattgctattaccttcgccaactacatcatacagccctcatttccctcttgtgacccaccttacctagcatgtcgacttctggccgcggcttgcatctgcctcctcacctttgtgaattgcgcgtatgtgaaatggggcactcgggtgcaggacacttttacgtatgcaaaggtggttgcccttattgccatcattgtcatgggcctagtgaaactctgtcaaggacactctgagcacttccaagacgctttcgaaggcagtagttgggacatgggcaatcttagcctggcattgtattctgcactcttctcgtactctggctgggacaccctgaatttcgtcacggaagagatcaagaatcctgagaggaacttgccgctagctatcggaataagtatgcctatcgtgaccctgatttatatcttaaccaatgtcgcatactataccgtccttaacattagtgatgtgctttcttccgatgccgtagccgtcacatttgcagaccagactttcggcatgttctcctggaccattccgatcgcagtggcgctgtcttgtttcgggggacttaatgcttcgattttcgcgagctcccgactattcttcgtcggctcacgggaaggtcacctcccagacctgctttcaatgatccacattgagcgttttacaccaatccccgcactgctcttcaattgtaccatggccttaatttacttgattgttgaagacgtgtttcagctcatcaactacttctccttctcttactggttctttgtgggcctgtccgtcgtgggccaactgtacctgagatggaaagaaccgaagcgcccacgaccattgaagctttccgttttcttccccatcgtgttctgtatctgcagtgttttcctcgtaatcgttcctttgttcacagacacaatcaattcgctgatcggaattggaatcgccctgtcgggtgtgcccttctacttcatgggcgtgtacctccccgaatcccggagacctttattcattcgaaatgtgctggctgctatcaccaggggcacacagcagctttgtttttgtgttctcacagagctggacgtggctgaggaaaagaaggacgagcgaaagactgattag

SEQ ID NO: 206393 - DNA, 1524 bp, synthetic construct
  misc_feature 1..1524: note = Description of Artificial Sequence: Synthetic coding sequence
  source 1..1524: mol_type = other DNA
atggccggcgccggccccaagcggcgggccctggccgcccccgccgccgaggagaaagaagaggcccgcgagaagatgctggcggctaagtccgcggatggctcggcccccgctggcgagggtgagggcgtcacactccagaggaacataaccctgctgaacggtgtggcaatcatcgtcggcacgataatcggctccggcatatttgtgacaccgacgggagtgctgaaagaagctggttcccccgggctggccttggtggtctgggctgcatgtggtgtattctctatcgtcggtgcattatgctacgccgaactagggaccacaatcagcaaatctggtggagactacgcctatatgctcgaggtttatggctcactacctgcatttctgaagttatggatagagctgctgattataagacctagctctcagtacatagtcgcgttagtttttgctacatatctgctcaagcccctcttcccaacctgcccagtgcctgaggaagcggccaagctggtggcctgtctgtgtgtcctcttactgaccgccgtaaactgctactcggtgaaagccgctaccagggttcaggacgcatttgccgcagcaaagcttctggctttggccttaattattcttctgggatttgtccagataggaaagggggatgtgtcaaacctcgacccaaacttctcattcgaaggcacaaaactcgacgtgggtaatattgtactggcactctactccggcctcttcgcatacggcggctggaattacctgaacttcgtgactgaggagatgataaacccctataggaatctgcctctcgccatcattatttctctgccgattgtgacgctcgtgtacgtgctgaccaaccttgcttactttactacgctttctacggagcagatgctctcatccgaggccgtagcggtagatttcggaaactaccatttgggcgttatgtcatggataatccctgtcttcgtaggtctcagctgttttgggtccgtcaatgggtccctgtttacatcctcgcgcctgttcttcgtgggctctagagagggccatctgccatctatactctcaatgatacacccccagcttttgactccagtcccatcactggtattcacatgtgtgatgacattactttatgcattcagtaaggatatattttctgtgatcaactttttcagttttttcaactggctgtgtgtggcgttagcaattatcggaatgatttggctgcgtcaccgcaaaccagagctcgaacggcctataaaggtgaatctagctctacctgtgttctttattcttgcatgtctgtttcttatcgctgtcagcttttggaagacgccagtcgaatgtggcatcgggttcaccattattttaagcgggctgccagtgtacttcttcggtgtgtggtggaagaacaagccaaagtggctgcttcagggtatcttttcgaccactgtcctatgccagaaattgatgcaagtggtcccccaggagacctag

SEQ ID NO: 206394 - DNA, 846 bp, synthetic construct
  misc_feature 1..846: note = Description of Artificial Sequence: Synthetic coding sequence
  source 1..846: mol_type = other DNA
atgagccacggcacctactacgagtgcgagccccggggcggccagcagcctttggaattctccgggggaagggccggtcccggtgagctgggagacatgtgtgaacacgaagcatcgattgatctgagtgcatacatagaatccggcgaggagcagctgttgagcgacctatttgccgtaaaaccggccccagaggcccggggcctcaaagggcccggcacccctgcttttccacactatctcccacccgaccctaggcccttcgcctatccccctcacacattcggacccgatcggaaggcgctgggccccggaatttactcttctccaggcagttatgacccacgggctgtggcggtgaaggaggaaccgcgaggacctgaaggctcaagagcagcatcgcgcggatcctacaacccactgcagtaccaggttgcgcattgtgggcagactgcaatgcacctgccccccactctcgccgccccagggcaacctctacgggtgttaaaggctccactggccactgcggcacctccatgtagtccgctcctcaaagctccttcccctgccggcccactgcacaagggtaaaaaggccgtgaataaagacagtttggaatatcgtctgaggcgcgagaggaacaacatcgctgttcgaaaatctcgtgacaaggccaagcgtagaatcctggagacacagcagaaagtgttggaatacatggcagaaaacgagcgcttgcgctctcgcgtagaacagctcacccaggagctggacacccttcggaatctgtttcggcagataccagaggccgcaaatctgatcaagggtgtcgggggatgttcctag

SEQ ID NO: 206395 - DNA, 1608 bp, synthetic construct
  misc_feature 1..1608: note = Description of Artificial Sequence: Synthetic coding sequence
  source 1..1608: mol_type = other DNA
atggaggagggcgcccggcaccggaacaacaccgagaagaagcaccctggggggggtgagagcgacgcatctccagaggcagggtccgggggaggtggcgttgccctgaagaaagaaattggcttagtgtctgcatgtgggatcattgtcggaaatatcataggctcaggaatattcgtgagtcccaagggtgtcctggaaaacgcaggctctgtcgggctcgcgctcatcgtttggattgtgacaggattcattactgtggtgggggcgttgtgctatgccgagctgggggtcaccattccaaagtcgggaggcgactacagctatgtaaaggatatatttggcggcctggccggctttctgaggctgtggattgccgttctagttatttaccctaccaaccaggcggtgattgcattgaccttttcaaactatgttcttcagccattattccctacctgtttcccccctgagtcagggttaagactattggcggcgatctgtctgctgctgctcacatgggtgaattgttcatccgtccgttgggctacaagggtacaggatatattcaccgctgggaagttattagccctcgccttgattattatcatgggaatcgtgcagatatgtaaaggggagtatttttggcttgaaccaaagaatgcatttgaaaacttccaggagccggatatcgggctggtggcccttgccttcctccaagggagtttcgcatacgggggctggaacttcctcaattatgtgaccgaggaactggtggacccctataaaaatctgccaagagcgatcttcattagtattcctttggtcacattcgtttacgtctttgcaaatgttgcatacgtaacagccatgtctcctcaggagctgttggcgtccaacgcggtcgcagtgacatttggggaaaagttgttgggtgtcatggcctggatcatgcccatttctgtggcacttagtacattcggaggtgtgaatgggtctctgttcacctctagtcgcctctttttcgccggtgctcgtgagggccaccttcctagcgtgcttgccatgatccatgttaaacgctgcactcctatcccagcgctcttattcacttgcattagcaccctgctcatgctggttacgtcagatatgtacactttaattaattacgtcggctttattaactatctgttctacggtgtgaccgtggctggccagatcgtgttgcgatggaaaaaaccagatattcctagacctattaagattaaccttctgttccctattatttatctacttttttgggcttttctgctggtgttctccctctggagtgagcccgtcgtgtgtggaattggcctggccatcatgttgaccggcgtgcccgtgtacttcctgggcgtttactggcagcataagccaaagtgcttttctgacttcatcgaactgttaacactcgtgtctcagaagatgtgtgtcgttgtgtacccagaggttgaacgggggagtgggacggaagaggccaacgaggacatggaggagcagcaacagcccatgtatcagcctacgccaaccaaagataaagacgtagccgggcagccccagccatag

SEQ ID NO: 206396 - DNA, 633 bp, synthetic construct
  misc_feature 1..633: note = Description of Artificial Sequence: Synthetic coding sequence
  source 1..633: mol_type = other DNA
atgggcatcgtgcagatctgcaagggcgagtacttctggctggagccaaagaatgcgttcgagaactttcaggagccggacatcggacttgtggcactggccttcctgcagggctcattcgcttatggaggctggaactttttgaattatgttaccgaggagctcgttgacccatacaagaacctccctcgtgccatcttcatttctatacccttagttaccttcgtgtacgttttcgcaaatgtggcgtatgttacagcaatgtcgccccaggagcttctggcttctaatgctgttgcagtgacatttggcgaaaaactattgggggtgatggcctggataatgcctattagcgttgcactgtccacatttggtggggtgaacggaagcttgcacctgttgagcgcagtgttaagatggtcaccgcgggggccccctagtcagtgcgtgggacatgacccgcgcgaggctctccatcctaaccctagtcccgctcttcatatgcatctccacccagctgacgctggtcaccaacggcatgtgcacactcaccaactctgtgggctgcaccagctgcccttgttatgggggcatggctgttggacagattcgccctccctggaagaggcatag

SEQ ID NO: 206397 - DNA, 693 bp, synthetic construct
  misc_feature 1..693: note = Description of Artificial Sequence: Synthetic coding sequence
  source 1..693: mol_type = other DNA
tgatgcctgcaggagcacagccagcccagccagctgctgtgcaccctgctcctgtgttggtgcgtgctaggccgagagcgcccttttaggaaagcccagtctacaagctcacctctggaaggcgtgccccgcttcctgaagaggctattgctgacatgggttaactgttcaagcgtacgctgggccactagagtacaggacatctttactgccggcaagctgctggcattggccctcattataattatgggaattgtgcagatttgcaagggagaatacttctggttggagcccaaaaacgcttttgaaaactttcaggaacccgatattggactagtggccctggcttttttgcaggggtcgttcgcctacggtggatggaacttccttaactatgtaactgaggagcttgtggatccgtacaaactgttcttcgcaggagcccgcgaggggcacttaccaagcgtgcttgccatgatccacgtgaaaaggtgcacacccattcctgccctgcttttcacgtgtatttcaactctgctgatgctagtcacatccgacatgtatactctgattaactatgtggggttcattaactacctgttctacggagtcaccgtcgcagggcagattgttctgagatggaaaaagcccgatatacctagacctattaagcctcttccttatcagggatag

SEQ ID NO: 206398 - DNA, 936 bp, synthetic construct
  misc_feature 1..936: note = Description of Artificial Sequence: Synthetic coding sequence
  source 1..936: mol_type = other DNA
atgggccagctgttccagtgcgccgtgggccaccccggcagccggcacctacactcatgggaggcccctggactgggtccagactatcatcatggagactgtacagatatgcagcgcaatctcccccgggccatctttatatctattccgctggtgactttcgtgtacgttttcgcaaatgtcgcctatgtaacggctatgtcgccacaagagctgctagcaagcaacgcagtggcagtgacctttggcgaaaagctgctgggcgtcatggcatggataatgcccatttcagttgccctatcaacgtttggtggtgtaaatggaagcctatttaccagtagtaggctcttctttgccggtgcgcgtgaaggtcacctgcccagtgtgttggcgatgatccacgtcaaacgctgcacgcccattccagctctcctatttacttgtatctcgaccctcctgatgctagttactagcgacatgtataccctgattaattatgttggtttcatcaactatcttttttacggcgtaactgttgccggccaaatcgtgttgcgctggaagaagccggatataccgcggcccattaagatcaatctactgtttcccattatatatttgttgttctgggcgttccttctcgtgtttagtctctggtctgagcccgtggtctgcggcatcggactcgccatcatgctaacaggcgtacccgtttactttcttggagtttactggcagcacaagccgaagtgcttcagcgacttcatcgaacttttgaccctcgtatcccaaaagatgtgtgttgttgtttatccggaagtggagagagggtcaggcaccgaggaggcgaacgaggacatggaggaacaacagcaacccatgtaccaaccgacgccgaccaaagataaggatgtagcaggtcagccccaaccttag

SEQ ID NO: 206399 - DNA, 999 bp, synthetic construct
  misc_feature 1..999: note = Description of Artificial Sequence: Synthetic coding sequence
  source 1..999: mol_type = other DNA
atgggcatcgtgcagatctgcaagggcgagtacttctggctggagccaaagaatgctttcgaaaattttcaggagccggatataggcctggtggcccttgcatttctgcagggatccttcgcctatgggggctggaatttcctgaactacgtgaccgaggaactggtggatccttataagaacctccctagggctatcttcattagcattcctctggtcacattcgtctatgtgtttgctaacgtcgcgtacgtcactgctatgagtccacaggagctcctcgcttctaacgccgttgctgtgacatttggagagaagctgctcggcgtgatggcctggattatgccaatttctgtggccctgtcaacttttggcggtgtgaacggatccctgtttacgagcagtaggctgttctttgctggcgcccgggaggggcacctgccatcagtgctggccatgatccacgtcaagaggtgtactccaatccctgctctgctatttacttgcatctcaacgctactcatgctggtaacttccgacatgtatactctcatcaactatgttgggttcattaactaccttttctacggagtcaccgtggccggacagattgttctgaggtggaagaagcccgatattccccgccctataaagatcaacttactgttcccaatcatataccttcttttctgggctttcctccttgttttcagcctctggagtgagccagtggtctgcggaattggtctggccatcatgctgaccggcgtgcctgtttacttcctgggagtgtactggcagcacaaacctaagtgcttttcggattttatcgagcttcttaccctggtgagtcaaaaaatgtgtgtagtggtctaccccgaggttgagagaggttctggaacagaagaagccaacgaagacatggaggaacaacagcaaccgatgtatcagcctacacccaccaaagacaaggacgtggccggtcagcctcaaccttag

SEQ ID NO: 206400 - DNA, 285 bp, synthetic construct
  misc_feature 1..285: note = Description of Artificial Sequence: Synthetic coding sequence
  source 1..285: mol_type = other DNA
atggaggagggcgcccggcaccggaacaacaccgagaagaagcacccgggtggtggggaatctgacgcctcccccgaagcggggtccggagggggcggggtggccctgaagaaagaaatagggctggtgagtgcttgtggcatcatcgttggtaacatcattgggagcggaatctttgttagtcccaagggcgtcctggagaacgccgggagtgtggggctcgcgttgattgtttggattgtgacaggctttatcacagtagtgggtgccctttgttatgcgtag

SEQ ID NO: 206401 - DNA, 237 bp, synthetic construct
  misc_feature 1..237: note = Description of Artificial Sequence: Synthetic coding sequence
  source 1..237: mol_type = other DNA
atggaggagggcgcccggcaccggaacaacaccgagaagaagcaccctggggggggtgagtctgatgcctcacccgaagccggcagtggagggggcggcgtcgccctcaaaaaggagatcgggctggtgtctgcatgtggaataatcgtaggaaatatcataggttccggtatatttgtctcacctaaaggggtgctcgaaaatgctggttcagttggcttggccttgatcgtctag

SEQ ID NO: 206402 - DNA, 1293 bp, synthetic construct
  misc_feature 1..1293: note = Description of Artificial Sequence: Synthetic coding sequence
  source 1..1293: mol_type = other DNA
atgggccagtacggccaggagctgagctggaagtgcctggtgaaggcagtgtgcctgcaggagcattcgcaacctagccagcttctctgcacactgctgttgtgctggtgtgtgttggggcgcgagcgacccttccgcaaagcacagagcacctcctcccctctggaaggcgtgccacggtttctaaagaggctgctgctaacatgggttaattgtagctcagtaagatgggccacccgggtccaggacatttttacagccgggaaactgctggccctggccctgatcatcatcatgggcatcgtccagatatgcaagggagaatacttttggcttgagccgaagaatgcatttgagaactttcaggaaccagacattggactcgtcgccctggcctttttacagggctcattcgcatatgggggatggaacttcctgaattacgtcacagaggagttggtggacccttacaagaacttgccacgggccatatttatatctatccccttggtgacttttgtttacgtctttgccaatgtggcttacgtcactgcgatgtctccacaggaattgttagcttctaacgcagttgcagttactttcggtgagaaactgctgggagtgatggcatggatcatgcctatctcagtcgccctgtcaacgttcggtggcgtgaatggtagcctgtttactagttcaaggttatttttcgccggcgcccgggaggggcatctccctagcgttctggctatgatccatgtgaaaagatgcacccccattcccgctcttctgtttacatgcattagcactctgctgatgttagtgactagtgacatgtataccctaatcaactatgtcggatttattaactatctcttctacggtgtgaccgtggcaggccaaatcgtgttgaggtggaaaaaacccgatattcctcgcccgatcaaaatcaatcttcttttccctatcatctacctcctgttctgggctttcctgcttgtcttcagcctgtggtcagagccggtcgtctgcgggataggactcgccatcatgctgaccggcgtccccgtctacttcctgggcgtatattggcagcacaagccaaaatgcttctctgacttcatagagctcttgaccctggtctctcaaaagatgtgcgtggtggtgtatccagaggtggaaagaggatctggtaccgaagaagctaatgaggatatggaggaacagcaacagcctatgtaccaacccactccaactaaggataaagacgtcgccggacaacctcagccatag

SEQ ID NO: 206403 - DNA, 1968 bp, synthetic construct
  misc_feature 1..1968: note = Description of Artificial Sequence: Synthetic coding sequence
  source 1..1968: mol_type = other DNA
atggtgctgtacaccacccccttccccaacagctgcctgagcgccttgcactgcgtgagttgggctcttatcttcccctgctactggctcgtggacaggctggccgcttccttcatccctaccacttatgagaagaggcagagggccgacgacccctgttgcctgcagttgttgtgtactgcgttgtttacgcccatctatttggctctgctggtggctagcctgccctttgcttttctgggctttcttttctggagtccactgcagtctgcaaggcgtccctacatctactcgcgccttgaggacaaaggacttgcaggaggggctgctctcctgagcgaatggaagggcactgggcccgggaaaagcttttgctttgctacagccaacgtttgtctgttacctgatagcttggcacgtgtgaacaacctgtttaacacgcaggctcgagctaaggagattgggcagagaattaggaatggagctgctagaccccagataaagatctacatcgactcacccaccaacacctccatatccgccgctagctttagtagcctggtgagccctcagggcggtgatggggtggcacgggccgtccccggatcaatcaagcgaactgcctccgtcgagtacaagggcgacgggggccgccacccgggagatgaggccgcaaacggaccagcaagtggtgatccagtggatagctcctccccagaggatgcttgtatcgtccggatcgggggggaggaaggggggaggcctcctgaggctgatgatcctgtacccggtggccaggcaaggaatggcgctggcggagggccccgaggccaaaccccaaatcataaccagcaggatggcgatagtggcagcctgggaagcccctcagcatcacgcgagagcctggtgaagggtagagcggggcccgatacctcggctagcggagaaccaggagcaaactcaaaactattgtacaaagctagtgtcgtgaaaaaagccgcagcgagacggagacgccaccccgatgaagcctttgaccatgaggttagcgccttcttccctgcaaacctggacttcttatgcttacaggaggtttttgataaaagagccgctaccaaactcaaggagcaactgcacgggtattttgaatacatactatatgacgtcggggtgtacggatgtcaagggtgttgcagcttcaagtgtctgaactccggcctgttatttgccagccggtatcctattatggacgtggcataccattgctatcctaataagtgtaacgatgatgcactagctagtaagggcgccttatttttgaaggtgcaggttggctcaacaccccaggatcagcgcattgtggggtatatcgcctgtactcacctgcacgccccgcaggaagattccgctataagatgtggacagctggacctgctgcaggactggctggccgattttcggaagtccactagcagctccagtgccgctaaccctgaagaactagtggccttcgatgttgtttgcggagattttaactttgacaactgttctagcgacgataaattggagcaacagcactccctgttcacccactaccgggatccctgtcggctcggtcctggagaggaaaagccctgggctattggtactctgttggacacaaatggcctgtacgacgaggatgtgtgcacaccagacaacctgcagaaggtgttagaatccgaggagggacgaagggagtatctggctttcccaacctcaaaaagtagtgggcagaaaggcagaaaggagttgctgaaaggcaatggccgccggattgattacatgttgcacgctgaagagggattatgtcctgactggaaagccgaagtcgaagaattctccttcatcacccaattaagtgggctcacagaccacctccccgtggccatgaggttaatggtaagcagtggtgaggaagaagcctag

SEQ ID NO: 206404 - DNA, 690 bp, synthetic construct
  misc_feature 1..690: note = Description of Artificial Sequence: Synthetic coding sequence
  source 1..690: mol_type = other DNA
atggaggcccgggagcccggccggcccacccccacctaccacctggtgcctaacaccagtcagagccaggtcgaggaagatgtctctagtccgccccagcgcagctccgaaacaatgcaattaaagaaggagatttcactgctgaatggtgtgtccctagtcgtgggcaatatgataggcagtggcatctttgtgagcccaaaaggtgtgctggttcatacggcgagctacggtatgagcctcatcgtctgggccatagggggcttgttttccgtggtgggagccttgtgttacgcggagctgggcactactataactaagtcaggggcatcctacgcgtatatactagaagccttcgggggctttatagccttcatacgtctctgggtgagtctcctggtggtggaacctactgggcaggcgatcatcgctattacattcgccaactatatcattcaaccctcttttcctagctgtgacccaccctaccttgcatgtagactgctggccgccgcgtgtatttgtctgctaaccttcgtgaactgcgcgtacgtaaaatggggcacacgagtacaagatacctttacctatgcgaaagtcgtggctctgattgctataattgtgatgggactggttaaactttgccaagagatatgcccctggcccctcgggttcctgtgccaactgtag

SEQ ID NO: 206405 - DNA, 1536 bp, synthetic construct
  misc_feature 1..1536: note = Description of Artificial Sequence: Synthetic coding sequence
  source 1..1536: mol_type = other DNA
atggtggacagcaccgagtacgaggtggccagccagcccgaggtggagaccagtcccctgggagatggagcaagtcccggacccgaacaggtgaagctcaagaaagaaatcagcctcctcaatggcgtatgcctgatcgtgggaaacatgattgggagtggcatctttgtgtctcctaagggcgtgctgatttactccgcgagcttcggactgtctctcgttatttgggccgttggaggtctgttcagcgtcttcggcgctctgtgctatgccgagctcgggacaaccatcaagaagtccggggcctcctacgcatacatccttgaagccttcgggggatttctggcttttattcggctgtggaccagcctgctcatcatcgaacctacttcacaggccatcatcgccatcacttttgccaattatatggtgcagccgctgttccccagctgcttcgccccatacgccgcgagtcggcttctggcagccgcttgcatctgtcttctgacattcattaattgtgcctacgtaaaatggggcacccttgtgcaggacatttttacctatgcaaaagttttagccctcatcgcggtcatcgttgctgggatcgtcagattgggccagggagccagcactcattttgaaaatagtttcgagggttccagtttcgctgtgggcgatatcgctctggctttgtacagtgccctgttttcatactctgggtgggatacactgaactacgtgactgaagagatcaagaaccccgagcgaaacctgcccctctcaattgggattagtatgccaattgtcacaatcatctacattcttaccaatgtagcctactacacagtcttggatatgagggacatcctggcaagtgacgcggtcgccgtcacgtttgctgatcagatatttggcatatttaactggattatacctctgtcagtagcactgtcttgtttcggcggcctaaatgcctcaattgtcgccgcctcgagactcttcttcgtgggatccagagaaggccacctgccagacgccatttgcatgattcacgtggagcgtttcactccggtgccctccttactgttcaatggcattatggcactgatctatctgtgcgttgaagacatcttccagttgatcaattactacagcttctcatattggttttttgtgggtttgtcaatcgtggggcagctgtatttgcgttggaaagaacccgaccgaccacgtcctttaaagctgtcagttttcttccctattgtgttctgtctatgcacgatctttctggttgctgtgcccctgtatagcgacactatcaactccctgataggcatcgccattgccttgtctggacttcccttttactttctaatcatccgcgtacctgagcacaagaggcccctctatctcagaaggatcgtgggctcagcaaccaggtatttgcaggtcctgtgcatgagtgtagccgcagagatggaccttgaggatggaggggaaatgccgaagcagcgagacccaaaaagcaactag

SEQ ID NO: 206406 - DNA, 1536 bp, synthetic construct
  misc_feature 1..1536: note = Description of Artificial Sequence: Synthetic coding sequence
  source 1..1536: mol_type = other DNA
atggtggacagcaccgagtacgaggtggccagccagcccgaggtggagacttctcctctgggagacggagccagtcctggacctgagcaggtcaaactgaagaaagagatctcactcttgaacggggtgtgcctgatagtaggcaacatgatcggctccggtatatttgtgagtcccaaaggagtgctcatctacagcgcatcttttgggctttccctggtgatttgggccgtgggggggcttttcagcgtctttggagcactgtgttacgcagagctaggcacaactataaaaaagagcggggcgtcttacgcgtacatactcgaagccttcgggggattcttggcttttatacggctgtggacgtcactgctgatcatcgagccaacgtcccaggccattatcgcaatcaccttcgcaaactatatggtacagccactcttcccttcatgcttcgccccctacgcagcttctagactgttggccgccgcctgcatttgtcttttgacattcatcaattgcgcatacgtcaagtggggcacactggtgcaggatatcttcacctacgccaaggtcctggccctcatagcggttatcgtagctggcattgtgagactcggtcagggcgcaagtacccatttcgagaattcattcgaaggttcatccttcgccgtcggggatatcgctctcgctctctactcagcattgttttcctactctggttgggacactctaaattatgttacagaagagataaagaaccctgaacgaaacctgcccttgagcatagggatttctatgcctatcgtcactatcatctacatcctgacgaatgtggcatactacacagtgctcgatatgcgggacatcttggcgtcagacgccgtggcagtgacctttgccgatcagatattcggaatctttaattggataatccccctttctgtggccctgagttgtttcggaggcttgaacgcttcaatcgtggcggcttccaggctgttcttcgtgggcagccgcgagggccacctacccgatgcaatctgcatgatccatgtggaaaggttcactcctgtgccaagtcttctcttcaacgggatcatggctttaatttacctttgtgttgaggatatctttcagctgatcaactactacagtttttcttattggtttttcgttggcctatctattgtgggacagctgtacttacggtggaaggagcctgatcgccctagaccactgaagctcagtgtgttctttccaattgtgttctgcctttgcaccattttcttggtggctgtgccactttacagcgatacaatcaactcccttatcggaatagctatcgccctgtctggtcttccattttactttctgatcattagggttcctgaacataagaggcctctttatctaagacgcatcgtcggaagtgcaaccagataccttcaggtactgtgcatgtccgtcgccgctgaaatggatttggaagacggtggcgaaatgcccaaacagagagatcccaaatccaattag

SEQ ID NO: 206407 - DNA, 1536 bp, synthetic construct
  misc_feature 1..1536: note = Description of Artificial Sequence: Synthetic coding sequence
  source 1..1536: mol_type = other DNA
atggtggacagcaccgagtacgaggtggccagccagcccgaggtggaaacctcaccattaggggacggcgctagccctggtcccgagcaggtgaaactgaaaaaagagatctcactgctgaatggagtgtgcctgattgttggcaacatgatcggctccggaatcttcgtttctccaaagggcgttctcatttatagtgcctcctttggcttgagtcttgtgatatgggcagtgggcggcctttttagtgtgttcggggcgttgtgttacgctgagttgggaacaacaatcaaaaaaagcggggcgtcatacgcctatattttggaggcttttggcgggtttttggcattcatcaggctctggacttccctgcttatcattgaaccaacctcccaagctattatcgccatcacattcgccaattatatggtccagccgctgttcccgtcttgctttgccccttatgccgccagccgcctgctcgccgccgcctgcatctgcctgctcacattcatcaactgcgcttacgtcaagtggggcaccctcgttcaggacatcttcacttacgccaaggtcctggcactcatcgctgtgattgtggcgggcatcgtgcggttaggacagggagcctcaacacacttcgaaaactcgttcgagggcagtagtttcgccgtgggggacattgcactggccctgtattctgcactttttagctactccggctgggataccctgaactatgttactgaggaaatcaaaaatccagaaaggaacttgcccttgagcattggcatctccatgcccatcgtgactatcatatatatcctgacaaacgtggcatattacacagtgcttgacatgagagatatactcgcctccgatgccgtggccgttacattcgcggaccagatatttggcatttttaactggatcattccactatctgtggccttatcgtgctttggcggcctgaatgccagcattgtggcggctagccggctgttttttgtgggatctcgggaggggcatttgcccgatgctatttgcatgatccatgtagagcggttcacccctgtgccgtcactcctgtttaacgggatcatggcacttatatatttatgcgtagaagacatcttccagctcataaactactactcattttcctattggttcttcgtcgggttgtccatcgtgggacagctctatctacgatggaaagaacccgacaggcccaggcctctgaaactgtccgttttcttccctattgtgttctgtttgtgtactatattcctcgtggccgtccccctgtattcagacacgattaattcactgattggcatcgctatcgctctgtcaggactgcccttctactttctgatcattcgcgtccccgagcataagaggcccctctatctgagaaggatcgtaggctcggcaacacggtatctgcaggtgctgtgcatgtccgtggccgcagaaatggaccttgaggacggaggcgaaatgcccaagcagagggacccgaaaagcaattag

SEQ ID NO: 206408 - DNA, 1536 bp, synthetic construct
  misc_feature 1..1536: note = Description of Artificial Sequence: Synthetic coding sequence
  source 1..1536: mol_type = other DNA
atggtggacagcaccgagtacgaggtggccagccagcccgaggtggagacgagcccactgggcgacggcgcctcacctggaccagagcaagtgaaactgaagaaggagatcagtctgcttaatggggtctgcttaatcgtggggaatatgatcggttcaggtatatttgtatctcctaagggcgtacttatctactcagcatctttcggtctgtctctggtgatctgggcagtgggtggcctgttcagtgtcttcggagcactgtgctatgcagagctcgggacaactatcaaaaaatccggagcaagttacgcttacatcctagaagcgtttgggggattcctggcctttattaggctgtggacctccctgttgataattgagcccaccagccaagctattattgcaatcacattcgctaactacatggtgcagccgctgttcccctcatgcttcgccccatatgccgcttcaaggctgctagccgctgcatgtatctgtctcctgactttcattaactgcgcttacgtgaagtggggcaccctggttcaagacatttttacatacgcaaaggttctcgcacttatagcggtgattgtggctgggatagtacggctgggccagggggcgagtacacacttcgaaaactctttcgaaggcagctcttttgctgtcggggacatagccctcgccttgtacagcgccttattctcctactctggttgggacacactgaactatgttactgaggagataaaaaatccggagaggaatctacctctctcaattggcatctctatgccaatagtgaccattatatacatccttactaacgtggcttactatactgttttggatatgagagatattctggcctctgacgcggtcgccgtcaccttcgccgaccagatcttcggaattttcaattggattatccctctcagtgtcgcgctgtcatgctttggcggtctcaacgcttccatagtcgccgctagccgactgttcttcgtgggcagtcgcgagggccatctgcctgacgcaatctgcatgatccatgtcgaacgttttactcctgtgccgtccctcctcttcaatggtattatggccctcatttacctgtgtgtcgaggatatatttcaattaattaactattatagtttctcctattggttcttcgttggcctcagtattgtagggcagctctacctgagatggaaggagcccgatcgaccccggcccctgaagctgagtgtgttcttccccatcgtattttgcctctgcaccatcttcctggtggcagtgcctctttactccgatactatcaactctctcattggaattgctattgctttgagcggcctgccattctatttcctgatcattagagtgcccgaacacaagcgccccctctatctccgccgcattgtgggatctgccacgaggtatctgcaggtgctctgtatgtcagtggcagccgagatggatctggaagatggaggcgaaatgccgaagcaacgcgatccaaaaagcaattag

SEQ ID NO: 206409 - DNA, 1455 bp, synthetic construct
  misc_feature 1..1455: note = Description of Artificial Sequence: Synthetic coding sequence
  source 1..1455: mol_type = other DNA
atggtggacagcaccgagtacgaggtggccagccagcccgaggtggagacctctcccctcggagatggggcttcacctgggccagagcaagttaaactgaaaaaggagatctactccgcttccttcggactaagcctcgttatatgggcggtgggcggcctcttttccgtatttggcgcactgtgttatgccgaactcggaactacaattaagaagtccggagcctcgtacgcgtacatccttgaggccttcggcggtttcttagctttcatccgtctctggacttcattattgattattgagcctacatctcaggccattattgcaataacgttcgccaattacatggtccagcccctcttcccgagttgttttgccccgtacgcagcgagtcgattgttggccgcagcctgcatatgccttctcaccttcattaactgtgcctatgtgaagtggggtaccctggtgcaggatatcttcacatatgcaaaagtgttagctctgatcgcagttatagtggcaggaatagtgcggctgggccaaggagctagtactcactttgagaacagcttcgagggatcgtcatttgctgtgggggatattgctctcgccctgtacagtgcgttgttcagctacagcgggtgggataccctgaattatgtgacagaagaaatcaagaatccggaaagaaacctccccctttccatcggaatttcaatgcctatcgtgacaatcatctatatcttgaccaacgtcgcctactacacggtactggatatgcgtgacatcctggcctctgatgctgtggctgtcacttttgctgatcaaatattcggaatctttaattggatcatacccctgtctgttgctctttcctgctttggaggcttaaacgcaagcatcgtggcagcctcacgactcttctttgtcggcagccgggagggacatctgcctgatgccatatgcatgatccacgtagaacgcttcacacctgtgcctagtctgctgttcaacggaatcatggccctgatttacttgtgcgtcgaggatatctttcagctgatcaactactacagcttctcgtattggtttttcgttgggctttccatcgtggggcagctttatctgcgctggaaggagcctgacaggcccagacctctcaagctgagtgtgttctttccaatcgtcttttgcctttgtaccatcttcctggtggccgtgcctctgtatagcgacaccataaactcactcattggcattgccattgcactgtctggactccccttctatttcctgataatcagggtcccagagcacaagcggcccctgtacctccgccggattgtgggttcagcaacacgctatttacaggttctctgtatgtccgttgcggcagagatggacctcgaggatggcggagagatgcccaaacagcgcgaccccaagtcgaactag

SEQ ID NO: 206410 - DNA, 426 bp, synthetic construct
  misc_feature 1..426: note = Description of Artificial Sequence: Synthetic coding sequence
  source 1..426: mol_type = other DNA
atggtggacagcaccgagtacgaggtggccagccagcccgaggtggagacctccccattaggcgatggtgcgtccccaggacctgagcaggtcaaactgaaaaaagagatatctctactgaacggtgtatgtctgatcgttggaaacatgattggatcaggtatttttgttagccctaagggagtcctcatctactctgcttcatttggcctgtctctggtgatatgggctgtcgggggactgttttctgtctttggcgcactgtgttacgcagagttgggcacaaccatcaaaaaatctggcgcttcttacgcttatattctggaggcgttcgggggatttctggcctttatccggctgtggaccagcctgctaatcatcgaacctactagccaggcaataatcgccatcacctttgcaaactag

SEQ ID NO: 206411 - DNA, 135 bp, synthetic construct
  misc_feature 1..135: note = Description of Artificial Sequence: Synthetic coding sequence
  source 1..135: mol_type = other DNA
atggtggacagcaccgagtacgaggtggccagccagcccgaggtggagacctcccctctgggtgatggggccagccctgggcccgagcaggtcaaacttaaaaaagaaatctctctcctgaacggggtgtgttag

SEQ ID NO: 206412 - DNA, 495 bp, synthetic construct
  misc_feature 1..495: note = Description of Artificial Sequence: Synthetic coding sequence
  source 1..495: mol_type = other DNA
atggtggacagcaccgagtacgaggtggccagccagcccgaggtggaaacatccccattgggggatggcgcaagcccagggcccgagcaggtaaaactcaaaaaagagatttccttgctcaatggcgtgtgcctgatcgtgggcaacatgatcggtagcggcatcttcgtgtccccaaaaggggtcctgatttatagcgcgtctttcgggctctcactggtcatctgggcggttggcggactcttttccgtgtttggcgcactctgttatgctgagctcggaacgaccattaagaagtctggagcgtcttatgcttatatcctggaggccttcggcggttttctcgccttcattaggctttggacgagtttgctgattatcgagcctacgtcccaggcaatcattgcaataacctttgccaactacatggtccagcccctgtttccttcctgcttcgccccgtacgctgcctctagattgctagccgcggcatag

SEQ ID NO: 206413 - DNA, 369 bp, synthetic construct
  misc_feature 1..369: note = Description of Artificial Sequence: Synthetic coding sequence
  source 1..369: mol_type = other DNA
atggtggacagcaccgagtacgaggtggccagccagcccgaggtggaaacttcacccctcggagacggcgcctcccccggacctgagcaagttaaattgaagaaggagataagcctcttgaatggagtatgcctcatagtggggaacatgatcggctctggcatatttgtctcacctaaaggagtgctcatctactccgcttctttcggcttgagcctggttatctgggcagtgggagggctgttttcagtgtttggagctctgtgttacgccgaattagggaccacaatcaagaaaagcggtgcgtcttatgcatatattttggaggccttcggtggctttttagcctttatcagactttggacatag

SEQ ID NO: 206414 - DNA, 1536 bp, synthetic construct
  misc_feature 1..1536: note = Description of Artificial Sequence: Synthetic coding sequence
  source 1..1536: mol_type = other DNA
atggtggacagcaccgagtacgaggtggccagccagcccgaggtggaaacatccccattgggggatggtgccagccctggtcctgaacaagtaaaactcaaaaaagaaatttccctgctcaacggcgtttgtctgattgttggcaatatgattggcagtggaatatttgttagcccaaagggtgttttgatatactccgcgagctttgggttgagtctcgtgatttgggcagtggggggtctcttcagcgtgtttggggctctgtgctatgcggaactggggactaccataaaaaaatcaggtgcctcctacgcctacatcctggaggcttttggaggcttccttgcctttattaggttgtggactagcctgctcatcattgagcccacttcccaggctattattgcaattacctttgccaactatatggttcagccgctgtttcccagctgctttgcaccgtatgcggcctccagacttttggccgcggcctgtatctgcctcctgacatttatcaactgtgcatatgtgaaatggggtacactcgtgcaggacatatttacctatgctaaagtgcttgcactgattgccgttatcgtggcgggaattgtcaggctgggacagggcgcctccactcacttcgaaaattctttcgagggatccagctttgcggtgggtgatatcgccctagccctttacagcgcgctgttcagctattccggttgggatacactgaactatgtgacggaagaaattaaaaacccggagaggaaccttcctctgtcaattggaattagcatgcccatcgttaccatcatctacatcctcacgaacgttgcctattatacagtgcttgacatgagggatatcctcgcgtcagatgcagtagccgttacgtttgccgatcagatctttgggatctttaattggattatcccattgtccgtggcgctgagttgcttcggaggacttaacgctagcatcgtggcggcctcaagactcttcttcgtgggatctagagaggggcacttgccggacgccatttgcatgattcacgtggaaagattcactcccgttccttcgctgctctttaatgggatcatggcactgatttacctctgtgtcgaagacatcttccagctcataaattactacagtttctcttactggttttttgtgggtcttagtattgtcggccaactttacctaagatggaaggaacccgaccgaccccgccccttgaaactgtctgttttcttccccatagtgttctgtctttgcacaatttttctcgtggccgtgcccttatacagcgacacaattaatagtctgatcggaatcgcaattgctctcagtggcctccccttttatttccttattattagggtgcccgagcacaagcgtcctctgtaccttaggcggatcgtgggctccgctacaagatacctgcaggtcttgtgcatgtccgtggcagccgagatggacctagaagacggaggtgaaatgccaaaacagcgggatcctaaaagcaattag

SEQ ID NO: 206415 - DNA, 348 bp, synthetic construct
  misc_feature 1..348: note = Description of Artificial Sequence: Synthetic coding sequence
  source 1..348: mol_type = other DNA
atggtggacagcaccgagtacgaggtggccagccagcccgaggtggagacctctccactcggcgacggagcatcacccggccccgagcaggtgaagcttaagaaggaaatatctctcttgaatggcgtttgcctgatcgtcgggaacatgatcggctcaggtatatttgtttctcccaagggcgtgttgatctactcagcttcctttggcctaagtctggttatttgggctgtgggcggactcttttctgtgttcggggcactctgttatgctgaactcggcacgaccattaagaagagtggggcgagctatgcctacattcttgaagccttcggcggcttcctgtag

SEQ ID NO: 206416 - DNA, 93 bp, synthetic construct
  misc_feature 1..93: note = Description of Artificial Sequence: Synthetic coding sequence
  source 1..93: mol_type = other DNA
atggtggacagcaccgagtacgaggtggccagccagcccgaggtggagactagcccactgggtgacggcgcgtcccctgggcccgagcaatag

SEQ ID NO: 206417 - DNA, 933 bp, synthetic construct
  misc_feature 1..933: note = Description of Artificial Sequence: Synthetic coding sequence
  source 1..933: mol_type = other DNA
atggtggacagcaccgagtacgaggtggccagccagcccgaggtggagacctccccactgggggatggcgctagtcctggccccgagcaagtgaagctgaagaaggagatctcgctgctaaatggtgtgtgtctgatcgttgggaacatgattggctctggcatcttcgtgtctccgaagggtgtgctcatctactccgcctcattcggactgtcgctggtgatttgggctgtgggcgggttattctccgtctttggggcgttgtgttacgctgagctggggaccaccataaagaaaagtggcgccagctacgcgtacattctggaggccttcggaggctttttggccttcattcgtctgtggacctccttgctgatcattgagcccacgagccaggcgataatcgcaattacgttcgccaattatatggttcaacctctgtttcctagttgtttcgctccctacgccgcaagtcgcctactcgcagcggcctgcatttgtctcctaactttcattaactgcgcatacgtgaaatggggaacactggtacaggacatcttcacctatgcaaaagttctggctctcatcgccgtgatcgttgccggaatcgttcgcttgggccaaggcgctagcacgcatttcgagaattcattcgaaggctcctctttcgctgtgggagatatcgctctggcactgtactctgccctgtttagctacagcggctgggatacactgaactacgtaacggaagaaattaagaatccagagcggaatttgccactctcaatcgggatctctatgcccattgtaaccatcatttacatacttaccaacgtggcttattacacagtcctggacatgcgggatattctggcctccgacgctgtagccgtggccttcctctgcggactcaagcgcaggccttcgccctag

SEQ ID NO: 206418 - DNA, 321 bp, synthetic construct
  misc_feature 1..321: note = Description of Artificial Sequence: Synthetic coding sequence
  source 1..321: mol_type = other DNA
atggtggacagcaccgagtacgaggtggccagccagcccgaggtggagacctccccactcggcgacggagcttctcctggtccagagcaggtgaagttgaaaaaggaaatttccttgttaaacggcgtctgccttatcgtaggaaacatgattgggagcggtatctttgtgagtcccaagggcgttttgatttacagcgccagctttggactgtctctggttatttgggctgtcggcggtttgtttagtgtctttggagccctctgctatgccgagctcggcacaaccataaaaaagagcggagcgtcttatgcttattag

SEQ ID NO: 206419 - DNA, 351 bp, synthetic construct
  misc_feature 1..351: note = Description of Artificial Sequence: Synthetic coding sequence
  source 1..351: mol_type = other DNA
atggtggacagcaccgagtacgaggtggccagccagcccgaggtggaaacctctcccctgggtgacggagcttcccccggtcctgagcaagtgaagcttaagaaagaaatttcgctgctgaatggcgtatgcctcatagttgggaatatgataggctccgggatttttgtctcacctaaaggagtactgatctacagcgcgtcctttggactttctcttgttatttgggcggtgggtggcctgttctccgtcttcggagcactgtgttacgccgaacttggaaccacgatcaagaaaagcggagctagttatgcatacatcctggaagctttcggcggttttctcgcatag

SEQ ID NO: 206420 - DNA, 1890 bp, synthetic construct
  misc_feature 1..1890: note = Description of Artificial Sequence: Synthetic coding sequence
  source 1..1890: mol_type = other DNA
atgggctgcaaggtgctgctgaacatcggccagcagatgctgcggagaaaggtagtcgactgcagccgcgaagagacgagactttcacggtgcctaaatacattcgacctggtcgctcttggggtgggtagtacccttggcgccggcgtctatgtgttggccggcgcagtggctagagagaatgccggtccagcgatcgtaatttcattcctcatcgctgccctggctagtgtgcttgcagggctctgttacggggagttcggggcccgggttccaaagacaggctcagcttacctatatagctacgtgactgtaggtgagttgtgggctttcatcaccggatggaacctcatcctttcttacattattggaacgtcatctgtggcaagagcttggtccgcaacttttgatgagttaattggtaggcctatcggggagttcagccgaacacacatgaccttgaacgcccccggagttctggctgagaaccctgatatcttcgcagtaatcattatcctaatactgaccggcctcttgacactcggagtgaaggagagtgcaatggtcaacaagatattcacatgtatcaacgtactcgtacttggctttataatggtgagcgggttcgtaaaagggtccgtcaaaaactggcagctgaccgaggaggattttgggaatacctcagggaggttatgtttaaataacgacacaaaagagggcaagcctggggtggggggcttcatgccctttggattttcaggcgtactgtcgggtgcagcaacttgcttttacgcattcgtcggtttcgattgtattgctacaacgggagaggaagtaaagaatccccagaaggcgatccccgtgggcattgtggccagcctgctgatctgttttattgcgtacttcggggttagtgcagcccttactctaatgatgccatacttttgccttgacaacaacagcccattacctgacgccttcaaacatgtcggatgggaaggcgctaaatatgctgtggcagttggaagcctgtgtgctctgagcgctagtctcttaggttctatgttccctatgcctagggttatatatgctatggctgaggacgggcttctgttcaaattcctggccaatgtcaacgacagaactaaaacgccaattatcgctacattggcaagtggggctgtggctgccgtgatggcctttctttttgatctgaaggacctagtggacctcatgtccattgggacccttttggcttactcactcgttgcagcatgtgtgctcgtactcagataccagcccgaacagcccaacctggtgtaccagatggcttccacttccgacgaacttgatcctgctgatcaaaacgagctggcctctacaaatgattcccagctaggcttcctgcccgaagccgagatgttctctcttaaaaccatcctcagccccaaaaatatggagccttctaagatatctggcttgatcgtgaatatttctacttcccttatcgctgtgctgataattacattttgcatcgtgacagtgctgggtagggaagccctaactaaaggcgctttatgggctgtgttcctcctggctggatcagctctgctgtgtgcagtggtcaccggtgtgatttggagacaaccagaatccaaaactaagctcagctttaaggtcccttttctccctgtccttccaattctcagcatattcgttaacgtttacctgatgatgcagctggatcagggaacttgggttcgattcgctgtgtggatgttgattggatttatcatctacttcggatatggtctgtggcactctgaggaggcttccctcgatgcagatcaggccagaacccctgacggcaatctggatcagtgtaagtag

SEQ ID NO: 206421 - DNA, 366 bp, synthetic construct
  misc_feature 1..366: note = Description of Artificial Sequence: Synthetic coding sequence
  source 1..366: mol_type = other DNA
atgggctgcaaggtgctgctgaacatcggccagcagatgctgcggcggaaagtcgtcgattgtagcagagaagagacaaggctgtccaggtgcctgaacaccttcgatctggttgctttaggagtgggatctacactgggtgctggagtttacgtgcttgccggcgccgtggctcgagaaaacgctggccctgccatcgtgatttctttcctcatcgcagcgttggcatcagtactggccggcctgtgctatggagagtttggcgctcgtgtcccgaagacaggaagcgcatatctctatagctacgtgaccgtcggcgaactatgggcctttatcaccggttggaacctcattctatcctactag

SEQ ID NO: 206422 - DNA, 2097 bp, synthetic construct
  misc_feature 1..2097: note = Description of Artificial Sequence: Synthetic coding sequence
  source 1..2097: mol_type = other DNA
atgaagatcgagaccagcggctacaacagcgacaagctgatctgcaggggcttcataggaacgccagctcccccagtctgtgatagtaagttccttctgtctccgtcaagcgatgtgagaatgattccctgtcgcgcggccttgacgttcgcaagatgcctcatcagaagaaaaatagtgacgctagatagcctggaggacaccaagttatgccgctgtctctcgacgatggatcttattgctctcggcgtggggtccactctgggggcgggggtctatgtattggcaggagaggtcgctaaggccgattcaggtccatccatcgttgtgagtttcttgatcgcagctttagcctcagttatggcaggtctttgctacgccgagtttggtgcacgggttcccaagacaggttcagcatacctctatacctacgttaccgttggcgagctatgggcctttattacaggatggaacctgattttgtcctatgtgatcggaacaagttccgtggctcgtgcctggagcgggacgtttgacgagctcctcagcaagcagattggtcagtttctccggacctatttccggatgaattacacaggcttggcggaatatcctgatttttttgctgtctgcctgattctactgctggctggcctattgtcctttggcgtcaaggagtctgcatgggtaaataaggtgttcacggcggtgaacattttagtgcttttgtttgtcatggtagccggcttcgtaaaagggaacgtggctaactggaaaatctcagaggagtttctgaaaaatatcagcgccagcgccagggagcctcccagtgaaaacggaaccagtatttacggcgccggtggttttatgccttacgggtttaccgggaccctggccggggctgccacatgtttctatgcctttgtgggatttgattgcatcgccacaaccggagaagaagtgcgcaatcctcaaaaggcaattcctataggtatagtgacaagcctgttagtctgttttatggcctacttcggcgtatctgcagctctcacacttatgatgccatattacttgctggacgagaaatcacctctgccagtggctttcgaatatgtgggctgggggccggccaaatacgtcgttgcagctgggagtttgtgtgctctatcgacctcgcttctcggctctatcttccccatgcctcgcgtgatttacgcgatggcggaggatggactattattcaaatgtttggcccagatcaactccaaaactaagacacctattatcgccacgctctccagtggtgcagtggcggccctgatggctttccttttcgatctgaaggcactggtcgatatgatgtccatcgggacactgatggcctattcactggtagcagcctgcgttcttattctgcggtatcagccaggtctttcctatgaccaacccaagtgttcccctgaaaaggacggtctagggagcagtcccagggtcacaagcaaatctgaatctcaagtgaccatgcttcagaggcagggcttcagtatgcgtaccctgttttgcccctctctgctgcctactcaacaaagtgccagtttggtgagcttcctagtaggcttcctcgcgttcttagtcctgggtctgtcagtgctgacaacatacggcgtccacgccatcacccgtttggaggcgtggtctctggctctgttggctctgttcctggtgctctttgttgctattgtcctgacaatttggcggcagcctcagaatcagcagaaagtggcattcatggtgcctttcttgcccttccttcccgcctttagcatcctagtgaatatctacctgatggtccagctgagcgcggatacctgggtccggttttccatctggatggctatcgggtttctgatttacttctcctatgggatccgtcactcgctggaaggacatctgcgcgatgaaaataatgaagaggacgcgtacccagacaatgtgcacgcagccgctgaggagaaatccgcaatccaggctaatgatcaccatccaagaaacctgtcaagcccctttatctttcacgagaagacatcagagttttag

SEQ ID NO: 206423 - DNA, 2094 bp, synthetic construct
  misc_feature 1..2094: note = Description of Artificial Sequence: Synthetic coding sequence
  source 1..2094: mol_type = other DNA
atgaagatcgagaccagcggctacaacagcgacaagctgatctgcaggggattcatcggcaccccagcgccacccgtgtgtgacagcaaattcttgctgtcccctagctccgacgtgagaatgattccttgtagggctgccctgacattcgcccggtgtctgatccgtaggaaaattgttactctcgactcgttagaggacaccaaactgtgtaggtgtctttccacaatggatctgattgccctgggggtcgggtccaccctcggtgcgggggtctacgtattggccggtgaagtcgccaaggctgactcagggccaagcatcgtcgtctcttttcttattgccgcacttgcttcggtgatggctggcctttgttatgcagagttcggagctcgcgtcccgaagactggatctgcttacctatacacctatgtgacagtgggtgagttgtgggcattcataaccggttggaatctgattctcagttatgtaattggcaccagttctgtcgcccgagcatggtctgggacattcgacgaactgctaagcaaacagatcggccagtttttgagaacgtatttccgtatgaattacactggccttgcagaatatcccgactttttcgccgtctgtttgatactcctgttggcagggctcctctctttcggggttaaagagtcagcttgggtgaataaggttttcaccgcagtgaacattctggtgctcttgttcgtcatggtagccgggttcgtgaagggaaacgtagccaactggaagatcagcgaggaatttctgaaaaatatctccgcgtctgcacgtgaaccaccatccgaaaatgggactagcatctatggtgctggcggctttatgccctacgggtttaccgggacgctggctggcgccgccacctgcttctatgcatttgtaggatttgattgcatagcaaccacaggggaggaagtgagaaaccctcagaaggccatccctatagggattgtaacatcactgcttgtgtgctttatggcttactttggagtgtctgctgccctgaccctgatgatgccatactatctgcttgacgagaaaagccctctgccagtggcatttgaatatgtggggtgggggcctgctaaatacgttgtagcagctggaagtttgtgcgctctgtccaccagtctgctaggaagcatgtttccactcccaagaattctatttgctatggctagagacggactactgttccgctttctggctcgcgtgtctaagcgacagtccccggtcgccgctactctcacagctggagtaatcagcgcactgatggcattcctatttgacctgaaggccctggtcgacatgatgtctattggaacccttatggcctatagcctggtggccgcctgcgtgctgatcctaagataccagcctggcctctcctatgaccaaccgaaatgttcaccagagaaggacggccttgggtccagtcccagagttacatcaaagagcgagtcccaggtgacaatgctgcagcgacagggcttttcaatgagaaccctattctgtcctagccttctgcctacgcagcaatctgcttctcttgtttcttttcttgtcggctttctggcttttctcgtcctggggttatccgtgctcacaacctacggagtgcatgcaatcactcgtctggaggcttggtctctggccctcttagctctattcctcgtgctgttcgttgctattgtgttaaccatttggcggcaacctcaaaaccagcagaaagtggcatttatggtccctttcctcccgttcctgcccgctttctcaatccttgtcaatatttatcttatggtccagctctctgcggatacttgggtgagattttccatttggatggccattgggttcctgatctatttttcttacggtatcaggcactcgttagagggccacttgagggacgaaaataatgaggaagacgcgtaccctgacaatgtgcatgctgctgcagaggagaaaagcgctattcaggcaaacgaccaccatccacgcaatttgtcttccccatttatatttcacgagaagacctctgaattctag

SEQ ID NO: 206424 - DNA, 2094 bp, synthetic construct
  misc_feature 1..2094: note = Description of Artificial Sequence: Synthetic coding sequence
  source 1..2094: mol_type = other DNA
atgaagatcgagaccagcggctacaacagcgacaagctgatctgccgagggtttatcggaacacccgccccccctgtgtgtgatagtaaattccttttgagcccgagtagcgatgttagaatgatcccttgtagagcggctttgactttcgcccggtgcctgattagaagaaaaatagttactctagattcattggaagacaccaagctctgcaggtgtctctctaccatggatctcatcgccctgggcgtggggtccactttgggcgcgggagtctatgtgttggccggtgaggtggcaaaagccgatagtggcccctccatagtggtttcgtttctgatcgctgcgctggcttcggtgatggcaggattatgctacgctgagtttggagctcgagtgcccaagaccggcagcgcctatctgtatacctatgtcaccgtgggggaattgtgggcttttatcaccgggtggaacctgatcctgagctacgtgattggtacctcatccgttgcacgagcctggtctggaacctttgatgagttactgtccaagcaaataggccagtttctccgaacctacttcagaatgaattataccgggctggctgaataccccgacttttttgcggtgtgcctgatacttctcctcgccgggctgttgagcttcggcgttaaagagagcgcatgggtgaataaagtcttcaccgcggtcaacatcctggtgttgctcttcgtgatggtggccggttttgtaaagggcaacgtggccaattggaaaatctccgaggagttcctgaagaacatcagtgcatctgcacgcgagccgccaagcgaaaatggcacatcgatatacggggcgggaggtttcatgccctacggcttcacggggaccttagctggagccgccacatgcttctacgcttttgttggctttgattgtatagccacgactggggaagaggtgcgcaacccacagaaggccatcccgattggtattgtgaccagtctgctcgtatgcttcatggcctattttggcgtctcagctgctctcacactcatgatgccctactacctgctggacgagaagtctccgctgcccgttgcatttgagtacgtcggctgggggcccgctaaatatgttgttgcagcaggttcactttgcgcattatctacttctttgctgggctccatgtttcctctgcctcgcatcctgttcgctatggcccgggatggccttctcttccgattcttggcccgagtgagtaagagacagtctcctgtcgctgccactctgaccgcgggagttattagcgctttgatggccttcttgtttgacttaaaggccctggtggacatgatgtccattggtaccctcatggcgtattctctcgtcgccgcctgtgttctgatcctacgataccagcccggactcagctacgatcagcccaaatgcagcccagagaaagatggcctaggtagcagcccacgcgttacatctaagtccgagtcccaggtaacgatgcttcagagacagggattcagcatgcggacactgttctgccccagcctgctgcctacacagcagtccgccagtctggtgtctttcctggtaggctttctcgcatttctagtactggggctttccgtcctgactacctacggggtgcatgctattactcggctggaggcctggtctcttgcgctgctagccctctttctggtgctcttcgtggctatcgtgctgacaatttggcgccaacctcagaaccagcaaaaggtagcattcatggtccctttcctgccctttttacctgcattctcaatattggtcaatatctacctaatggttcagctatccgccgacacctgggtgaggttctcaatttggatggcgatcggatttctaatatactttagctatggcatcagacattcactggagggtcaccttcgcgacgagaacaacgaagaggatgcttatccagataacgtgcacgcagccgcggaagagaaatccgccatacaggccaatgaccatcatcccaggaatctcagttccccgtttattttccacgagaaaacatctgagttctag

SEQ ID NO: 206425 - DNA, 1977 bp, synthetic construct
  misc_feature 1..1977: note = Description of Artificial Sequence: Synthetic coding sequence
  source 1..1977: mol_type = other DNA
atgatcccctgccgggccgccctgaccttcgcccggtgcctgatccggcgtaaaatcgtcacgctcgattccttggaagacaccaaattgtgccggtgccttagtaccatggacctgattgcactgggtgtggggtctacccttggcgcaggggtctacgttttagctggcgaggtggcgaaggccgactccgggcctagtatcgttgtctcattcttaatcgctgccctcgccagtgtgatggccggactgtgctacgccgagttcggtgcccgtgtaccaaaaactggatctgcctacctgtacacatacgttactgtgggtgaactgtgggcctttataaccggatggaacctcatcctcagttatgtgattggcaccagcagcgtcgcccgagcctggagtggaacttttgatgagctcctaagtaaacagatcggacagttcctgcggacatactttagaatgaattacactggcctggctgagtatcctgatttctttgcggtctgtctcatcctcttgctcgctgggctcctgtcatttggagtcaaagaatcagcttgggttaacaaggtgttcaccgccgttaatatcctggtgttgcttttcgtgatggtggcaggctttgtgaagggcaacgtggccaattggaagatatcagaggaatttctgaaaaatataagcgcctcagccagggaacctccctctgagaacggcactagcatttatggcgccgggggcttcatgccgtacggtttcactgggaccttggcgggtgccgctacttgcttttacgcctttgtcggcttcgactgcattgctacaaccggggaggaagtaaggaacccacagaaagctatcccaatcggcatcgttaccagcctgctagtttgctttatggcctattttggcgtatcggccgccctcaccctaatgatgccctattatctcctggacgagaaaagtccccttcctgtggccttcgagtatgtcggctgggggcccgcaaagtatgttgtcgcagctggtagtctgtgtgctctcagcactagcttacttgggagtatcttcccgatgcctagagtgatctatgccatggccgaggatggtttactgttcaaatgcctggcccagattaactctaaaaccaagactcctataatagccaccctttcctctggggcggtagctgccctcatggcttttctgttcgatctgaaggcgctcgtcgacatgatgtctatcgggactcttatggcctattcccttgtggccgcctgtgttctgattctgcgttatcagccaggactcagttacgatcagcccaaatgttcaccagagaaggacggcctcggaagttctcccagggttacctccaagagcgagagccaggttactatgctccagcgccagggcttctcaatgagaacactgttttgtccttccttgctccctacccagcaatcagcgtcattagtttcctttctcgtgggctttctggctttcttagttttggggttatccgtattgacaacatatggcgtgcacgccattacccgactcgaggcctggtcccttgctctgctggccctgttcctggtgctgtttgtcgctatcgttttgacaatatggagacagccccagaatcaacaaaaggtagctttcatggttccatttctaccctttctgccggcctttagtatcctagtaaatatctacctgatggttcagctttccgcagacacgtgggtacggttttctatctggatggccattggatttctcatttacttttcctacggcattaggcattccctggagggccacctgcgggacgaaaataacgaggaagatgcttacccggataacgttcatgccgcggccgaggagaaatcagctatccaggctaacgatcaccaccctagaaacctgagtagccccttcatctttcacgaaaagacctccgagttctag

SEQ ID NO: 206426 - DNA, 1977 bp, synthetic construct
  misc_feature 1..1977: note = Description of Artificial Sequence: Synthetic coding sequence
  source 1..1977: mol_type = other DNA
atgatcccctgccgggccgccctgaccttcgcccggtgcctgatcagaaggaaaatagtgaccttggatagtctcgaggacaccaagctgtgtcggtgtctcagtacgatggacctgatcgccctgggcgttggttcgaccttgggcgcaggcgtgtatgtactggctggagaggtggcaaaagccgacagcggccctagcattgtggtgtccttcttgatcgcagctctggcctccgtgatggcgggactgtgttatgccgaatttggagcccgggtgcccaagaccggttcagcatacttgtacacctatgtgaccgtgggcgaactttgggcatttattacagggtggaacttgattctctcatatgtcatcggcacatcaagcgtcgctcgcgcatggagcggtactttcgacgagctgctctccaagcagattggccagtttttgaggacctattttagaatgaattacacggggctggcagaataccccgactttttcgctgtgtgcctgatcctgctgctcgctgggctgctcagcttcggtgtcaaagaatccgcttgggtcaataaggtgttcacagccgttaatattcttgttcttctcttcgttatggtggctgggtttgtcaaaggcaatgtggctaactggaaaatctcggaggaattcctgaaaaacattagcgctagcgcccgtgagccgccctctgagaacggcacgagcatctatggagcaggcgggttcatgccttacggcttcacaggcaccctggccggagcagccacatgcttctacgcattcgtgggatttgactgtatcgcaaccactggcgaggaagttagaaatccgcagaaggccatcccaattgggattgtgacgagtttgctcgtgtgtttcatggcttactttggagtgtccgcagctttaactctaatgatgccatactacctacttgatgaaaagtccccactccccgtcgctttcgaatacgtggggtgggggcccgcaaagtacgtggtggcggcgggcagcttgtgcgccctcagcaccagtcttcttgggtccatcttccctatgccgagggtgatatacgcgatggcagaggacggtctcctgttcaagtgtttggcccagatcaactctaaaactaaaacccccattattgctaccttatcatctggcgctgtagcagcactaatggcttttctgttcgatctgaaggcccttgttgacatgatgagtatcggcacactgatggcgtatagtcttgttgccgcttgcgtgctgattctgcgatatcagcctggcctgagttatgatcaacccaaatgttctccggagaaagatggcctgggtagctctcccagggtaacctccaaaagcgaaagccaagttacaatgctgcaacgccagggattttccatgcggaccttgttctgcccctctctgctccctacacagcagagcgcttccctggtctcatttttggtcggctttttagcttttttggttcttggattgtctgtgttaaccacttacggtgtacacgccatcacaagactggaagcttggagccttgctctgctcgctctgttccttgtactgtttgtggccattgtccttactatttggcgccagcctcagaaccagcaaaaggttgcttttatggtaccattcctcccctttctgccggccttctcgatactcgttaatatatatttgatggtgcagctttccgcagatacttgggttaggttttcgatttggatggccataggcttcttaatctatttctcttacggcatacgtcatagtctggagggccatctgagagatgagaacaacgaggaggatgcctacccagacaatgtgcacgccgccgcagaggagaaatcagctatccaggccaatgaccaccatccacgcaacctcagcagtccatttatcttccacgaaaaaaccagtgagttctag

SEQ ID NO: 206427 - DNA, 1464 bp, synthetic construct
  misc_feature 1..1464: note = Description of Artificial Sequence: Synthetic coding sequence
  source 1..1464: mol_type = other DNA
atgggcgacaccggcctgcggaagcggcgggaggacgagaagagcatacagtcacaagagcctaaaaccactagcctccagaaagagctgggccttattagcggcatttcaatcatcgtcggaaccattattggatctggcatatttgtgtccccgaaaagtgttctcagcaatactgaggcggtgggaccatgcctcatcatttgggccgcttgtggtgtcctcgcaacactgggcgccctgtgcttcgccgagcttggcacaatgattaccaagagcggaggcgaatatccctacctcatggaggcttatggccctattcccgcctacctgttctcctgggcctccctgattgttatcaagcctacaagtttcgctattatatgcctgagtttctctgagtacgtgtgtgcccctttctatgttggatgcaagccaccgcagatcgtggtcaagtgcttagccgccgctgcaatcctgttcatctcaacggtaaactccctttctgtaagactgggttcttatgtacaaaacatcttcaccgcagcaaaactagtaatcgttgctatcattattatatctggcctcgtgctgctggctcagggaaacacaaagaacttcgataatagctttgagggcgctcagttgtccgtgggcgccatatctctcgctttttataacggattgtgggcatacgatggatggaaccagctgaactacattaccgaggagctgcgcaatccatatcgtaacctcccactcgccataataataggaatccctttggtgactgcttgctacattctcatgaacgtcagctacttcaccgtgatgacagccactgaacttcttcagagccaagccgtggctgtgaccttcggggatcgcgtgctctacccagcttcatggattgttcctctgtttgttgcattctctacaataggcgctgctaatggaacatgtttcaccgccgggagacttatttatgtagcaggacgtgagggtcatatgctgaaagttctctcatacatcagtgttcggaggctgactccagcgccagcgattatcttttacggaattattgccactatctatattatcccaggagacatcaattcacttgtgaattactttagttttgccgcttggctcttctatggcctgaccatactggggctaattgtcatgcgcttcactagaaaagagttggagcgcccaattaaggtcccagtggtgatccccgtccttatgactctaattagcgtgttcctggtccttgccccaatcatctcaaagccaacctgggaatacttgtactgtgtgttattcattctctcaggtctactgttttattttctgttcgtgcattacaagtttgggtgggcccagaaaatctccaagcctatcaccatgcacctccagatgctcatggaggtggttccccccgaggaggatccagaatag

SEQ ID NO: 206428 - DNA, 1464 bp, synthetic construct
  misc_feature 1..1464: note = Description of Artificial Sequence: Synthetic coding sequence
  source 1..1464: mol_type = other DNA
atgggcgacaccggcctgcggaagcggcgggaggacgagaagagcattcaatctcaggaacccaaaacaaccagcctgcagaaagagttaggcctgatcagcggaatcagcatcatagtgggcaccattattggcagtgggatatttgtcagcccaaagtctgtcctctctaacacagaagccgttggcccatgtctgattatctgggctgcctgtggggttctggctaccctcggcgctctgtgcttcgccgaactggggacaatgatcactaaatccggtggcgagtatccgtatttgatggaagcttacgggccgatcccagcttacctcttttcctgggcttccctcatcgtgattaagccaacctccttcgctattatctgtctctcgttcagtgagtatgtgtgcgctcccttttacgtgggctgtaagcctccgcaaatcgtcgtgaaatgtttggcagcagccgccatcctgtttatctccaccgtaaattccctcagcgtgcggctgggatcatacgtgcagaatattttcaccgcagccaagctagtaattgtggccataataatcatctctgggctagtcttactcgcgcaagggaataccaagaattttgacaatagttttgagggggctcagttgtccgtgggcgccatcagcctggccttctacaatggcctttgggcctacgacgggtggaaccagcttaattatatcaccgaagagttgaggaatccgtacagaaatctgccactggctataatcattgggatccccctggtgactgcctgctacatcctcatgaatgtctcctattttacggtcatgaccgcaacagaattgctccagagtcaggccgtggcggtgacctttggtgacagggttctgtacccggcttcctggattgtgccacttttcgtcgccttctctactataggcgccgctaatggcacctgctttacggctggtaggcttatttacgtcgcaggacgggaagggcacatgttgaaagtgctgtcatatattagcgtgcggcggctaaccccagcccctgccattatcttctatgggatcattgctacaatttacataattccaggcgatattaacagtctggtcaattacttctcattcgccgcctggctgttctatggcctcactattttgggcctgatagtgatgcggtttactcgcaaggaactggagagacctatcaaggtgccggtggtgatcccagtgctgatgacactgatttctgtatttctggtgctcgcacccataattagtaaacctacctgggaatacctgtattgtgttctgtttatcctgagtggactactgttttacttcctgttcgtccattataaatttgggtgggcacagaagatatctaagcctatcacaatgcacctacaaatgctgatggaggtggtgccaccggaagaagacccggagtag

SEQ ID NO: 206429 - DNA, 1908 bp, synthetic construct
  misc_feature 1..1908: note = Description of Artificial Sequence: Synthetic coding sequence
  source 1..1908: mol_type = other DNA
atggcccggggcctgcccaccatcgccagcctggcccggctgtgccagaagctcaacagattgaagcctctcgaagattccacaatggagacctccctgcgaagatgcctctctacgttggatctgaccctgctgggcgttgggggcatggtgggatcggggctttacgtcctgaccggtgcagttgcaaaagaggtggcagggccggccgtcctgttgtccttcggggtggcagccgtggcctctcttctggctgccctttgctatgcagaattcggggcgcgagtacccagaactggatccgcatacctgttcacttatgtgtcaatgggcgagctttgggccttcttgattggctggaacgtgttactcgagtacatcattggaggcgccgccgtggccagagcgtggtctgggtacttggattctatgttcagtcactccattaggaactttacggaaacgcacgtgggctcatggcaagtccccctgcttgggcactaccctgacttcctggcggctggaataattctgctcgcgtctgcgtttgtgagctgcggagctcgcgtctcaagctggctgaatcatactttcagcgcaattagccttctggtgatcctgttcattgtgatcttgggcttcatcctggctcagccacacaactggtccgctgacgagggcggtttcgcgccttttggcttcagcggggtcatggctggcaccgccagctgtttctacgcttttgtgggctttgatgtgatagcggcctctagtgaggaggctcagaaccctcgaaggagcgtgcccttggcaattgctatttccctcgcaatcgcagctggcgcctacatactggtatctacggtcctgactctgatggtcccctggcacagtctggaccctgactccgcgctcgccgacgccttctatcagcggggctatcgttgggccggattcatcgtagccgccgggagcatctgcgccatgaacaccgtgttattgtccctgttattttcccttcctcgaatcgtgtacgctatggccgcagatggtttgttctttcaagtgtttgcacatgtgcaccccagaacacaggtgcctgtcgctggaactctagctttcggcctgctcacagcattcttggcacttctgctggatctggaatcccttgttcaatttctctctctcggcacgcttctcgcctacacctttgttgccaccagcataattgtgcttcggttccagaagagcagccctccatcctcccccgggccggcgtcaccaggacctcttacaaagcagcagagctcattctccgatcacttgcagctggtaggaacggtgcacgcgagtgtgcctgagccaggggagctgaagccagcactgagaccctacttaggcttcttagatggatattcaccaggtgcagtggtcacatgggccctgggggtcatgctcgctagcgctatcactatcggatgcgtgctggtgttcggtaattcgacactgcacctgcctcactgggggtatatactactgctcctgcttacctcggtgatgttccttttgagtttattagtgctgggcgcccatcaacagcagtatcgggaggacctgtttcagatcccgatggtcccattgatccccgccctttctattgttttgaacatctgtttaatgttgaagctgagctaccttacctgggtccgtttctctatctggcttttgatgggactggccgtctacttcggatacggcattcggcacagtaaagaaaaccagagagaactccccggcttgaacagcacacattacgtggttttcccaagaggcagcctggaagaaaccgtccaggccatgcagccaccctcacaggcacctgctcaggatcccgggcacatggagtag

SEQ ID NO: 206430 - DNA, 1908 bp, synthetic construct
  misc_feature 1..1908: note = Description of Artificial Sequence: Synthetic coding sequence
  source 1..1908: mol_type = other DNA
atggcccggggcctgcccaccatcgccagcctggcccggctgtgccaaaagctgaaccgcctgaagcccttggaggatagtaccatggagactagcctccgacgctgcctgagcacgctagacctcaccttgttgggcgtgggtgggatggtgggtagcggactctatgtactgacgggtgcggtcgccaaggaggtggctggcccagccgttcttctgtcttttggggtagccgccgtagcctccctgttggctgcgctgtgctacgcagagtttggggctagagtcccgcgaactgggtccgcctacctattcacctatgttagcatgggggaattgtgggcattccttatcgggtggaacgtgttgctagaatatatcatcggaggcgcggccgttgcccgggcttggagtggctatcttgatagcatgttcagccattcaatccggaattttaccgagacacacgtgggttcgtggcaggtgcccctgctggggcactatcccgatttcctggccgctggaatcatcctgctggcctccgcttttgtgtcatgcggggcccgtgtgtccagttggctgaaccacacttttagtgcaatctcacttctggtgatccttttcatcgtgatccttgggtttatactggcacagccccacaactggagtgccgatgaagggggcttcgcgcccttcggtttctccggagtaatggcaggcacagcctcttgcttttacgccttcgtgggattcgacgtcattgcagccagcagtgaggaagcacaaaatccacgacgctcagtccccttggccatcgccatcagtctcgccattgccgctggtgcatacatcttggtgtctactgtgttgacactaatggttccttggcacagcttagatcctgatagtgcactggccgacgccttctaccagcgcggctacaggtgggcgggattcatcgttgcagccggaagcatctgcgccatgaacacagttctgctcagcttgctcttcagtctcccaagaatcgtttatgccatggcagccgatggcttgttcttccaagtctttgcacacgtgcaccctagaacccaggtgccagtagcagggaccttggccttcggcttgctaacagcttttctcgccctactactggatctggagagcctggtccagttcctgagtttgggtacccttttagcatatacatttgtggcaacatcaatcatagtgttgcggttccagaaatccagccccccgagtagcccagggccagcaagcccaggcccacttaccaagcagcaaagcagcttctcagaccacttgcagctggtggggacggttcacgcaagtgtgcccgaacccggcgaactcaagcctgccttgaggccttacctcgggtttttggacggttatagccccggggctgtggtgacgtgggcactgggcgtgatgctggcttctgccattacaatagggtgtgtcctcgtcttcggcaactccactctccacttgccgcactggggttacatcctcctgttactgctcacctcagtgatgtttcttttgtcactgcttgtgttgggggcccaccagcagcagtacagggaagatctcttccagattccgatggtaccgctcatacccgccttaagcatcgtcctcaacatctgcctgatgctcaaactgagttatctgacatgggttcggttttccatttggcttctcatgggactagcggtatacttcgggtacggaatacggcatagtaaagaaaatcagcgtgagctgcccggcctcaattctacccactacgttgtgtttccaagaggttctctagaggagacagttcaggcaatgcagcccccctcccaagcacctgcacaggatcccggccatatggagtag

SEQ ID NO: 206431 - DNA, 249 bp, synthetic construct
  misc_feature 1..249: note = Description of Artificial Sequence: Synthetic coding sequence
  source 1..249: mol_type = other DNA
atggcccggggcctgcccaccatcgccagcctggcccggctgtgccaaaaacttaatcgtctaaagccactggaagacagcacaatggagacatcccttcgaaggtgtcttagcactctggacctgacccttctgggcgtgggcggaatggtaggctctggcctttatgtgttgaccggggcggttgccaaggaagtggctggtcctgccgtcctgctatctttcggtgtggccgccgttgcctcttag

SEQ ID NO: 206432 - DNA, 2922 bp, synthetic construct
  misc_feature 1..2922: note = Description of Artificial Sequence: Synthetic coding sequence
  source 1..2922: mol_type = other DNA
atgtacaacatgcggcggctgagcctgagccccaccttcagcatgggcttccacctgcttgtaactgttagcctcctgttcagccatgtggaccacgtgatcgccgagaccgagatggaaggcgagggcaatgaaacaggggaatgcaccgggtcttattactgtaagaaaggagtgattctccccatctgggaacctcaagacccatccttcggtgataaaatagcaagagccaccgtttatttcgtggcgatggtgtacatgtttctgggagtgtccattatcgctgatcgcttcatgtcttcgatcgaggtcataaccagccaagaaaaagagataaccattaaaaagcccaacggcgagaccactaagactaccgtcaggatctggaacgaaacagtgtctaatctcaccctgatggctctaggatcgagcgcccccgaaattttgctctccgtcatagaggtgtgcggccataactttaccgcaggggacctcggcccttccacaatcgtaggcagtgccgcgtttaatatgttcatcatcatcgccctgtgtgtgtatgttgtcccagatggtgaaacccggaagatcaagcacctccgcgtcttttttgtcactgccgcttggagtatctttgcttacacctggttgtacattattctgtccgttatttctcctggggtggtagaagtttgggagggactgttgacttttttcttttttccaatatgcgtggtcttcgcatgggttgccgacagacggctcttgttctataaatacgtctacaaacgataccgggcgggcaagcagagggggatgatcatcgagcacgagggtgaccggccaagttccaagactgagatagaaatggacggcaaggtggttaattctcacgtcgagaatttcttggatggcgcacttgtgcttgaagtcgatgaacgcgatcaagatgatgaagaagctagacgtgagatggccagaattctgaaggagctgaaacagaagcatccagataaggaaattgaacagctcatagaactcgccaattatcaagtcctcagccagcaacagaagtcgcgggcattttaccgcattcaggctacaaggttgatgacgggggcgggaaacatactcaaacgccacgcagcggaccaggctcgaaaagctgtgagcatgcacgaggtgaataccgaggtgaccgaaaatgatcctgtctctaaaattttttttgagcagggcacctaccaatgtctcgagaactgtggaacagtggccctcacaatcattcgccggggtggcgatctgactaacactgtgttcgtggatttcagaacagaggacggaaccgctaacgccggttctgactacgagttcaccgaaggaactgttgttttcaaacccggcgacacacagaaagagattagggtgggcatcattgacgatgatattttcgaagaagacgaaaacttcctggtccacctgtcaaatgtaaaggtgagctcggaggcttcggaagatgggatcctggaagccaatcacgttagcaccttggcctgtcttggctccccctcaacagctactgtcactatctttgatgatgatcacgcagggatttttaccttcgaggaacccgtgacacatgtctcagagtccatcgggatcatggaagtcaaggtgctgaggacttcaggcgcaagaggcaacgtcatcgtgccctataagaccatcgaaggcacagctcggggaggcggcgaggacttcgaggacacctgcggtgaattagagtttcagaacgacgagatcgtgaaaaccatatctgtaaaagtcattgacgacgaagaatatgaaaaaaacaaaacctttttcctggagatcggcgagccaaggttagtggaaatgagcgaaaaaaaagctctcttgcttaacgagctggggggattcactatcactggtaagtacctcttcggccagccagtcttccggaaagtgcacgcccgggagcacccaatactctcgaccgtaattaccatcgcagacgaatacgatgacaagcagcccctgacttcgaaagaggaggaggaaaggagaattgccgagatgggtcggccaattttaggcgagcacaccaagctggaggtgatcatagaagagtcctacgagttcaagtcgactgtggataagcttataaagaagacaaacctcgccctggtcgtgggaaccaattcgtggagggagcagtttattgaggctatcactgtaagcgccggcgaagacgacgatgacgatgaatgtggtgaggaaaagttgccctcgtgtttcgactacgtgatgcatttcctgaccgtcttctggaaggtgctcttcgcctttgttccccccactgagtactggaacggctgggcttgttttatcgtttccattctaatgatcggcctccttacagcctttattggggacctggcttcccacttcggatgtacaatcggtctgaaggattctgtgacagctgtggtatttgttgccctcgggacgtccgtcccagacaccttcgccagcaaagttgccgctactcaagaccagtacgcagatgccagcatcggcaacgtgactggctctaatgccgtgaacgtgttcttagggatcggcgttgcatggtctattgcggcgatatatcatgctgctaacggggaacagtttaaggtttcccccggtactctggccttctcagtgaccctattcacgatttttgcattcattaacgtgggtgtcttgctgtatcgtcggcgcccagaaattggaggagaactcggcggcccacggacagccaaacttctgactagttgcctttttgtacttctttggctcctctatatcttcttcagctccctggaagcgtactgtcacatcaagggcttttag

SEQ ID NO: 206433 - DNA, 2922 bp, synthetic construct
  misc_feature 1..2922: note = Description of Artificial Sequence: Synthetic coding sequence
  source 1..2922: mol_type = other DNA
atgtacaacatgcggcggctgagcctgagccccaccttcagcatgggcttccacctactggtgaccgtctccctgctgttttcacacgtagatcatgtgatcgctgagacggagatggagggtgagggcaacgaaaccggggagtgcactggatcgtactactgtaagaagggggtgatcctgcctatatgggagccacaggacccttcctttggggataagatcgcccgagctaccgtgtactttgtggcaatggtttatatgtttctgggggtgtcaattatagcagacaggttcatgtcctccatcgaggttataacatcccaagagaaagagattacaattaaaaagccaaacggcgagaccacgaaaacgactgtgcgcatttggaacgaaaccgttagtaacctaaccctgatggccctgggctcctctgcgcccgagatcctattatctgtgatagaagtgtgcggacataatttcacagccggtgacctgggcccatcaaccatcgtgggaagcgcggccttcaatatgttcataattatcgcactatgtgtttacgttgtgccagacggagaaacccgtaagattaagcacttaagagtcttttttgtgaccgccgcatggtccatcttcgcctatacgtggctctatatcatcctgagcgtgatctctcccggcgtggtcgaggtgtgggaagggctcctgacattttttttctttccaatctgcgtggtgtttgcctgggtagccgatcggagactgcttttttacaaatacgtgtacaagcgctaccgagcaggcaagcagagggggatgattatcgagcacgagggggacagaccgtcaagtaaaacagaaattgaaatggacgggaaagtggtgaactctcacgtcgaaaattttctggatggggcgctcgtgctggaagtcgacgaaagagaccaagatgatgaagaagcaaggagggagatggcccgaattctgaaggagctgaagcagaagcatccagataaagagatcgaacagctcattgaacttgcaaactatcaggtcctgtctcagcagcagaaaagccgtgcattctacaggatccaggccacgcgcttaatgacgggcgctggaaacatccttaagaggcatgctgctgaccaggctaggaaagccgtgtctatgcacgaggtgaacacagaggtgacagagaacgaccccgtctctaaaatattcttcgaacaaggtacatatcaatgcctggagaactgcggcactgttgcacttaccatcatacggcgcggtggcgatttgactaatacagtgtttgtggactttcggaccgaggatggcaccgccaatgccggctcagattacgagttcacagaagggactgtggtcttcaagcctggtgatacccagaaggagatcagagtgggaattattgacgacgacattttcgaagaagacgagaacttcctggtccacctgtcaaatgttaaggtatccagcgaggcatctgaggatggcatcttagaggccaatcacgtgtctacactcgcctgcctgggctctccaagtactgccactgtgacaatcttcgatgatgatcatgctgggatattcacctttgaagagcctgtgactcatgtgtctgagtctattggcattatggaagtcaaagtcctgagaactagtggagctagagggaatgtcatcgttccttacaagactatagaaggtaccgctcgaggaggtggcgaggactttgaggatacctgtggagagctggagtttcagaatgatgagattgtgaagactatcagtgtgaaagtaatcgatgacgaagagtatgagaagaataaaaccttcttcttagaaatcggagaaccgcgcttggttgaaatgtccgaaaaaaaggccctgcttctgaatgaactgggagggttcaccatcaccggcaagtatttgtttggtcaaccagtattcagaaaggtacacgcccgcgagcacccaattttgagtacagttatcaccatcgctgatgaatatgatgacaaacagccgcttaccagtaaagaggaggaggaacggcgcatcgccgaaatgggccggccaatactgggagagcacacaaaactggaggtcatcattgaggaatcctacgagttcaagtccactgttgacaagctgattaagaaaacaaatcttgctctggtggtgggcactaattcttggagagaacaattcatcgaagctattaccgttagcgctggggaagacgacgatgatgacgaatgcggagaagaaaaacttccatcgtgctttgactatgttatgcactttttgactgtgttctggaaggtgctgttcgcgtttgtgccacctaccgaatactggaatgggtgggcttgttttatcgtgagcatattaatgatcggactgctgaccgccttcataggggatctggcttctcactttggatgcacgatcgggctgaaggacagtgttacagccgtggtgtttgtagcactcgggacttccgtccccgacactttcgcaagtaaggtggccgccacccaggatcaatatgcagatgcttcaatcgggaatgtcacaggctctaacgcagtgaacgtattcttgggtatcggggttgcatggagtattgccgccatttatcacgccgcaaacggcgagcagtttaaggtgtctcccggtacactagcatttagcgttacacttttcaccatcttcgccttcatcaacgtaggagtgttgttatatagacgccgacccgaaattggcggcgagctgggcgggccccggactgctaagcttttgacctcctgtctatttgtcctgctctggctgctttatatctttttcagtagtctggaagcctattgccacattaagggcttttag

SEQ ID NO: 206434 - DNA, 2814 bp, synthetic construct
  misc_feature 1..2814: note = Description of Artificial Sequence: Synthetic coding sequence
  source 1..2814: mol_type = other DNA
atgtacaacatgcggcggctgagcctgagccccaccttcagcatgggcttccatctgctggttaccgtcagcctcctgttttcccacgttgaccacgtcatagcagagacagagatggagggtgaagggaacgagaccggagagtgcaccggctcttactactgcaaaaagggtgtcatcttgccgatctgggaaccacaagatccatccttcggcgacaaaatcgccagagccaccgtctacttcgtggccatggtctacatgtttttaggtgtaagcattatagcagataggttcatgtcctctatagaggttatcactagccaggagaaggagatcaccataaaaaaacccaacggcgaaacaacaaaaactacggtaaggatctggaacgaaacggtgagcaatttaactctgatggcactgggttccagcgcacccgagatcctgctgtccgtcatagaggtgtgtggacataattttacagcaggcgatctaggcccctcaactattgttggatctgcggctttcaacatgtttattattattgctctgtgtgtctatgttgtgccagacggagagaccagaaagatcaagcacctcagagtgttctttgttaccgctgcctggagcatattcgcctacacttggttgtacatcatcctatctgtgatctcacctggggtggtagaggtgtgggaagggctgttaacttttttcttttttcctatctgtgtcgtcttcgcctgggtagccgaccggagattgctgttctacaaatacgtgtacaaacggtatcgcgccggcaaacagagaggcatgattatcgagcacgagggcgacaggccctcatctaaaactgaaatcgaaatggacggaaaggttgtcaatagccacgtggaaaatttcttggatggcgcacttgtgttggaggtggacgagcgtgaccaagacgacgaggaggctagaagagaaatggctcgcattctgaaagagttgaagcagaaacatccagataaggagatcgagcaattgatagagctcgcaaactatcaggtgcttagccagcagcagaagtcccgggctttctaccggattcaagctaccagactgatgaccggagccggaaatatcctgaagagacatgctgcggaccaggcccgcaaggcggtgagtatgcacgaagtgaataccgaggttaccgagaatgatcctgtttcaaaaatctttttcgaacagggtacataccagtgtctagagaattgtgggaccgtcgccctaacaataatacggcgcggaggcgacctaacgaacacagtgttcgtggactttcggaccgaggatggcaccgcaaatgccgggtccgactatgagttcactgagggcacggtcgtgtttaaacctggtgacacacaaaaagagatacgtgtaggcataatagacgacgatatctttgaggaagacgagaattttttggtgcacttgagtaatgtcaaggtctcgagcgaggctagtgaggatggcatcctggaagccaaccacgtctctacattggcatgtctgggcagcccctccacggccaccgtaaccatatttgatgatgatcacgccgggattttcacattcgaggagccggtgacgcatgtaagtgagagcattgggatcatggaagttaaggtcctgcgcaccagtggagcccgtggcaatgtaatagtgccttataagacaattgaggggacagcgcgaggcgggggcgaggatttcgaggatacttgcggggaactcgagtttcagaacgatgagatcgtaaaaatcattaccattaggatattcgatagggaggagtacgaaaaagagtgtagtttctcactggtgcttgaggagcctaagtggatcaggcgcggcatgaagggtggatttactatcaccgatgaatacgatgacaaacagccgcttacctctaaggaagaggaggaaaggcgaattgccgagatgggccgaccaatcctgggcgagcacacaaaactcgaggtgatcatagaggagtcgtatgagttcaaaagcaccgtcgataagttaataaagaagacgaatctcgccctagtcgtcggcaccaattcctggagggagcagttcatagaggcgatcacagtgagcgcgggagaggacgacgacgatgatgagtgcggcgaagagaagttgccatcctgtttcgactatgtgatgcatttcctcaccgtcttctggaaagtactcttcgccttcgtaccacccaccgaatactggaacgggtgggcatgctttatagtatcgattttgatgatcgggttactcactgcttttatcggcgacttggcatctcactttggctgtaccatcgggcttaaagattccgtgaccgcagtggtgttcgtagctttggggacttctgtcccggatactttcgcgtcaaaggtggccgcaacccaggatcagtatgccgacgcgagcatcggcaacgtgaccggatcaaatgcagtgaacgtgtttctgggaataggcgtggcttggtctattgcagctatttatcatgcagccaacggagaacagttcaaggtttcccctggcactttggccttttccgtgacgctgttcactatttttgccttcattaatgtgggagtactgctgtaccggagaagacctgagattggaggagaactcggaggcccacgaacagcgaaactgctcacttcctgtctgttcgtgctgctgtggttgctatacattttcttctccagcctggaagcctattgccatatcaaaggcttctag

SEQ ID NO: 206435 - DNA, 2922 bp, synthetic construct
  misc_feature 1..2922: note = Description of Artificial Sequence: Synthetic coding sequence
  source 1..2922: mol_type = other DNA
atgtacaacatgcggcggctgagcctgagccccaccttcagcatgggttttcatcttctcgtcacggtcagcttgctcttcagccacgtggatcacgtgattgcagagacggagatggagggagagggcaatgagacaggcgagtgtacaggcagctactactgcaagaagggggtcatcttgccaatctgggagccccaggacccaagtttcggggataaaattgctagagccacagtatatttcgttgccatggtgtacatgttcttaggcgtgagcatcatcgcggaccggttcatgagctccattgaggtgattactagtcaggaaaaagagatcacgatcaagaagcccaacggtgaaaccacaaagacgactgtcaggatatggaacgagaccgtgagtaacctaacactgatggctttgggatccagcgcgcccgaaatccttctgagcgtgatcgaggtgtgcggacacaattttactgcaggtgatctgggcccctccaccatcgtcggcagcgctgccttcaacatgttcattatcatcgcactgtgcgtatacgtggtgccggacggtgaaacacgcaagattaaacacttgagagtcttctttgtgactgccgcctggagcatttttgcctacacgtggctgtatattatcctgtccgttatttcccccggagtggtggaggtttgggaaggcctactcacgtttttttttttcccaatctgcgtcgtgtttgcgtgggtagcagacagaaggcttcttttctacaaatacgtttacaagagataccgagccggaaaacagcgtggaatgattatagagcacgagggcgatcggcccagtagcaaaacggagatcgaaatggatggcaaagtagttaactcccatgtggagaactttctggatggagctctggtgttggaggtggacgaaagagaccaggatgatgaggaggctcgacgggaaatggctcgtatcctgaaggaattgaaacagaagcatcccgacaaagagatagagcagctaattgaactggcaaactaccaggttctttcccaacagcagaaaagcagagcattctatcgtatccaggctactagactgatgactggcgcaggaaacattctgaagagacatgcggccgaccaagcgagaaaagcagtctccatgcatgaggtcaacacagaggtgaccgaaaacgatccagtatctaaaattttctttgaacagggcacatatcaatgtctggaaaattgcgggactgtggctctgaccattataaggagaggaggtgacctgacaaacacagtgtttgtggattttcgaacggaagatggcacggccaatgccgggtcagattacgagtttacagagggaacggtggtgttcaaaccaggtgacacccagaaagaaatcagagtgggcattatagacgatgatatcttcgaagaagatgaaaattttttagtccacctgagcaatgtgaaggtcagttcagaagcatccgaggatgggatcctcgaggctaatcatgtgtccacgctggcttgcttagggagtccatcgacggccacagtgaccattttcgatgacgatcatgccggtatatttacattcgaagagcctgtgacccacgtgagcgagagcattggcattatggaagtgaaagttctgcgtacttctggagccaggggcaatgtgatcgtcccttacaagactattgagggcacagcgagggggggcggagaagacttcgaggacacatgtggcgaactcgaatttcagaacgacgaaatcgtaaaaaccatcagcgtgaaggtaatcgatgacgaagaatatgagaagaataaaacgtttttcctggagattggagagcccaggttggttgaaatgtctgaaaagaaagccctgcttctgaacgaactcggtggctttactatcacaggaaaatacctgtttggccagccagtttttagaaaggtgcatgcgagagaacatccaattctgtcaaccgtcattacaatcgcagatgaatacgatgataaacagcccctgacgagtaaggaggaggaggagcggagaatcgctgagatggggcgccccatcttaggtgagcacacaaaattggaggtgattatcgaggagtcctatgaatttaagagcaccgtagacaagttgataaaaaagactaaccttgccctggttgtgggaacaaacagttggagggagcagtttatcgaagcaattacagtatctgctggagaagacgacgacgatgatgaatgtggggaagagaagctgcccagctgctttgactatgttatgcattttctgaccgtattttggaaggtcctcttcgccttcgttccacctactgaatattggaatggctgggcctgctttatcgtgagcatcttgatgataggcctgctaactgcgttcatcggtgatctggcatctcatttcggatgtaccattggtctcaaggatagtgtaactgccgtggtgtttgtggcccttggcacatccgttccagacacatttgcgtcaaaggttgcagctactcaggaccaatatgcagatgcaagcatcggcaacgtgaccggctcaaatgcagttaacgtattcctgggaattggcgtcgcgtggtcaatagcagcaatttaccacgcagcgaacggggaacagttcaaagtgagtcctggaaccctggccttcagcgtcaccctgtttactatatttgcatttatcaacgttggtgtgctgttgtatcgccgccgccccgagatcgggggtgaactcggggggcccagaactgcaaagcttctcacttcttgcctctttgtgcttctttggctgctttatatcttcttcagctccttagaagcctattgccacataaagggtttctag

SEQ ID NO: 206436 - DNA, 2814 bp, synthetic construct
  misc_feature 1..2814: note = Description of Artificial Sequence: Synthetic coding sequence
  source 1..2814: mol_type = other DNA
atgtacaacatgcggcggctgagcctgagccccaccttcagcatgggatttcacctgctagtcaccgtcagtttgctgttttcccatgttgatcacgttatcgctgaaaccgaaatggaaggagagggaaacgaaactggtgagtgcacgggtagctattattgtaaaaagggtgtgatcctcccaatatgggaaccgcaggatccttccttcggggataaaatagcgagggccacagtttattttgtggctatggtctacatgtttctcggcgtgtccattatcgctgatagattcatgtcctcaatcgaagtgattacatcccaggagaaagagatcactatcaagaaaccaaacggcgagaccacaaaaactaccgtacggatttggaatgaaactgttagtaatttgaccctgatggccctgggcagttctgcaccagagattctgctgtccgtgatagaggtgtgcggtcacaacttcacagctggcgatctgggtcccagcacgattgttgggtcagcagctttcaacatgttcatcataattgcactgtgcgtgtatgttgtaccagacggggagacacggaagattaagcatcttagagtattcttcgtgacggccgcctggagcatattcgcgtacacctggctgtacattattctgagtgtaatcagccccggcgtggtggaggtgtgggagggtctgctgaccttttttttcttcccaatttgtgtggtatttgcatgggtggctgatcggcggctgctgttctataaatatgtgtacaagcgctatcgggctgggaagcagcgggggatgatcatcgagcatgagggtgaccgtcccagctccaagacagagatcgagatggacgggaaagtagtgaattctcacgtggaaaatttcctggacggcgccctcgtgctggaggtggatgagcgggatcaggacgatgaggaggcaagacgcgaaatggctaggatcctcaaggagctgaagcaaaaacatccggataaagagatcgaacagcttatcgagttggccaactaccaggtgcttagtcaacaacagaaatctcgtgccttttacaggatccaagccactcgcctaatgaccggtgccgggaatatactcaaaagacacgccgcggaccaggccagaaaagcagtttcaatgcacgaagtgaatactgaagtgaccgagaatgatcctgtaagtaagatattttttgagcagggaacttaccaatgtctggaaaactgcggaactgttgccctgacaatcattcgtcgaggaggcgatctaaccaatacagtctttgtagactttcggacggaagacggcacggcaaatgcaggatctgattatgagtttactgaaggcacagtggtcttcaaaccaggcgacacacagaaggagattcgtgtcggcattatcgacgacgatattttcgaggaggatgaaaattttctcgtgcacttaagtaatgtgaaggtttcttcagaggcctcagaagatggaatcctggaagccaatcatgtgagtactctggcctgtctgggaagccccagtacagccacagtgacaattttcgatgatgatcacgctgggatatttacgtttgaagagcccgtaactcatgtgagcgagtcaatcggaatcatggaggttaaagtccttaggacctcaggcgcacgcggcaacgttattgtcccatacaaaacgatcgagggaacggccaggggaggaggagaggacttcgaggacacatgtggagagctcgagttccagaacgacgagattgtgaaaatcatcaccatccggattttcgatagggaggagtatgagaaggaatgctcttttagcctggttctggaggagcctaagtggatacgccggggcatgaaaggggggttcaccattaccgacgagtacgatgataaacagccactaaccagtaaagaggaagaagaaagacgaatcgctgaaatgggacgtccaatactgggcgagcataccaagctagaagtcattatcgaggaaagctatgagttcaagagcaccgtggacaagctgataaagaaaacaaacctagccttagtagttggcacaaacagctggagggaacagttcattgaggccattacagtctccgcgggagaggacgatgatgatgacgaatgcggggaggagaaactgccctcctgttttgactacgtgatgcacttccttaccgtcttttggaaagttctgttcgccttcgtgcccccaacagaatactggaatggctgggcctgttttattgtatctattctgatgattgggttgctcacagctttcatcggtgatttagccagtcacttcggttgtaccatagggttgaaagacagtgtgaccgccgtcgtatttgttgcactgggaacctctgtgcccgacacttttgcaagcaaggtggccgctacccaagatcagtacgccgatgcctctattgggaacgtgaccggatctaacgccgtgaatgtgtttttgggcattggtgtggcatggagcattgccgcaatctaccatgccgcaaatggcgagcaatttaaggtgtccccggggacccttgccttcagtgtgactctcttcacaatcttcgcgtttattaacgtaggggtgctgttgtaccgccggaggcccgaaatcggtggcgagttagggggtcctcgaactgcaaagctgctcacatcatgcctttttgtgcttctgtggctcctgtatatattcttctcatccctcgaggcttactgtcacattaagggattctag

SEQ ID NO: 206437 - DNA, 2907 bp, synthetic construct
  misc_feature 1..2907: note = Description of Artificial Sequence: Synthetic coding sequence
  source 1..2907: mol_type = other DNA
atgtacaacatgcggcggctgagcctgagccccaccttcagcatgggttttcatctcctcgtaacagtatcccttctgttctcccatgtggatcatgtcattgccgaaaccgaaatggagggggagggcaatgaaacaggtgaatgcacgggatcatattattgcaagaagggagtgattctacccatttgggagccacaggaccccagtttcggcgacaagatagcccgtgcaaccgtgtactttgtggccatggtgtatatgtttctgggcgtgtcgatcatcgccgataggttcatgagtagcatagaagtgatcacgtcccaagagaaagagatcacaatcaaaaaacccaatggtgagactactaaaaccacagtcagaatatggaacgaaactgtttcgaatctcaccttgatggcactgggaagctccgcaccagagatcttgctgtccgtgatagaagtgtgcggccataactttacagcaggcgacctgggaccctccacaattgtgggcagtgctgcgtttaacatgtttattatcatagctctgtgcgtgtacgtggttccagatggcgagactaggaaaatcaaacatctgagggtttttttcgtgaccgcagcatggtcaatctttgcctacacatggctctatatcattctgagcgtgatctctcccggggtggtggaggtgtgggagggcttgttaacattctttttctttccaatctgcgttgtttttgcatgggtcgctgataggcgactgctgttctacaagtatgtgtacaaacgttaccgcgccggcaaacaacgaggaatgattatcgagcacgaaggcgaccggccttcatctaagacggaaattgaaatggatggtaaggtggttaactcgcatgtggaaaactttcttgatggcgctcttgttttggaagtggacgaacgagatcaggacgacgaagaagcacgaagagagatggctaggatcctgaaggagttgaaacaaaaacatcctgacaaagagatcgaacagctcattgagctggccaactatcaggttctctcacaacagcagaaatctcgcgccttctaccgaatacaggctacccgccttatgaccggagccggtaacatcctcaaacgccacgccgccgatcaggcccgaaaagctgttagtatgcacgaagttaacacagaagtgacggagaacgacccagtttccaaaatcttctttgagcaaggcacataccaatgtctcgagaactgcggcacagtggctctgactatcatccgccgggggggagatctgactaacacggtgttcgtagattttcgcacagaggacggaactgccaacgccggttccgattatgagtttaccgagggcacggttgtcttcaagccaggtgatacccagaaagaaattagggtggggataatcgatgatgatattttcgaagaggacgagaacttcctggtacacctctctaacgtcaaagtgtcctcggaagccagtgaggacggaattctggaggcgaatcacgtcagcactttggcctgtcttggttcccccagcaccgcaacagtcacgatttttgacgacgaccacgcaggcattttcaccttcgaggagccagtgacccacgtatccgagtcgatcggaatcatggaggtgaaagtactgaggacctcaggggcccgcggcaacgtcatcgtaccttataagaccattgaggggactgctcgaggcggaggcgaagacttcgaggacacttgtggtgaactggaatttcagaacgacgagattgtaaaaaccatctcagtcaaagtcattgacgatgaggagtatgaaaagaacaagacattcttcctcgaaatcggagaaccacgcctggtggagatgagcgagaagaaggctttattgctgaatgaactaggggggttcacaataaccggacagcccgtgttccgaaaagttcacgcccgggaacatccaattctttccaccgttatcactatcgccgatgagtacgatgacaagcagccattgaccagcaaggaagaagaggagcgacgcattgccgagatgggaaggccaatactgggagagcatacaaagctggaggtaatcatcgaggaatcctatgagtttaaatccacagtggacaagctgatcaaaaagactaatctcgctctggtggtgggcaccaattcctggagagagcagtttatcgaggctatcactgtaagcgcgggagaagacgatgacgatgacgagtgcggggaggaaaaactcccatcctgtttcgattacgttatgcactttcttacggtgttttggaaagtgttattcgcattcgttccccccacggaatattggaacggatgggcctgctttattgtgagcatactgatgattggactgttgacagcctttattggtgaccttgcatcccacttcggctgtaccatcggcctgaaagacagtgtgaccgctgttgtgttcgtggcacttggaaccagtgtgcccgacacattcgctagcaaggtcgccgccacccaggaccagtatgctgacgcaagcatcggcaatgtcactggctctaacgccgttaacgtcttcctggggatcggagtggcctggtcaatcgccgcaatttaccatgccgctaacggcgagcagttcaaggtgtccccagggacgctcgccttttcggtcaccttattcaccatcttcgcctttatcaatgtgggtgtgcttctctatagacgccgcccggagataggcggggaactcggaggtccccgtactgctaagctgttaacctcctgcttatttgtcctgctctggctgctatacattttttttagctctctggaggcgtattgtcatattaagggcttctag

SEQ ID NO: 206438 - DNA, 2814 bp, synthetic construct
  misc_feature 1..2814: note = Description of Artificial Sequence: Synthetic coding sequence
  source 1..2814: mol_type = other DNA
atgtacaacatgcggcggctgagcctgagccccaccttcagcatgggttttcacctgctagttactgtttccctgttgtttagtcacgttgaccacgtaattgccgagactgaaatggaaggtgaagggaacgaaaccggggaatgtaccggatcctattattgcaaaaaaggagtgatcctacccatctgggagccccaggaccctagcttcggagacaaaatagcccgcgccaccgtgtacttcgtcgcaatggtgtatatgttcttgggcgtttccataattgccgaccggttcatgtccagcattgaggtgatcacttcacaggagaaagagataacaatcaaaaagccaaacggggagactaccaagacaacggttcggatttggaatgaaacggtttctaacctaactctgatggccctgggctccagcgcccccgagatactcctgagtgtcatcgaggtgtgtggacacaacttcaccgctggcgacttagggccttcaaccattgtcgggagcgcagccttcaatatgttcattatcattgcattgtgcgtgtatgttgtgcccgacggtgaaaccaggaagataaagcacctccgagtcttcttcgttaccgcagcgtggtccatcttcgcttatacctggctatacatcatcctgtctgtcatctctccaggggtggtagaagtatgggagggactgctcacattctttttctttcctatctgtgttgtgttcgcttgggtggcagaccggaggctattattttacaaatatgtctataagcgctatcgtgcaggcaaacagcggggaatgatcatcgaacacgaaggagaccggccaagctccaaaacggagattgaaatggacggaaaggtagtaaactcacatgtcgaaaacttcctggatggagccctggtgttagaggtcgacgaacgggaccaagatgacgaggaggcaagaagagagatggccagaatcctgaaagagctaaaacagaagcacccagataaagagattgaacagcttattgagctcgcaaattatcaggttcttagccagcagcagaagagtagagccttctacagaatccaggcgacccgtttaatgactggcgccggcaatattctgaagagacatgccgcagaccaggctcggaaggcggtttctatgcatgaagtcaacaccgaggttaccgagaacgatccagtgagcaaaatcttcttcgagcagggtacatatcagtgtctcgaaaactgcggaacagtggccctcacgattatccggaggggaggcgacttaactaataccgttttcgtggatttccgtacagaggacggaactgcaaacgcaggctccgactacgaattcacagaagggaccgttgtttttaaacccggggatacacagaaagagatacgtgtcggcattattgatgacgatatattcgaagaggatgaaaatttcctggttcatctgtctaacgtaaaggtatctagtgaggcttctgaggacggaatcctggaagccaatcacgtgtcaacactggcttgcctaggaagtcctagcacagctaccgtgacgatatttgacgacgatcacgctggaatctttaccttcgaggaacccgtgacccacgtgtctgagtcgattggaatcatggaagtgaaagttctgcgtacctccggggcacggggcaatgtgattgtgccttataaaacaatcgagggcaccgctcgaggcggtggcgaggatttcgaggacacctgcggagagctagaatttcagaatgacgagatcgttaaaatcatcactatcagaatctttgatagagaggagtacgagaaagagtgtagtttctccttggtgctggaagagccgaagtggattcgtaggggcatgaagggaggattcactatcacagatgagtacgatgataagcaacctctgacaagcaaggaagaggaagaacgacgtattgcagagatgggccgacctatactcggtgagcataccaagctcgaggtcataattgaggaatcctatgagtttaaaagcaccgtcgataaacttattaagaagacgaacctagcccttgtcgttggaaccaactcttggcgcgaacagttcatcgaggcaattactgtgagcgccggcgaagacgacgatgacgatgagtgcggcgaagaaaagcttccatcttgctttgactatgttatgcactttctcacagtcttctggaaggttctgttcgctttcgtgcctccgacggagtactggaacgggtgggcatgtttcatcgtctcaatccttatgataggcctgctcaccgctttcataggtgacttagcctctcattttggttgcactattgggttaaaggactctgttacggctgtggtcttcgtggccctcggaacctctgtgcctgacacctttgctagtaaggtcgcagcaacacaggaccagtatgcagatgcttccatcggaaatgttactggatccaacgccgtgaacgtcttcctcggtatcggcgtggcatggagcattgccgctatctaccatgccgctaacggcgagcagttcaaagtcagcccgggcacgctggcctttagcgttacactgtttaccattttcgctttcatcaatgttggggtactgctctacagacgacgtcccgagatcggcggagagcttgggggtcccagaaccgccaaactgctgacgagctgcctgtttgtattactctggcttctgtacatcttcttctcatcactcgaggcctattgccacatcaaaggtttttag

SEQ ID NO: 206439 - DNA, 2814 bp, synthetic construct
  misc_feature 1..2814: note = Description of Artificial Sequence: Synthetic coding sequence
  source 1..2814: mol_type = other DNA
atgtacaacatgcggcggctgagcctgagccccaccttcagcatgggcttccacttactggtcactgtctccctgcttttctcccacgtggaccacgtgattgcagagacagagatggaaggcgagggcaacgagactggggagtgcactggctcctattactgcaaaaaaggggtcattctgcccatctgggagccccaggatccctcgtttggagataaaatcgccagggcgacagtttattttgtcgcgatggtgtatatgtttctaggagtgtccattatagcggatagatttatgagctcaattgaagtcattacaagccaggaaaaggagataactattaagaaaccaaacggagaaaccaccaagacaaccgttcgaatctggaacgagaccgtgtcaaaccttacgctgatggcactgggctccagcgcgcctgagattttacttagtgttatcgaagtatgcggtcataatttcacggccggcgatctcggacccagtaccatagtcgggtctgccgctttcaacatgttcatcattattgctctttgtgtgtatgtcgtgccagatggggaaacgagaaagattaaacacctgcgggttttctttgtcaccgcagcttggagtattttcgcgtacacctggttatatatcatcctgtccgtaattagccccggcgtagtggaggtgtgggaaggcctgctgacgttctttttcttccctatatgcgttgtgttcgcctgggtggccgacaggcgactgctgttttacaagtacgtgtataagcgttatagagccgggaaacagcgggggatgatcatcgagcatgaaggagatagacctagcagcaagacagagatcgagatggacggaaaggtggtcaattctcatgtggagaacttcctcgatggagcactcgttctcgaagtggatgagagagaccaagacgacgaagaggctagaagagagatggccagaatcctgaaggagctgaaacagaagcatccagacaaagaaatagaacagctcatcgaactggctaactaccaagtcctgtcccagcaacaaaagtccagggcattctataggatccaggccactcgcctgatgaccggtgccgggaatatccttaagcggcacgctgctgatcaggcacgtaaagctgtgagcatgcatgaggtcaatacagaagttaccgagaacgacccagtcagcaagattttctttgagcaggggacttaccaatgtctggaaaactgcggcacagtggccctgacaattatccgtcgaggaggagatctcacaaatactgtgtttgttgactttcgaacagaggacggcacagccaatgcgggatctgattacgagttcaccgagggaactgtggtcttcaagccaggcgacacacagaaagaaataagggtcggaattatcgacgatgacatttttgaggaggacgaaaacttccttgtccacctgtctaatgtgaaagtctcgtctgaggctagcgaggatgggattctggaagctaatcacgtgagcacactggcttgcctggggtccccatctacagccaccgtgactatatttgatgatgatcacgcaggaatttttactttcgaggagccggttactcacgtgagcgagtccatcggtatcatggaagtgaaggtgttgagaacgagcggagctaggggtaacgtgatcgttccgtacaaaactatagagggcaccgctagaggcgggggagaagactttgaggatacttgtggggagctcgagttccaaaacgacgagatcgtaaaaatcattacaataaggatcttcgatcgggaagaatacgagaaggaatgttccttttctctggttttggaggagcccaagtggataagacgaggtatgaaaggtggatttaccattactgacgagtatgacgataaacagcctctaacttctaaggaagaggaagagagacgtatcgctgagatgggaaggcctattctgggagaacacaccaagttagaggtcatcatcgaggagagctacgagttcaagtcaaccgtcgacaagctgataaaaaaaacaaaccttgccttggtagtaggcactaatagctggcgcgagcagtttattgaagctattaccgtctctgcaggggaagacgatgacgatgatgagtgcggcgaagagaaattaccatcgtgttttgattacgtgatgcatttcttgactgtgttttggaaagtgttgttcgcctttgtgccgccgaccgaatattggaacggttgggcatgttttatcgtgagcattttgatgattggcctcctgaccgccttcatcggggatctcgcatctcatttcggttgtaccataggcctgaaggattccgtgacggccgttgtcttcgttgcactgggtacctccgtgcccgatacttttgcatccaaagtggccgccactcaggatcaatacgcagatgcttctattggaaacgtcactgggagcaatgcagtgaatgtctttttgggaataggagtcgcttggtctatcgcagccatttatcacgcagccaacggggagcagttcaaggtaagcccaggtactctcgccttctccgtgacgctgttcacgattttcgcgtttataaatgtaggtgttttactgtatcgaagaagaccggagattggcggcgaacttggaggcccacgcacggcaaaacttctcacctcttgtctgtttgtccttctgtggctcctttatatttttttcagttccttagaagcctactgtcacatcaaggggttttag

SEQ ID NO: 206440 - DNA, 1995 bp, synthetic construct
  misc_feature 1..1995: note = Description of Artificial Sequence: Synthetic coding sequence
  source 1..1995: mol_type = other DNA
atgcggcggctgagcctgagccccaccttcagcatgggcttccacctgttggtgaccgttagccttctgttttcccatgtcgatcatgtcatcgctgagacggagatggagggggagggcaacgaaaccggggagtgcaccggatcctattattgtaaaaaaggagtgatcttgcccatatgggaacctcaggatccatccttcggagacaaaatcgcacgggcgactgtctactttgtggccatggtatatatgttccttggagtttctatcattgctgatagattcatgtcatctatcgaggtgattacctcacaggaaaaggagatcacaataaaaaagccaaatggtgagaccacaaagacaacagtgagaatctggaacgaaaccgtcagcaatctgacgctgatggcactcggttcatccgctccagaaattctactgtcagtgatcgaggtgtgcggacacaatttcacagctggagacctgggcccctcaactatcgtcggctctgcggcatttaatatgttcatcattatcgctctgtgcgtgtatgtggtcccagacggagaaacacgcaaaatcaagcatctgagggtgtttttcgtcaccgcagcctggtccatttttgcatacacctggctttatataatcctgagcgttatttctcccggggttgtcgaagtgtgggaagggttgctgacttttttcttctttccaatttgtgttgtgtttgcttgggtggccgaccgcaggctcttgttctacaagtatgtctataagcgctaccgtgctgggaaacagagaggcatgatcattgaacacgagggtgatcgcccttccagtaagaccgagattgagatggacgggaaagtggtgaatagccacgtcgagaatttcctggatggggcactcgtccttgaggtggacgaaagggatcaggatgacgaggaagccaggagagagatggcaagaattctgaaagaacttaaacagaagcatccagacaaagagatcgagcagttgatcgagctggccaattaccaggtgctttcacagcagcagaaaagtcgcgctttttatcggattcaagcaacccgactcatgacaggcgccggaaacatcctcaaacggcacgccgctgatcaggctagaaaagctgtgagcatgcacgaagttaatacagaagttactgaaaatgaccctgtgagcaaaattttctttgagcaagggacctaccaatgtctcgagaactgtggcacggtagcgttgacgatcatccggcgcggtggcgatctgactaacaccgtgttcgtcgatttccgaactgaggacggcaccgcaaacgccggatcggactacgagtttacagaggggaccgttgtcttcaagccgggcgacacacagaaggaaatacgcgttggaatcattgatgatgacatctttgaggaagacgaaaacttcctggtgcatctgtcgaatgtgaaagtctccagcgaggcctctgaggatggtatattagaagctaatcatgtgtcaacattagcctgcctcggctctccaagcacagctacggtgactatcttcgacgacgatcatgccggcatcttcacttttgaggagccagtgacacatgtctcagagtctatcggcattatggaggttaaggtgctgcggacatccggcgctagaggcaacgtgatcgttccttacaagaccattgagggcactgcccggggagggggagaggatttcgaagacacctgtggagagctggagtttcagaatgacgagatcgttaagacaatttctgtgaaggttattgatgacgaggagtacgaaaaaaacaagaccttcttcctggagatcggcgagccacggctggttgagatgtccgagaagaagggccgctctctgcccttagaatacctcaccgtgcggaacatgcggaaatcagccgtcagccctctgtgtctgaggaaccaaaacggctag

SEQ ID NO: 206441 - DNA, 2898 bp, synthetic construct
  misc_feature 1..2898: note = Description of Artificial Sequence: Synthetic coding sequence
  source 1..2898: mol_type = other DNA
atgtacaacatgcggcggctgagcctgagccccaccttcagcatgggtttccacctccttgtcacggtcagcctcttatttagccacgtggaccacgttatcgccgagacagagatggagggtgaaggcaacgagactggcgaatgtaccggatcctactactgcaaaaaaggcgtaattctgcccatttgggaacctcaggacccatcattcggagacaagatcgcgcgcgcgacggtgtacttcgtggccatggtctacatgttcctgggagtctctatcatcgccgatcgatttatgagcagcatagaggtaataacctctcaggagaaggaaataaccatcaaaaagcctaatggagagaccacaaagaccactgtgagaatctggaacgagaccgtgagcaacctgactctgatggccctgggatcttccgccccagaaattctgctttcagtgatcgaggtctgtggtcacaattttaccgccggcgacctgggtccgtctactatagtcggtagcgctgcatttaatatgttcatcattatcgctctgtgtgtgtacgtagtgcccgatggcgagactaggaagatcaaacaccttagggtcttttttgtgaccgccgcctggtctatcttcgcctacacatggttgtacattattctgtctgtcatcagtccaggagtcgtggaagtttgggaggggctcctaactttcttcttcttcccaatctgtgtagttttcgcttgggtcgccgatcgcaggttgcttttctacaaatacgtgtataaaaggtaccgagctggaaagcaaaggggcatgatcattgagcatgaaggagaccggccttcctccaagacagagatcgagatggacggaaaagtggtcaactcccatgtcgagaattttctggacggcgccctggtgcttgaagtagacgagcgcgaccaggatgacgaagaagccaggcgcgaaatggcccgaattctgaaggagctgaagcaaaaacatccggacaaagagattgagcaacttatcgaattggctaattatcaggttctcagccagcagcagaaatcgagggccttttacaggattcaggccacgcgcctgatgactggggctggcaacattctgaagcgccatgccgctgaccaggcacggaaggctgtgagcatgcatgaggtgaacaccgaggtgacagagaacgaccccgtcagcaaaattttctttgagcagggtacataccagtgtctggaaaactgcggcaccgttgccctcacaatcataaggcgagggggtgaccttactaacactgtctttgttgacttccgcactgaggatgggactgccaacgcaggctctgattacgaatttaccgagggcaccgtggtgttcaaaccaggagatactcagaaggagattcgtgtcgggatcatcgacgacgacatcttcgaggaggatgagaactttctggtgcatctgtccaacgtgaaggtgagctctgaagccagtgaggatggaatcttagaagctaatcacgtctcgaccctcgcttgtctggggagcccctctacagctaccgtgactatctttgacgatgaccatgccgggatcttcacctttgaagaacccgttacacacgtgtccgaaagtattggcattatggaggtgaaagtgttacggaccagcggggcacgtggcaatgtgattgttccatacaagaccatcgagggtactgccagagggggcggtgaggactttgaggatacttgtggggagctggaattccagaacgacgagatagtgaagattatcactatcaggatttttgacagggaggagtacgagaaggagtgttctttctccctggtgcttgaagaacccaagtggattcgtcggggaatgaaggggggcttcacaatcaccgggaagtatctctttggacagccagtgttccggaaggtacacgcacgcgaacatccaattctctccacagtgattactattgcagacgagtatgatgacaaacagccactgacaagcaaagaagaggaagagcgaaggattgcggagatgggaaggcctatattaggggagcataccaagctggaagtcatcatagaagagtcatacgagttcaaaagtaccgtggataagctcataaagaagacaaatttggccctcgtggtgggcacaaacagttggcgcgaacagttcatcgaggctattaccgtgtccgccggtgaagatgatgatgacgacgaatgcggggaggagaagctaccttcgtgttttgattatgtgatgcatttcttaactgtcttttggaaggttcttttcgcgttcgttccgcctacggaatactggaacggttgggcttgttttattgtgagcatattaatgatcggtctgctcactgcctttataggagacttggccagccacttcggctgtactatcgggttgaaagattcagtgactgccgtcgttttcgtggctcttggtactagtgtacccgatacttttgcaagcaaagtagccgcgacacaggaccagtacgccgacgcgtccatcggtaatgttacaggatctaacgcagtgaacgtgttcctggggatcggggtggcctggagcatcgcagccatttatcacgctgctaacggggagcagtttaaggtgtcccctggcactttggcgttttcagtgactctttttactattttcgcatttataaatgtgggggtgttgctctacagaaggcgcccagaaattggcggcgagctgggaggaccccgaaccgccaaactgctgacctcatgcctgttcgttttactatggctgttgtatatatttttttcgtccctagaagcttattgccatatcaagggcttctag

SEQ ID NO: 206442 - DNA, 222 bp, synthetic construct
  misc_feature 1..222: note = Description of Artificial Sequence: Synthetic coding sequence
  source 1..222: mol_type = other DNA
atgtacaacatgcggcggctgagcctgagccccaccttcagcatgggattccacctccttgtgactgtatcattacttttttcccacgtggaccacgtcattgccgaaacagaaatggagggtgagggaaacgaaacgggagagtgcacagggtcctattactgtaaaaaaggtgtgatcctgcccatttgggaaccccaggacccgtcattcggtgactag

SEQ ID NO: 206443 - DNA, 264 bp, synthetic construct
  misc_feature 1..264: note = Description of Artificial Sequence: Synthetic coding sequence
  source 1..264: mol_type = other DNA
atgtacaacatgcggcggctgagcctgagccccaccttcagcatgggatttcacctgctcgtgacggtgagcctgttatttagtcatgtggaccacgtgatcgctgaaaccgaaatggagggcgagggaaatgagacaggggagtgtaccggaagctactactgtaaaaagggtgtcattctccctatttgggagccacaagaccccagcttcggggacaaaattgcgagagcaaccgtttatttcgtagccatggtttactag

SEQ ID NO: 206444 - DNA, 264 bp, synthetic construct
  misc_feature 1..264: note = Description of Artificial Sequence: Synthetic coding sequence
  source 1..264: mol_type = other DNA
atgtacaacatgcggcggctgagcctgagccccaccttcagcatgggcttccacctccttgtaaccgtgtctctgctcttctcccatgtcgaccatgtgatcgcagagactgaaatggaaggtgaaggcaatgaaaccggggagtgtaccggatcttactattgtaagaagggtgtgattcttcccatatgggagcctcaggacccttcctttggcgataagattgctcgcgctaccgtgtatttcgttgccatggtttactag

SEQ ID NO: 206445 - DNA, 2883 bp, synthetic construct
  misc_feature 1..2883: note = Description of Artificial Sequence: Synthetic coding sequence
  source 1..2883: mol_type = other DNA
atgtacaacatgcggcggctgagcctgagccccaccttcagcatgggcttccatctgctggtaacagtcagtctcctgttctcacacgtggaccatgtgatcgccgaaacagagatggagggagaaggcaatgaaaccggagagtgtactggatcatactattgtaagaaaggggtcattctaccaatatgggagccacaagacccatcgttcggcgacaaaattgcgcgagctacagtgtatttcgtggcgatggtctatatgttcctaggcgtttctattattgccgaccgttttatgtccagtattgaggtgataacaagccaggagaaagagattacgatcaagaagcccaacggagaaactacaaagaccaccgtgcggatctggaacgagactgtgagcaacctcaccctgatggccctggggtcatccgcccctgagatactcctgtccgtgattgaggtttgtggccacaacttcacggccggcgacctcggcccctctaccatcgtaggttccgccgctttcaacatgttcataatcattgctctatgcgtctacgtggtgccagacggcgagactcggaagataaaacacctccgcgtcttcttcgtcacagcggcctggagtatcttcgcctacacgtggctttacattatcctttcagtgatttctcccggcgttgtagaggtttgggaaggcctgctcacctttttctttttccctatctgcgtcgtttttgcatgggttgccgaccggcggttactcttctacaaatatgtctataaacgctacagagctgggaaacagaggggaatgatcattgagcacgagggcgaccgtccttcaagcaagacagaaattgaaatggatgggaaagttgtgaatagtcacgttgaaaactttctggatggggcattggtccttgaggtggacgagcgcgaccaggacgacgaagaggcaaggcgcgagatggcccgcattctcaaagagcttaagcaaaagcatccagataaggaaatcgagcagctgattgaattggctaattatcaggtgctgagccagcagcagaaatcccgggccttctatcgcatccaagcaacgcgtctaatgacgggggcaggaaatatcctgaagagacacgctgcagatcaggcccggaaggccgtgtccatgcatgaagtaaatacggaggttactgagaacgaccctgtgagtaaaatcttcttcgaacagggcacctaccagtgtttagagaattgtggcacagtggccttgactatcataagaaggggaggcgatttgaccaacaccgtgttcgtggacttccggacagaagatgggaccgcaaacgccggtagtgactacgagttcactgagggaactgttgtgtttaaaccaggcgatacccagaaagagattagagtcggcattattgatgacgatatattcgaggaagacgagaattttttggtgcacctctctaacgtgaaagtatcttccgaggccagtgaggacggtattctggaagccaaccacgtgagcaccttggcatgcctagggtcgccctcaaccgccactgttactattttcgatgacgaccatgcagggatatttacattcgaggagcccgtcacccatgtgagcgaaagcataggcataatggaagttaaagtgttgcgaacgtctggcgcgcgcggaaacgtcatcgtgccctacaaaactatcgaagggacagctcgcggggggggcgaggactttgaggacacctgcggagagctcgaatttcaaaacgatgagatcgtcaagatcatcaccatacgcatcttcgacagggaggagtatgagaaagaatgcagcttttccctggtgctggaggaacccaagtggatacgacgggggatgaaggagggtttctggctgtctagccagccggtgttcagaaaggtgcatgctcgagaacacccaatcctgtctacagttatcactattgccgatgagtatgatgataaacagccattaaccagcaaagaagaggaggagcgcaggatagccgagatggggcgccctatcctaggtgagcacaccaaactcgaggtaattatcgaagagtcttacgagtttaagtctactgttgacaagctgatcaagaaaacaaatctggccctcgtagtagggaccaacagctggagggagcagtttattgaggcaatcactgtatccgctggagaggatgacgacgacgacgagtgcggagaagagaaattgccatcttgtttcgactatgttatgcactttttaactgtgttctggaaagtgctctttgctttcgttcctccaacagagtactggaatgggtgggcctgtttcatagtatcgattctgatgatcggacttctcaccgccttcatcggtgacctcgcgtctcacttcggctgcactattggtctaaaggacagtgttaccgcggtggtcttcgtggcgttaggtacaagcgtgcccgacacatttgccagcaaggtggcagccactcaagaccagtacgcagatgcatctattggaaatgtcaccggcagcaacgccgtcaatgtgtttctcggcattggcgtggcatggtctattgctgccatttatcacgctgctaacggggagcaatttaaggtgtcgcccggcacactcgcattcagtgtgaccctctttacaattttcgcctttatcaacgtgggtgtactcctgtaccggcgacgcccagagataggaggcgaacttggcgggcctcggaccgctaaattgcttacctcctgtttgttcgtgcttctctggctcctatacattttcttctcgtcactcgaagcctactgccacattaagggcttctag

SEQ ID NO: 206446 - DNA, 2814 bp, synthetic construct
  misc_feature 1..2814: note = Description of Artificial Sequence: Synthetic coding sequence
  source 1..2814: mol_type = other DNA
atgtacaacatgcggcggctgagcctgagccccaccttcagcatggggtttcacctgctggtaaccgtgtcactgctgttctcacacgtggatcatgtgatcgccgagaccgaaatggaaggggaaggcaacgagacaggagagtgtactggctcatactactgcaagaagggcgtgattctgccgatttgggagccacaggatcccagctttggagataaaattgcccgagcgactgtgtactttgtcgcgatggtttatatgttcttgggcgtctctataatcgctgaccggttcatgtcatcaatcgaagtgattacaagtcaagagaaggaaatcacgatcaagaagcccaatggtgagaccacaaagacaacagtgcgcatctggaatgaaacagtttcaaatctcacattgatggccctagggtctagcgctcctgagatattactgagtgtgattgaagtgtgtggacacaacttcaccgcgggggatctggggccttccacaatcgtaggctcggctgcttttaatatgttcataatcattgccttgtgtgtgtatgttgttccagatggagagacccgcaagatcaagcatctacgtgtattcttcgtcacagcagcttggagtattttcgcttatacctggctatatatcattctgtctgtgattagccccggagtcgtggaggtgtgggagggacttctaacctttttcttcttcccgatctgcgtcgtgtttgcgtgggttgccgatagacgccttttattttataagtacgtgtacaaacgctaccgagctgggaagcagcgaggcatgatcattgagcacgagggcgatcggcccagcagtaagactgagattgagatggacgggaaagtggtcaactcccatgtcgaaaatttcctggatggggccctcgttctggaagtagatgagcgggaccaggacgacgaagaggctcgcagagagatggcccgcatccttaaagaactgaaacagaagcacccggacaaagaaatagagcagctaatcgaactcgctaattatcaggtactctctcagcagcagaagtctcgcgcattctataggatccaggccacacgcctgatgactggggccgggaacattttaaaacggcatgctgccgaccaagcacgaaaagccgttagcatgcatgaagtcaatacggaggtgacggagaacgatcctgtcagcaaaatatttttcgagcagggcacctaccagtgtttggagaattgcggaacagtggcactgacgatcattagacggggcggcgatctgacaaacacagtctttgtcgactttcggaccgaagatggcacagccaatgcaggcagcgattacgaattcacagagggcactgtggttttcaagccaggcgacactcaaaaggaaatacgggtcggaattattgacgacgacatattcgaagaggacgaaaatttcctggttcatctttcgaacgtgaaagtgagctctgaggcatcagaggacggcattttagaagcaaaccatgttagcacattagcatgcctagggagcccatcgacggcaacagtgacgatttttgatgacgaccatgctgggatctttactttcgaggagcccgtgacgcacgtaagtgagagcatcggcatcatggaggttaaagtactgcgcaccagcggggcaagaggcaatgtgatcgttccctacaaaaccatagaaggtactgctcggggcggcggcgaggatttcgaggacacctgcggcgaactcgagttccaaaacgacgaaatcgttaagatcattactataagaattttcgacagagaagagtacgagaaggaatgttcttttagcttggtcctcgaggaacctaagtggatccgccgggggatgaaggaagggttctgctttacggatgaatatgatgataaacagcctctaactagcaaagaagaagaagagcggcgaatcgcggagatgggacgccccatcctgggagagcacaccaaactggaggtgatcatagaggaaagctacgaattcaagagcacagtagacaagctcatcaagaagaccaacctggccctggtcgtgggtactaatagctggcgagagcagttcattgaagcgatcactgtgtctgcaggcgaagacgacgatgatgacgagtgtggggaggagaaacttccaagctgcttcgactatgttatgcattttctgaccgtgttttggaaggtgctgtttgcatttgttcctcccactgaatactggaatggctgggcttgctttatcgtgagtattctgatgatcggcctgcttactgcttttattggcgacctcgccagtcatttcggatgtaccattgggttaaaagactccgttaccgcagtcgtgttcgtggcactggggacctccgtgccagataccttcgctagcaaggtcgcggcaacgcaagatcagtatgccgatgcttcgattggcaacgtaacgggctccaatgctgtaaatgtgtttctgggcataggcgtcgcttggtccattgctgccatttatcacgcagctaacggggagcagtttaaggtttcccctgggactctggctttttcagtgactctgtttacaatctttgccttcattaacgtgggggtcctcctgtatcggcggagacctgaaattggaggcgagctgggcggccccagaaccgccaaacttcttacgagctgtctgttcgtgctcctctggctgttatatattttctttagcagccttgaggcatactgtcatattaagggcttttag

SEQ ID NO: 206447 - DNA, 417 bp, synthetic construct
  misc_feature 1..417: note = Description of Artificial Sequence: Synthetic coding sequence
  source 1..417: mol_type = other DNA
atgtacaacatgcggcggctgagcctgagccccaccttcagcatggggtttcacttattggtgaccgtttccttattgttcagccatgttgatcacgtaattgccgaaacagaaatggagggcgaaggcaacgaaaccggcgaatgtactggatcatactactgtaagaaaggcgtcatcctacctatctgggaacctcaggaccccagctttggggataagatagcaagagcgactgtctacttcgtggcaatggtgtacatgtttttaggcgttagcattatcgcagaccgctttatgagcagcattgaggtcattacttcccaggagaaggaaatcacgatcaaaaagcctaacggagagacgacaaagacgaccgtgcggatctggaatgagactgtctccaacttgacctag

SEQ ID NO: 206448 - DNA, 2907 bp, synthetic construct
  misc_feature 1..2907: note = Description of Artificial Sequence: Synthetic coding sequence
  source 1..2907: mol_type = other DNA
atgtacaacatgcggcggctgagcctgagccccaccttcagcatgggattccacctgctcgtaaccgtcagccttctgttcagccatgttgaccacgtgatcgccgagaccgagatggagggtgagggtaatgagaccggcgagtgcaccgggagctactattgcaaaaagggcgttatcttaccgatttgggaaccacaggacccctcattcggtgacaagattgctcgggccacggtttactttgtggccatggtatacatgttcctgggtgtgagtattatcgccgataggttcatgagctcaattgaggttatcacgtcccaggaaaaggagattaccatcaagaagccaaatggggagaccacgaaaaccactgttagaatctggaacgagacagtcagtaatctcacacttatggctctcggatcatccgcacccgagatcctgctgtccgtcatagaggtctgtggacacaattttaccgctggagatctgggcccatccacaattgtggggtcagccgcctttaatatgttcatcatcatagctttgtgtgtgtacgtagtgcctgacggggaaactcgaaagatcaagcacctgcgggtctttttcgtgacggcagcctggagtatattcgcgtacacttggctgtatatcattctgtccgtcataagtcccggtgtggtggaagtgtgggagggattgctaacttttttctttttccctatctgcgtggtgttcgcctgggtcgcagatcggaggcttctgttttacaaatatgtttataagagatatcgtgccgggaagcaaagggggatgatcattgagcacgagggcgacaggccgtccagcaagactgaaatagagatggatggcaaggtggttaatagtcatgtcgagaattttctcgatggagccctggtactggaggtcgacgagcgggaccaggacgacgaggaagcacgtagagaaatggctaggattttgaaggaattaaagcagaagcatcccgacaaagagattgagcagttgatcgaactcgccaactaccaggtcctgagccaacagcagaaaagtagggccttttaccggatccaggctactcgactgatgaccggtgctgggaacattctgaagcgtcacgctgccgaccaggctagaaaagctgtctcaatgcacgaagtgaacacagaagttacagagaacgaccccgtgtcgaagattttctttgaacagggcacataccagtgtttggaaaactgcggaactgtggctttgaccatcataaggaggggtggtgacctgactaatactgtatttgtcgattttaggaccgaggatggaacagctaacgccggtagcgactacgaattcaccgaaggaaccgtagtattcaaacccggagacacacaaaaagagatccgcgtgggaattatcgatgatgacatttttgaggaagatgagaattttcttgtgcacctgagtaatgtcaaagtctcaagtgaggcctccgaagacggaatcttggaagctaaccacgtgagcaccttggcttgtctgggcagcccttcgacagctactgtcaccattttcgatgacgatcacgcggggatatttacctttgaagagcctgtgacgcacgttagcgaatcgattggaatcatggaagtcaaggtgttgcgtacctccggagcccgagggaatgtaattgttccctacaaaactattgaagggacagccaggggcgggggggaagatttcgaggatacttgcggcgaacttgagtttcagaatgacgaaatcgtgaagaccatttcagtgaaggtgatcgacgacgaggagtacgaaaagaataagaccttctttctcgaaatcggcgaacctagactggtggaaatgtctgaaaaaaaagctctgctgctgaacgagctcggaggattcacaatcacagggcagccagtattccgcaaggtgcatgctcgagaacacccgattttaagcacggtgatcacaattgctgatgagtacgacgacaaacaaccactgacgagcaaagaagaagaggaacgaaggatcgccgagatgggccggccgatactcggagagcatactaaattagaagtaatcatagaagagtcttacgagtttaagagcactgttgataagctcattaaaaaaactaatcttgcattggttgtcggaactaatagctggcgagagcagttcattgaggcaattacagtatcagctggcgaggatgatgatgacgacgaatgtggcgaagagaaactccccagctgtttcgattacgtaatgcactttctgaccgttttctggaaggtgctgttcgcctttgtgccccctactgaatattggaacggctgggcctgttttattgttagcattctgatgattggactgttaacagcctttatcggtgacttggcctcccactttggctgtacaatcggattgaaagacagtgtgaccgcagtggtcttcgtcgctcttgggacatccgtgcctgatacctttgcatccaaagtagcagccacacaggaccagtatgctgatgcttccatcggaaatgtgaccggctccaacgctgtaaatgtattcctgggcattggggttgcctggtccatagctgctatttaccacgccgccaacggagaacagtttaaggtgtcgcccgggaccctcgcattttcggtcactctctttaccatatttgcattcataaacgttggcgttctactctacaggcgccgccctgaaataggcggtgagctgggcggccccagaacggctaaactgcttacatcatgtctttttgtactgttgtggttgttatacatattcttctctagcctggaagcttattgccacatcaaggggttctag

SEQ ID NO: 206449 - DNA, 2766 bp, synthetic construct
  misc_feature 1..2766: note = Description of Artificial Sequence: Synthetic coding sequence
  source 1..2766: mol_type = other DNA
atggcccccctggccctggtgggcgtgaccctgctgctggccgccccaccatgtagtggcgcagccacaccgacaccctcattaccaccaccacccgccaacgactccgatacttcgaccggagggtgtcaaggcagctatcgctgtcagcctggcgtactgcttcccgtgtgggaacccgacgatccctcgctcggagataaagccgcccgggctgtggtgtactttgtggctatggtctacatgttcctcggtgtgtccattatcgccgaccgatttatggcagcaattgaggttatcacctcaaaggaaaaggaaattactatcacaaaagcaaacggagagacaagcgttggaacagtgagaatctggaacgagacggtgtcgaacctgactctaatggctttggggagcagtgccccggaaattttgctgtccgtaattgaagtttgtgggcacaatttccaggcgggcgaattggggcctggcacaatcgtcgggagcgcagcgtttaacatgttcgtggtgatagccgtgtgtatctatgtgatcccagccggcgagagcaggaagataaaacatctgcgggtgtttttcgtaactgcgtcctggtccatcttcgcttatgtctggctctacctgattttggcagtttttagtcccggcgtggtgcaggtttgggaggccctcctgaccctggtgttcttccccgtttgtgttgtgtttgcctggatggcagacaagcggctgttgttctataagtacgtatacaagcggtaccggactgatccaagatctggtatcatcataggcgcagagggagatccaccaaagagcatagaacttgacggtacctttgtgggcgctgaagcacccggcgagctgggtggcctaggtcctggcccagcggaagcccgggaacttgatgcctcaaggagagaagttattcagattctcaaggatctgaaacaaaagcaccctgataaggatttggagcaactggtgggcatcgccaactactacgctctattacatcagcagaagtctcgagccttctaccgcatccaagctactcgcctcatgacaggcgcaggcaacgtgctgcgaagacacgccgcagatgcctctaggagagcagccccggccgagggtgccggggaagacgaagatgatggggcatcaagaattttcttcgagccatctttgtatcactgcctggagaattgtggtagcgtgctgctgtccgtgacctgccagggcggagaggggaacagcactttctatgttgactacaggaccgaggatggatcagcgaaggccggcagcgactatgaatattctgagggaacacttgtgtttaagcccggcgagacacagaaggaactaagaatcggtattatcgatgacgatatctttgaagaggatgagcatttttttgtcagactgcttaatctgcgcgtgggggacgcccaaggtatgttcgaacccgatggcggggggcgaccaaagggcaggctggtcgcccccctgttagccaccgtcaccatccttgacgacgaccatgccggtattttttcctttcaagatagactcctgcacgtcagcgaatgcatgggaacagtcgatgtgagagtggtgagatcctcaggcgccagggggacagtcaggcttccataccgtaccgttgacggcaccgctagaggaggaggagttcactatgaggacgcctgtggagagctggaattcggcgacgatgaaaccatgaaaacccttcaggtgaaaatcgtggacgatgaagagtacgagaagaaggataactttttcatcgaactgggccaaccccagtggttgaagcgcgggatcagtgccctgctgcttaaccagggagatggtgacagaaaattgactgccgaagaagaagaagcccggaggatcgccgagatgggcaagcctgttcttggggaaaactgcaggctggaggtaattattgaagaatcatatgactttaagaatacagtagataaacttataaaaaagaccaatctcgccctcgtaattggcacccactcttggagggagcagttcctcgaggccatcacggtatcagctggagatgaagaagaggaggaggatggctcacgcgaggagcggctgccctcttgttttgactatgtgatgcattttttaactgtcttttggaaggtgctgtttgcctgtgtgccaccaacggaatattgtcacggatgggcctgtttcggagtctcaatactggtcatagggctcctcacagccctcataggggacctggcaagccattttggttgcacagtcggcttgaaggactctgtgaatgctgtcgtgtttgtggccttgggcacctccatcccagatacatttgcttccaaagttgcagcattacaggatcaatgtgccgacgccagcatcggcaacgtcaccggatccaatgccgtgaacgtatttctaggactcggggtcgcatggtcggtggctgcggtttattgggcagtccagggcaggccattcgaggtcaggactgggactctcgcatttagcgtaacactgtttacagtatttgctttcgtggggatcgctgttctcctgtacaggcggcgtccgcacattgggggagaactgggggggccgcgcgggccgaagctggctaccaccgctctcttcctggggctgtggttgctatacatcttatttgcctccttagaggcctactgtcatataagggggttttag

SEQ ID NO: 206450 - DNA, 2478 bp, synthetic construct
  misc_feature 1..2478: note = Description of Artificial Sequence: Synthetic coding sequence
  source 1..2478: mol_type = other DNA
atgttcgtggtgatcgccgtgtgcatctacgtgatccccgccggcgaaagtaggaaaatcaaacatcttcgcgtcttttttgtaacggcctcttggagcattttcgcttatgtttggctgtatctcatactcgctgtgttctcccccggagtggtgcaggtgtgggaagcactcctgacactggtattttttccagtctgcgtggtattcgcttggatggcagataaacgcctgcttttctacaaatacgtatataaacggtaccggacggacccacgttctggcatcatcatcggagccgagggcgatcctcccaagagcattgagttggacgggacttttgtgggagctgaggcccctggagagctcggagggttaggacccggacctgctgaggccagagaattggatgccagtcgtagggaagttatacagatactcaaagatcttaaacagaagcatcccgacaaagaccttgagcagctggtgggaatcgccaattactacgcactgctgcatcagcagaagtctcgggcgttctatcggatccaggccacgaggttgatgaccggcgccggaaacgtgttgagacggcatgctgccgacgcttccaggcgggctgccccggcggagggggctggcgaagacgaggacgacggtgccagtcgcatttttttcgagcccagtctctaccattgcctggaaaactgtggttccgtcctgctgagtgtcacatgtcaaggcggagaaggcaactccaccttctatgttgactaccgcacagaggatggttccgccaaggcgggaagcgattatgagtatagtgagggaactctggttttcaaacctggcgagactcagaaagagctgcgcattggtatcattgatgacgacatcttcgaggaagacgaacacttctttgtgagactgctgaatttacgcgtgggagacgcccagggaatgttcgaacctgatggaggaggaagaccaaagggccggctggtagcccctctgctagccactgtgaccattctagatgatgaccacgccggaatattctcattccaggatcgccttttacacgtttcagaatgtatgggaacagtggatgtgagggtggtccgcagctcgggcgcaaggggcacagttagacttccataccgaaccgtcgacggtacagcccgaggggggggggtgcattacgaggatgcatgcggagaactggagttcggcgacgatgaaacaatgaagacattgcaggtgaagatagttgacgatgaggaatatgagaagaaagacaacttcttcatagaactcggacaaccccaatggctgaaaaggggaatatcagcgcttctcctcaaccagggggacggcgatagaaagcttacggctgaggaggaggaggccagacgaatcgcggaaatggggaaaccggtgctgggggagaactgccgcctggaggtaatcatcgaagaatcatacgattttaagaacacagttgacaagctcattaagaagacgaacctagccctagtgattgggacccacagctggcgagagcaatttctggaggctatcactgtgtctgcgggcgatgaggaggaagaagaagatggctcccgcgaagagcgcctgccatcatgtttcgactacgtcatgcactttcttacagtgttttggaaagttctgtttgcttgtgtgccacccacagagtattgccatggctgggcttgttttggcgtctcgatcttagtgattgggttacttacagctctgattggggacctggcttctcacttcgggtgtaccgtagggctcaaagatagcgtcaacgcagtggtgtttgtggctctgggcactagcatccccggtaacacattaggggatttcgggggggtcgggagtcagatgagtcaggccggcgccacccaggaccctgcgaaaatgcgtcacgtgagacagcagggtggcggggcagcgggcccagtcaggcggagggtgcaccggcagcgcgatcgcctgcagcgaggcgaacgcgtgccatggcccggccggaggctggtttgcggaaggagggtgctgggcggagccgggccacctctcaggggtgcccattggcatgctggcctgctaaggcatgctctacaccggttgcggcttcgaggtcactgtagggcagctgttcctgcccctgctgctcatcgccgtcgcgccggacgccctgcccgaacacaagctaggcatcaccgggccctgcccggacccctagcgcccgttcatcccctgaggcagcccggcggcgtactcccccatcccggtttgctaggacctagagcagaaacgagaccgcatagacctcctggcgcgcgggacagcgccgccccagccctcggcccttggtccccctttcccccgcgactgggcctcctttcctgggattctgccagcctgctgcggccactgccttggctctag

SEQ ID NO: 206451 - DNA, 1155 bp, synthetic construct
  misc_feature 1..1155: note = Description of Artificial Sequence: Synthetic coding sequence
  source 1..1155: mol_type = other DNA
atgggcaccgtggacgtgcgggtggtgcggagcagcggcgcccgggggactgtaaggctaccctaccggaccgtggacggtacagcaagaggaggcggagttcactatgaagatgcttgcggcgagctggagtttggcgacgacgagaccatgaagaccttgcaagtgaagatcgtggacgacgaggaatacgaaaagaaagataattttttcatagaattaggacagccccagtggctgaagcggggtatatcagccctcctgcttaatcagggtgacggagacaggaagctgacagcggaggaagaagaagccagaagaatcgctgagatgggtaaacctgtgctgggtgagaattgcaggctggaagtgattatcgaggaaagttacgacttcaagaacaccgtggataagctgataaaaaaaacaaacctcgccctggttatcggcacacactcatggcgggagcaatttctggaagccatcacggtgtctgccggagatgaggaagaagaagaggacggatctcgcgaagagcgcctgccatcttgctttgattatgtaatgcacttcctgaccgtgttttggaaagtgctgttcgcatgcgtgccccctacagaatactgccacggttgggcgtgtttcggcgtaagcatactggtcatcggcctgctgacagccctgataggggatctcgcttctcactttggatgcacggtgggcctgaaagacagcgtgaacgccgtggtctttgtggcgctgggcacatctatccctgataccttcgcttctaaggtcgccgcactgcaagaccagtgcgccgacgctagtatcggtaatgtcactggctctaatgctgtcaatgtgttcctgggcctgggcgtcgcatggtcagtggcagcagtctattgggcagtgcagggccggcccttcgaagtgaggacaggtaccctggctttctcagtgacattgtttactgtctttgccttcgtggggattgccgtgctgttgtatcgtaggcgcccccatatcggaggggaattgggcgggcccagaggacctaagttggccaccacagccctgttcctgggtctgtggttgctgtatatcctgtttgcttctctggaggcctattgccatatcaggggcttctag

SEQ ID NO: 206452 - DNA, 2034 bp, synthetic construct
  misc_feature 1..2034: note = Description of Artificial Sequence: Synthetic coding sequence
  source 1..2034: mol_type = other DNA
atggccgacaagcggctgctgttctacaagtacgtgtacaagcggtataggactgatccccgaagtggaatcatcattggagccgaaggagacccacccaaatcaattgaactcgacggtacttttgtaggggctgaggctcccggggaactgggaggactcggcccgggcccggcggaggctcgggagcttgatgcctctaggcgggaggtgatccagatcctcaaggatttaaaacagaaacaccccgacaaagacctggaacagctcgtcggaatcgccaattattatgccctccttcaccaacaaaagtctcgagcattctaccggatccaggctacaagactgatgacgggggccggcaacgttttaagacgacacgccgcagacgctagcagacgcgccgcaccagccgagggcgccggcgaggacgaggatgacggcgcctctcgcatcttcttcgagccttctctctaccactgcctcgaaaattgtggatctgtattactgtccgtgacctgtcagggaggagaaggcaattccacgttctatgtggattatagaactgaggatgggagtgcaaaggctggctctgattatgagtattccgagggaaccctcgtgtttaagcctggcgaaacacagaaggagctgcgtataggcattatcgatgacgacatcttcgaagaggacgaacatttttttgtgagactcctgaaccttcgagtgggcgatgcacaggggatgttcgagcctgatggggggggccggcctaaggggcgattggtggcaccgctgctggctacggttaccatcctcgatgacgatcacgcaggaattttcagtttccaggacaggctgcttcatgtgtccgaatgtatgggtaccgtggatgtccgcgtggtccgatcctctggtgcacgcggcacggtgcggctgccctaccgcacagtagatggaaccgcgcgcgggggcggcgtgcactacgaggatgcttgcggcgaactggagtttggggatgacgagacaatgaaaacccttcaggtgaaaattgttgacgacgaggaatatgagaagaaggacaacttctttatagagctagggcaaccgcagtggttgaagagaggcatatcagccttactactaaaccagggcgacggagataggaagctgaccgccgaagaggaggaggctcgacggatcgcggaaatggggaaacccgtcctcggcgaaaactgtagacttgaggtgattattgaagagtcatatgactttaagaacactgtcgacaaattaatcaagaagacaaatctggccttggtgattggcacacatagttggagggaacagttcctcgaggctatcaccgtgagcgccggagatgaggaagaagaggaagatggctctagagaggaacggctgcctagttgtttcgactatgtgatgcacttccttactgtgttttggaaggttctgttcgcctgcgttccccctaccgaatactgccacgggtgggcttgtttcggtgtctctatattggtaatcgggctcttgacagcactcattggagacctggcaagccactttgggtgcacagttggattgaaagacagtgtaaatgccgtcgtattcgtagcactgggcacatcaatccccgataccttcgctagcaaggtagcggccctgcaggatcagtgtgccgacgcctccattggcaacgtaaccgggagtaacgcagtaaacgtgtttctgggtctaggcgtggcttggagcgtggcggctgtatattgggccgtgcaaggtcgccctttcgaagtgagaaccgggaccttggcctttagcgtgaccctcttcactgtgtttgcgtttgtgggcattgctgtgctcctctaccgccgtcgcccgcacattggtggagaactgggcgggccacgtgggcccaaactagctactactgccttatttctgggcctatggctcctgtatatcttgtttgcctcccttgaggcctactgtcacatcagaggtttttag

SEQ ID NO: 206453 - DNA, 2448 bp, synthetic construct
  misc_feature 1..2448: note = Description of Artificial Sequence: Synthetic coding sequence
  source 1..2448: mol_type = other DNA
atggtgctgcggagcggcatctgcggcctgagcccccaccggatcttccccagcctcctggtagtcgtggcgctggtcggccttctccccgtcctcagatcgcatggcctgcagctttccccgacagcatctacgattaggagctctgaaccaccacgcgagaggagtattggcgatgtgacaactgctccccctgaagttactcccgaaagtagacctgttaaccactccgttacggaccatgggatgaagccacgaaaagctttccccgtgttggggatagactatacccacgtgagaacccccttcgagataagtctgtggatactgctggcttgcttgatgaagattggcttccatgtgattcctaccatctcctctattgtgcctgaatcatgtctcctgatcgtggtgggattgctcgtggggggactgattaagggcgtcggcgaaactccaccctttcttcagtccgatgtgttcttcctgttcctgctaccccctatcatcctggacgcagggtacttcctgcctctgcggcagttcaccgaaaacctgggcactatcctgattttcgccgtagtgggcacgttgtggaacgcatttttcctcggggggctgatgtacgctgtttgcctcgtggggggagaacagatcaacaatatcggcttacttgataacctcttatttgggagcatcatctccgccgtcgaccccgttgctgttctggctgtatttgaagaaatccatattaacgaattgttgcacattctggtcttcggcgaaagcttattaaacgacgctgttacagtcgtcctgtaccacctgttcgaagagtttgccaattacgaacacgtcggcatcgtggatatctttctcggatttctcagctttttcgtcgtggctctcggtggagtgctggttggagtggtgtacggagttatcgctgccttcaccagccgatttacatctcatatccgggtgattgaaccactgttcgttttcttatactcttacatggcctatctgagcgccgagttgtttcatctaagtgggataatggccttgattgcatcaggagtcgtgatgagaccctacgtggaagctaacatcagtcataagtcacacacaactattaagtactttctgaagatgtggagtagtgtttcggagaccctaattttcatcttcctgggggtcagcacagtagccggtagtcaccattggaactggaccttcgtgatttcaacgctgttgttttgcctcattgcccgcgtacttggagtgctaggactgacatggttcattaacaagtttaggattgtcaagctcactccaaaagatcagttcatcatcgcttatggaggactgcgcggtgcaatcgctttctccctcggatatctcctggacaagaagcactttcccatgtgcgacctctttctcaccgccattattactgttatcttttttacagtatttgtacagggcatgacgattcggccattagtggatttgctcgccgtcaagaaaaagcaggagaccaagagaagcatcaacgaagagattcatacccagtttttagaccatctattaaccggaattgaagacatttgcgggcactatggtcatcatcattggaaggataagttgaataggtttaataaaaaatacgttaagaaatgtctcattgcaggggagagatccaaggagcctcagctgatcgcattttatcacaaaatggaaatgaagcaggccatcgaactggttgaaagcgggggaatgggcaaaattccctccgccgtgtccaccgttagtatgcagaatattcatccaaaatctctgccatcagaacggatcctgcccgccctgagcaaggacaaggaggaagagatcagaaaaatcctgcggaataaccttcagaagacccggcagcggctgagaagttacaatcgtcacaccctcgtggctgacccgtatgaggaggcatggaaccaaatgcttcttcggcgacagaaggcacggcagctagagcagaagataaacaattatctgactgtgcccgctcacaaactggactccccgaccatgtcacgcgcaagaatcgggtccgatcctctggcttacgagccgaaggaggatctgcctgtgatcacgatcgacccggcctcaccccagtctcccgagtcagtggatttggtgaacgaggagttgaagggtaaggtgctgggattatccagagacccagccaaggtcgctgaggaagatgaggatgacgatgggggcattatgatgcgctccaaggaaacaagtagccctggcactgacgacgttttcacacctgcacccagcgattctccctctagccagaggattcagaggtgtttgtcagaccccggacctcacccagaacccggcgagggagagcctttcttccctaaaggacagtag

SEQ ID NO: 206454 - DNA, 408 bp, synthetic construct
  misc_feature 1..408: note = Description of Artificial Sequence: Synthetic coding sequence
  source 1..408: mol_type = other DNA
atggtgctgcggagcggcatctgcggcctgagcccccaccggatctttccctctttgctcgtggttgtggcactcgtgggcttactgccagtgcttcgatcgcacggccttcagctcagccccacggccagcaccattcgatcttcggaaccccctagagaacggtctattggcgatgtcactaccgcaccacctgaagtcactccagagtcaagaccagtcaatcattccgttaccgatcacggcatgaagccccgcaaagcttttccagtcctgggcatcgactatacccacgtgagaactccctttgagatatccctgtggatcctcttggcatgcctgatgaagatcggctttccatgtgacccacattacctgaaacaccgacctggtgaacttcccgcctag

SEQ ID NO: 206455 - DNA, 1668 bp, synthetic construct
  misc_feature 1..1668: note = Description of Artificial Sequence: Synthetic coding sequence
  source 1..1668: mol_type = other DNA
atggtgctgcggagcggcatctgcggcctgagcccccaccggatcttccccagtctcttggtggttgtggcgttagtcggattgctgcccgtgttacgaagccatggtctgcaactatctcccactgccagcaccatcagatcctcagagcctcctcgggagagatccattggggatgtcactacagcgccacctgaagtgacccccgaatcgagacctgtgaatcactccgtcaccgaccatggaatgaagccaaggaaagcctttccagtgctcggaatcgattacacgcacgtgcgtacaccttttgaaataagtctgtggatactccttgcatgtctcatgaagatcggctttcacgtgattcctacgattagttctatcgttcccgagtcatgcctccttatcgttgtcgggctgctcgttgggggattgatcaaaggcgtgggtgagacccctccattcttgcagtccgacgttttttttctcttcctgcttccaccaatcatactggacgctgggtacttccttcccctccgacaattcaccgagaacttaggaacaatactcattttcgctgtggtgggaaccctctggaatgcattttttctgggtggactgatgtacgcggtttgcctggtgggaggagagcaaattaacaatattggcctgctggacaacttactgttcggctccatcatcagtgccgtagatcccgtcgcagtgttggcagtgtttgaggagattcacattaacgagctgttgcatatcctcgtctttggcgaatcacttctgaatgacgcagtcacagttgtgctttaccacctgttcgaggaatttgcaaactatgaacacgtcggtatcgtggatatattcctcggttttttgtctttcttcgtggtggcactgggcggtgtgttagtgggcgtggtctatggggtaatcgctgcatttacgagtagattcacaagtcatatccgagtgattgaaccactgttcgtctttctgtacagctacatggcctatctctccgcggagttgttccacctgtcgggcattatggccctcattgcttcaggagtggtgatgaggccttatgtggaggccaatatatcccacaagtctcacaccacgatcaaatattttcttaaaatgtggtcctccgtgtctgagacacttatattcattttcctgggagtgtcgactgtggcgggcagtcaccactggaactggacctttgtgattagtaccttgctcttctgtttgatcgcacgcgttctcggcgtgctgggcttgacttggttcattaataagtttcggatcgttaagctgacaccaaaggatcagttcattattgcctatggagggctgaggggcgcaatcgcattctcgctggggtatctgctcgacaaaaagcacttccctatgtgcgacttgttcctgactgccattattacggttatcttcttcacagtattcgtacaggtccttgggcagggcagggcaggtccttgtttaggagatccacataggcttttcccctggaaggagcgaaaagcctgcgacctcaagtgtgactcatcgccaagcagtacaactaacctgctctgcgatttaggaagagcgactcctccgttttgggcgagtgtgagctctatagtgaaatag

SEQ ID NO: 206456 - DNA, 960 bp, synthetic construct
  misc_feature 1..960: note = Description of Artificial Sequence: Synthetic coding sequence
  source 1..960: mol_type = other DNA
atgaccatccggcccctggtggacctgctggccgtgaagaagaagcaggaaactaaaagatctataaacgaggagattcacacccaatttttagaccatctcctcacaggcattgaggacatctgtggacactatggccaccatcactggaaagataaattaaaccgttttaataagaagtatgtgaaaaagtgtctgatcgcaggagagcggtctaaggagccgcaactgatcgccttctatcataaaatggagatgaagcaggccattgagctcgtagaatccggcggtatgggcaagattccatcagcagtctccacagtgagcatgcaaaatattcacccgaagtctttgcccagcgagcggatcctcccagctctgagcaaggacaaggaggaagagattcggaaaattcttcggaataacctgcagaagacacgtcagcggctccgcagttataaccgtcacaccctggttgcagacccatacgaggaagcctggaaccagatgctcctgagacggcagaaagcccggcagctggaacagaaaattaacaactacctcactgtccctgctcacaagctggacagccctaccatgagtcgggcccggattggctcagatccgctggcctacgagcccaaggaggatttgcccgtgattacgattgaccccgcttctccacagagtccagaatctgtggacctggttaacgaagagctcaaggggaaggtgcttggactatcgagagatccagctaaagtggctgaagaggatgaggacgacgacggcggaattatgatgagatctaaggagaccagttcacctgggacagacgatgtatttacccctgcaccgagtgatagcccaagttcacagcggattcagagatgcctgtctgacccgggaccacaccctgagccgggcgagggggagccattctttccaaaaggacagtag

SEQ ID NO: 206457 - DNA, 675 bp, synthetic construct
  misc_feature 1..675: note = Description of Artificial Sequence: Synthetic coding sequence
  source 1..675: mol_type = other DNA
atggagatgaagcaggccatcgagctggtggagagcggcggcatgggcaaaattcctagtgctgtgtcgactgtgagcatgcagaacatccatcctaagtctctgccctcagagcgcattttgcccgccctgtccaaggacaaggaagaggagattaggaaaatactccgcaataatctacaaaaaacgcgacaacgacttcgctcctataaccgccatacgcttgttgcagacccatacgaagaggcctggaatcagatgctcctgcggagacaaaaggcccgacaactagaacagaaaatcaacaattatctaaccgtacccgctcataaactcgattcccctactatgtcacgcgccaggatcgggtcagatccgctcgcatacgagcctaaagaagacctccccgtcattactatcgaccccgccagcccccagtctcccgagagcgtggacctggtgaacgaagaattgaaagggaaggtactgggactgagccgcgaccctgccaaagtcgccgaggaggacgaggatgatgacggggggatcatgatgaggtccaaagaaacgtctagccctggcacagatgacgtatttactccggctcccagcgactcgccttctagccagagaatacagcggtgtctgagtgatcctggccctcatccagagtag

SEQ ID NO: 206458 - DNA, 1431 bp, synthetic construct
  misc_feature 1..1431: note = Description of Artificial Sequence: Synthetic coding sequence
  source 1..1431: mol_type = other DNA
atggcctacctgagcgccgagctgttccacctgagcggcatcatggcactaatcgcgagcggggtggtgatgcgcccttacgttgaagctaacatatcgcacaaaagtcacactacaattaagtattttctcaaaatgtggagctcagtgtccgagaccttgatcttcatcttcctaggggtgtcaaccgtggctggaagccaccactggaattggacatttgtgatctcaaccctgttgttttgtctgattgcccgggtgctgggagtcctggggctgacctggttcatcaataagtttcgaatcgtaaagctaacacctaaagaccagtttatcattgcctatgggggcctgcgcggcgccattgctttctccctgggctatctcttagacaagaaacatttccctatgtgcgacctgttcctcactgccatcatcacggttattttcttcaccgtcttcgtgcagggcatgaccatacggcccctcgtcgatctgctggcagtgaagaaaaagcaggagacgaagcgctctattaacgaagagatccacacgcagtttctggatcacctgttgactggcattgaagatatctgtgggcattacggccaccaccactggaaggataagctgaatcggtttaataagaagtacgtgaagaagtgtctgattgcaggtgagcgcagcaaggagcctcagctgatcgcgttctatcacaagatggaaatgaagcaggctattgaactggtcgaatcaggaggaatgggtaaaattccatccgcagtctcaactgtgagtatgcaaaacatccatccaaagtcactgccatctgagcggatcctgccagcactatcgaaagataaggaggaggaaatcagaaaaattctaaggaataatcttcagaagacaaggcagcgactacgcagctacaatcgtcatactttggtggccgacccctacgaagaggcatggaaccagatgttgctcaggcgacagaaggcgcgccagcttgagcagaagatcaataattatctgaccgtccctgcacataaattagacagcccaaccatgagtcgggccaggattggatccgacccactggcgtacgagcccaaggaagatctgcccgtgataactattgacccggcctcacctcagagtcctgaaagcgttgatttggttaatgaagagctcaagggcaaggtcctgggactgtctagggacccagccaaagttgcggaagaggacgaagacgacgatggtgggattatgatgcgcagtaaggaaacatcctcccccggcacagacgatgtgttcacccctgccccttctgattccccctctagccagcgcatacagaggtgcttaagcgaccccggtccccaccccgagccgggggaaggtgagcctttctttcccaagggtcagtag

SEQ ID NO: 206459 - DNA, 1626 bp, synthetic construct
  misc_feature 1..1626: note = Description of Artificial Sequence: Synthetic coding sequence
  source 1..1626: mol_type = other DNA
atgaactgccgggagctgcccctgaccctgtgggtgctgatcagcgtctccaccgcggaaagttgcacctctagaccccacattaccgtggtggagggagaacctttctacctgaaacattgctcttgttcacttgcacatgaaattgagaccacaacaaaatcctggtacaagtcatctggaagtcaggaacacgtggagctgaaccctaggagctccagtagaattgccctgcacgattgtgtccttgaattttggcccgttgagctgaatgacaccggtagctacttcttccagatgaaaaattacacgcagaaatggaaactgaatgtgattcgccgaaacaagcacagttgttttaccgagagacaagtgacttccaagatcgttgaggtgaagaagttctttcagatcacttgtgagaattcctattaccagacattagtcaactctacctcactgtacaagaattgtaagaaacttctcctagagaacaacaagaacccaactatcaagaaaaacgccgagttcgaagatcagggctactatagctgcgtccattttctccaccacaacggcaagctgtttaatattaccaagacattcaatataacgatcgttgaggatagaagcaacattgtgccagtcttgctgggacccaaactaaaccacgtggcggttgaattgggcaagaatgttagattgaactgcagcgcactacttaatgaagaggacgtcatctactggatgtttggagaagagaacggatccgaccccaatattcacgaggaaaaagagatgcgaatcatgactcctgaggggaagtggcacgcttctaaggtgctgagaatagaaaacatcggtgagagcaatctgaatgtattgtataattgtactgtcgcctctacagggggaaccgacacaaagagctttatcttagtccggaaggccgatatggcagatattcccggccatgtgtttacacggggaatgatcattgcagtcctcatcctggttgccgtcgtgtgtctagtcacggtatgcgtgatataccgcgtggacttagtcctgttttataggcacctaacacgccgggacgagacattgaccgacggtaagacatatgacgcattcgtctcatatctcaaagaatgtagacccgaaaatggggaggagcacacatttgccgttgagattcttccacgggtcctggaaaagcatttcggatataagttgtgcatcttcgagagggatgtggtgccaggcggcgccgtggtggatgagatccacagcctgatcgagaaatcacgacggcttattatcgtactctctaagtcatacatgagcaacgaggtcagatacgaattggaatctgggctacacgaggcactcgtggagaggaagatcaagatcatcctgatagaattcactccagttaccgatttcacttttttgcctcagtccctcaaactgttgaagtcccatcgagtccttaaatggaaggccgacaaatcacttagctacaattcccggttttggaagaacttactatatctgatgcctgccaagaccgtcaaaccgggtagagacgagcccgaggtcctgcccgtcctgtcagaatcttag

SEQ ID NO: 206460 - DNA, 2505 bp, synthetic construct
  misc_feature 1..2505: note = Description of Artificial Sequence: Synthetic coding sequence
  source 1..2505: mol_type = other DNA
atgtggggcctgggcgcccggggccccgaccggggcctgctgctggcccttgccctgggaggactggccagggctggaggggttgaggtggagcccggcggggcccatggggagagtggtggttttcaggtggtcaccttcgaatgggcgcacgttcaggacccttatgtaattgcactgtggatactcgtggcttctctcgctaaaattggtttccatctttcacataaagtgacctccgtggtgcccgaatctgctttgctcatcgtgctcgggttggtgctaggcggtatcgtttgggcagcggaccacattgcaagtttcactctgacacccacagtgttctttttttacctactccccccgattgtgcttgatgctggatatttcatgcctaatagattattctttggaaacctaggcactattctgctctatgcagtggttggaaccgtgtggaacgccgctacaactggcctgagcctgtatggagtgtttctgtctggtctaatgggggacctgcagattggactcctggactttctgcttttcgggtctctcatggcagccgtggacccagtcgccgtgttggcggtattcgaggaggttcatgtgaacgaagtgctgtttatcatcgtttttggggagagcctgctgaatgacgcagtgacggtggttctgtacaatgtgtttgaatcctttgtggctcttggcggcgacaatgtgaccggcgtggactgtgttaaaggaatagtctccttttttgtcgtgtcacttggcgggaccctggtgggcgtggtgtttgcctttcttctcagcttggttacccgtttcacaaagcatgtgaggatcattgaacccggatttgtgtttatcattagctatctgtcttacctcacttctgagatgttaagtctttccgctatccttgctataacattctgtggaatctgttgccaaaagtatgtaaaggctaacatatccgaacagagcgccacaacagtcagatacaccatgaagatgttggcaagcagcgccgaaacaattatcttcatgtttctcggcatttctgctgtaaatccatttatctggacatggaacactgccttcgtattactgacactggtgttcattagcgtgtatcgggcaatcggtgtcgtactgcagacttggctcctcaacaggtatcgtatggtgcagctcgagcccattgaccaagttgtgctgtcctacggaggcctgagaggtgcggtggcttttgcccttgttgttctgctggacggtgacaaagtcaaggagaaaaacttatttgtcagcaccacaatcatagtggtattctttactgtcatttttcaggggctaaccatcaagccacttgtccaatggctgaaagttaaaagatccgagcaccgggaaccccgtctgaatgaaaagttacacggaagggctttcgaccatattctttccgctatcgaagatattagcggccaaatcggtcacaactatctgcgggacaagtggagccacttcgaccgcaaatttctgtcccgggtcctgatgcggagatctgcccagaagtcgcgcgaccgtatcctaaacgtgtttcacgagctgaatctcaaagatgctatcagttatgttgcagagggtgaacgccgcggatccttggcattcatacgcagcccctccacagacaatgtggtaaatgtggattttacgccccggagttccactgtggaagccagcgtgtcatatcttctgagggagaatgtgtccgccgtttgcttggatatgcagagtctggagcagcgtaggcgctccatcagagatgctgaagacatggtgacccaccacaccctgcagcagtatctttacaagcctcggcaggaatacaagcatttgtatagccgccatgagctgaccccaacagaggacgagaaacaggacagagagatttttcacaggacaatgcgcaagaggttagaaagcttcaagagtactaagctgggacttaatcagaacaaaaaggctgccaagctgtataagcgtgagcgggcacagaagcgccgcaactccagcatccctaacggaaaactgccaatggagagtcccgcccagaacttcaccattaaagaaaaggacttagaattatcggacacagaagaacctcccaactacgacgaggaaatgagcggcggcatcgaattcctggctagcgtgacaaaggacacagcttctgacagtccggcggggatcgacaatcctgtgttttcgccggatgaagcacttgaccgctctctcctggctcgtttgcccccctggctctctccaggggagaccgtggtgccatcccaaagggccagaacccaaataccctactctcccgggactttctgcagattgatgccattccggctcagttctaagtccgtggacagctttctgcaggccgacgggccagaggaacgcccccccgccgcattgccagagagcacccatatgtag

SEQ ID NO: 206461 - DNA, 1077 bp, synthetic construct
  misc_feature 1..1077: note = Description of Artificial Sequence: Synthetic coding sequence
  source 1..1077: mol_type = other DNA
atgagcgccgacgccgccgccggcgcccccctgccccggctgtgctgccttgagaaaggtccaaacggatacggttttcacctgcatggcgagaagggcaagctggggcagtacatacgattggtggagcccgggtccccagctgagaaggctggcctgttggcaggcgaccgactcgtagaagtcaatggggagaacgtggaaaaggagacgcaccagcaggttgtatcaagaatccgagcagcactgaacgctgtaaggctcctcgtggtggaccctgagacagatgagcagctgcagaaacttggtgtgcaagtcagagaagaactcctgagggctcaggaagcaccaggccaggcagagcccccggctgcagccgaggtccaaggggcaggaaatgaaaacgagcctcgcgaggccgacaaatcccacccggaacagcgcgaactgaggccaaggctatgtacgatgaaaaaaggccccagtggctatggcttcaatcttcactctgacaaatctaagcccggccagttcatccgcagtgtggaccctgactctccagcggaagcaagtggcctgcgtgcccaggatcgcattgtcgaagtcaacggagtctgcatggaggggaagcagcatggagacgttgtgagcgcaattagagcggggggcgatgaaactaaattattggtagtggacagagagaccgatgaattttttaaaaaatgccgtgtcataccatcccaagaacacctgaacgggccgctgcctgtgcccttcaccaatggggagatccagaaggaaaactcacgggaggctctggcagaagctgcactagagagcccgcgcccagctttggtcagaagcgcctcgtccgatacctctgaggaacttaattctcaggactctccacctaagcaggactcaactgcacccagtagcacaagtagctcagaccccatcctggatttcaacatctcacttgccatggcaaaggagcgggcacaccagaagcgtagctccaaaagagccccgcagatggactggtcgaagaaaaacgagctgtttagcaatctgtag

SEQ ID NO: 206462 - DNA, 822 bp, synthetic construct
  misc_feature 1..822: note = Description of Artificial Sequence: Synthetic coding sequence
  source 1..822: mol_type = other DNA
atgagcgccgacgccgccgccggcgcccccctgccccggctgtgctgtctggagaaggaaacgcaccagcaggtggtatccaggattagagcagcccttaacgcggttcggttgctcgtagttgatcctgagactgacgaacagctgcagaaactgggggtccaagtgcgcgaggagttactgcgcgcccaggaagccccaggacaggccgaaccacccgctgccgccgaagtgcagggggcaggaaacgagaacgagcccagagaagctgacaaaagtcatccagaacagcgagagttgaggcctcgactttgcaccatgaagaagggaccatccggatacgggtttaacctgcacagcgataagtccaaaccgggacaattcattcggtccgtggacccagattcgccggctgaagcatctggccttcgggcacaggataggattgttgaggtgaacggcgtgtgtatggaaggtaagcagcacggcgacgtcgtttccgccatcagagctggcggtgatggttccgggggggggaatcagagaggcgccgagttcccccgacagccccccaagaccggattacatagcgctttggtgtatttgttgctgcggccacacccaagactccagcatttgcctggacacgggcagcgggagggtcctccagagacccaacagcaaaccggacctgccgatggcctggaacaggagaaacggaccctgcagcaacccttgtccgcgctgctgcccccgtctgactggcaaggcagggcgtccatacctccacacctctttcctagccctcaactgctgccctag

SEQ ID NO: 206463 - DNA, 1014 bp, synthetic construct
  misc_feature 1..1014: note = Description of Artificial Sequence: Synthetic coding sequence
  source 1..1014: mol_type = other DNA
atggccgcccccgagcccctgcggccccggctgtgccggctggtgcgcggagaacagggctacggattccacctgcacggggagaaagggagacgcggacagttcatcagaagagtcgaacctgggagccccgccgaggccgcagctttgcgtgctggcgaccgcctggtggaggtgaacggcgtgaatgtcgagggagagactcatcatcaagttgtgcagaggatcaaagctgtggaagggcaaactaggcttctcgtggtggatcaggagaccgatgaggagcttaggagaaggcagctgacctgtacggaggaaatggcccagcgcggactcccacctgctcacgacccttgggaaccaaagcccgattgggcccatactggctcacattcctctgaggccggcaaaaaggatgtgagtgggcctctccgtgagctgcgacctcggctctgccacctgagaaaaggaccgcaggggtatggattcaatctgcattctgacaaaagccgacccggacaatacataaggagtgtcgaccctgggtcccctgctgcacgatctggtctccgggctcaggaccgcctgatcgaggtgaacgggcaaaatgttgaaggcctgagacacgcagaggtggtcgcaagtataaaagcacgggaagatgaagcacgactccttgtggtggacccagaaactgatgaacactttaagcgcctacgagtaactcccacagaggaacacgtagagggccctttgccttctcctgtgactaacgggacctccccagcccagctcaacgggggtagtgcttgtagctccagaagcgacctgccgggaagtgacaaagacacagaggacggcagtgcttggaagcaggacccattccaggaaagcgggctccacctgtcgcccaccgcggccgaggctaaagaaaaggctcgggcgatgcgtgtaaacaaaagggcccctcagatggattggaaccgaaaaagagagatcttcagtaatttttag

SEQ ID NO: 206464 - DNA, 981 bp, synthetic construct
  misc_feature 1..981: note = Description of Artificial Sequence: Synthetic coding sequence
  source 1..981: mol_type = other DNA
atggccgcccccgagcccctgcggccccggctgtgccggctggtgaggggagagcaggggtacgggtttcacctgcacggcgaaaaggggcggcggggtcagttcatcaggagagtcgaaccaggttcccctgccgaagccgcagctctgagggcaggagatagactcgtggaagttaacggcgtgaacgtggaaggcgagactcaccaccaggtcgtgcagcgcatcaaagccgtggaagggcagacacggttgctggtggttgatcaggagactgacgaagagctccggagacgtcagctcacctgcactgaggagatggcacagcgcgggctcccacctgctcacgacccttgggagccgaagccagattgggcccataccggatctcatagttccgaggccggaaagaaggacgtgtctggcccactccgcgaattgagacctcggctttgccatctgcggaagggcccacagggctacggatttaacttgcacagcgataaaagtcggccagggcagtacatacgcagtgtggatcccgggagtcccgcagcgaggtctgggttgcgagctcaggatcgcttgattgaggtgaatgggcaaaacgtggaggggctgcggcatgccgaggtggtcgccagcatcaaggcgagggaagatgaagcccgattgcttgtggtcgaccctgaaacagatgagcattttaagagacttagagtaactccaacagaagaacatgtcgaggggccactcccctccccagtaacgaatggtacgtcgcctgctcaactgaacgggggctcagcgtgttcttctcggagcgaccttccagggagtgacaaagacactgaggaatcaggactacacctctctccaacagctgctgaagccaaagaaaaggctagggctatgcgtgtgaacaaaagagccccccagatggactggaatcggaaacgcgagatcttttcaaacttctag

SEQ ID NO: 206465 - DNA, 2397 bp, synthetic construct
  misc_feature 1..2397: note = Description of Artificial Sequence: Synthetic coding sequence
  source 1..2397: mol_type = other DNA
atggccctgcagatgttcgtgacctacagcccctggaactgcctgttgcttctggttgccctggaatgttccgaagcctcgagcgatctgaacgaaagcgcaaattcgaccgcccaatatgccagcaacgcctggttcgcggcagccagcagtgaaccagaggaaggtatttccgtgttcgagctcgattatgactatgttcaaattccatacgaggttacactttggattttgctcgcttcactcgccaaaatcgggttccacctctatcatcgcctccctgggctgatgcccgaatcttgcctgctaatcctagtgggcgcgctcgtcggaggaattattttcggcaccgaccacaagtccccccccgtgatggattcttccatttattttctgtacctcctgccccctatcgttctcgaggggggatattttatgcctacgagacccttcttcgagaatatcggtagcatattgtggtgggctgttttgggagccctgatcaacgcgctgggcatcggattatcgttgtaccttatctgccaggtgaaagctttcggtctcggagatgtgaatctgctccagaatctgctcttcggctcacttatttccgcagtcgatcctgtggccgtgttagcagtgttcgaagaagcaagggtgaatgaacaactgtacatgatgatctttggggaggcactccttaatgacggcataactgtggtcctgtataacatgctaatcgctttcaccaagatgcacaagttcgaagacatcgaaaccgtagacatcctggctggatgtgcaaggttcatcgttgtcgggctgggtggggttttgttcggcatagtgttcggcttcattagcgcattcatcacccggttcacgcagaatatcagcgccatagagccactgatcgtgtttatgttctcctacctgtcatatctggctgctgagactctgtacctgagcggcatactggcaataaccgcgtgtgcggtcacgatgaaaaagtacgtggaagaaaatgtctcacaaacctcctacaccacaatcaagtatttcatgaagatgctctcttctgtctcagaaactctaatatttatatttatgggggtgagtaccgtgggtaaaaaccatgaatggaactgggcttttatctgcttcactcttgcattctgtcagatctggcgcgccatctccgtgtttgctctcttctacatttccaatcagtttcgcacctttccttttagcataaaggatcaatgtatcatcttctactcaggagttagaggtgcggggtccttctccctggccttcctcctgcctctctccctattcccacggaagaaaatgtttgtgaccgcaaccctcgtagtcatttacttcacagtgtttattcagggcatcactgttgggccactggtgaggtacctggatgttaagaagactaacaagaaagagtccatcaacgaggaactccacatacgcctgatggatcacctcaaggcggggatcgaggacgtgtgcggccactggtctcactaccaggtccgcgacaagttcaaaaagtttgaccacagatacctgcgaaagattctgattcgcaaaaatctgccaaagagctccatcgtgtctctttacaagaagttggagatgaaacaagctattgaaatggtcgagactggcatcttgtcttccaccgcgtttagtatcccacaccaggcccagagaatccaaggcatcaagcggctctctcccgaggatgtcgagtctatacgggatatcctgacgagtaacatgtatcaggtgcgccagcggactctctcttataataaatataacttgaaaccacaaactagcgaaaaacaggcaaaggaaattctaatcaggcgccagaacactctcagagaaagcatgaggaaaggccatagcctaccctggggaaaacctgcaggcaccaagaatattaggtacctgagttatccctacggtaatccacagtcagccggcagggacactcgagccgcggggttctccgatgatgactcaagcgatccagggagcccttctatcacgttttctgcctgctctcgcattggctccctgcagaaacaggaggcccaggagatcatccccatgaagtcgttgcaccgcggcaggaaagcatttagtttcggttaccagcggaatacttcacaagaagagtacctagggggggtccggcgggtcgcattacggccaaagcccctgtttcacgccgttgacgaggagggagagtccgggggcgagtcggagggcaaagccagtctcgtggaggtgagatcccggtggactgctgatcatgggcatgggcgggaccaccacaggagtcattctcccctcttgcagaagaagtag

SEQ ID NO: 206466 - DNA, 2691 bp, synthetic construct
  misc_feature 1..2691: note = Description of Artificial Sequence: Synthetic coding sequence
  source 1..2691: mol_type = other DNA
atgctgcgggccgccctgagcctgctggccctgcccctggccggcgcggctgaggaacccacacagaaacctgaatctcctggagagcctccaccggggctggagctctttcggtggcagtggcacgaagttgaggccccctatctggtggcgttgtggattctggtcgcgtctcttgcaaaaatcgtgtttcatctgtctcgcaaggtgacttcactggtccccgagagctgcctgctcattctgttgggcctggtacttggaggcatcgtgctcgccgttgcaaaaaaggctgaatatcaactggaacctgggacctttttcctctttctgctgcctcctatcgtgctggatagtggctactttatgcctagcaggctgtttttcgataacctaggcgctattctcacgtatgcggttgtgggcaccctctggaacgctttcaccaccggagccgcgctgtggggcctgcagcaggccggcctagtcgcgccaagggtccaagccgggctgctggatttcttactgtttggaagcctgatttctgcagttgatccggtggctgtcttggccgtgtttgaggaagtacatgttaatgagacgctcttcataattgtgtttggagagtccctgcttaatgatgccgtgaccgtggtgttatataaagtttgtaacagcttcgtggagatgggatccgcaaacgttcaggccacagactacctgaaaggtgtggcctctctgttcgtcgtcagtctgggaggcgccgcagttggactagtgttcgccttcctgctcgccctaactacacgtttcaccaaaagagtacgcattatcgagccgctgctggtctttttgctagcatacgctgcttatctcactgccgagatggcttccttaagcgctattcttgccgtgaccatgtgtgggcttggctgtaagaaatatgtcgaagccaacatttcacataagtctcgaacaactgttaagtatacaatgaagaccctcgccagctgtgcagaaacagtgatctttatgcttctcgggatcagtgccgtagactcgagcaagtgggcgtgggatagcgggttggtactaggcactcttatttttattctgtttttccgcgcactaggggtcgttttacagacatgggtccttaatcaattcagactggtgccattggataaaattgaccaggtcgtgatgtcctatggagggctgcgcggcgcagtggctttcgctctcgtaatcctgcttgatcgcactaaggtccctgcaaaagactactttgtcgcaactaccatagtcgtcgtattcttcacagtcattgttcaaggacttacaatcaaaccactggtgaagtggctcaaagttaagaggtcagagcaccataagcctacgctgaaccaggagttgcacgaacatacctttgatcatattctggccgccgtggaggacgtagttggccatcatgggtaccattattggagagaccggtgggagcagttcgataaaaagtacctgtcccagctcttgatgaggaggtccgcatacaggatcagggaccagatctgggacgtgtattacaggttaaacattagggacgcaatctctttcgtcgaccagggaggtcatgttttatcttccaccgggttaactctgccatcaatgccttctaggaactcagtcgccgaaacctcagtgactaatctgcttagagaatctggctctggggcctgccttgaccttcaagtgattgacactgttcgctcgggcagggacagagaagacgctgtaatgcaccatctgttatgtggaggcctgtataagccacgtcgtcggtacaaagcctcatgttcacggcacttcatttccgaggacgctcaagagcgccaggataaggaggtgtttcagcaaaacatgaagagacggcttgaatcttttaagtcaactaaacataacatatgttttaccaagtccaagccgaggccccggaagactggtcgcaggaaaaaggacggcgtggccaacgcggaggcgacaaacggcaagcaccgaggtctgggcttccaagacacagccgccgtcatcctaaccgtggagtccgaggaggaagaggaggaaagtgacagcagtgagacagagaaggaggatgatgagggtatcattttcgtcgcccgcgccacctcggaggtgcttcaggaaggaaaagtgagcggctctctagaggtgtgcccaagccctcgcatcattccgccctcccccacctgtgctgagaaggagctgccatggaagtcaggccagggggacttagctgtgtatgtatctagcgagaccaccaagatcgtaccagtggatatgcagactggctggaaccagagcatctctagcttggaaagcctggcaagcccgccctgcaatcaggcccccattctgacctgtttgcctccccatccgcggggcacagaggaaccccaagtcccactgcatctcccctcagaccccagatctagctttgcctttcccccttccctggcaaaagcagggaggagtaggtccgagagctccgccgatctaccccaacaacaggagctccagccccttatggggcacaaggaccatacacatttatcgccaggtacagcaacatctcactggtgtattcagtttaaccgggggtctaggctatag

SEQ ID NO: 206467 - DNA, 1308 bp, synthetic construct
  misc_feature 1..1308: note = Description of Artificial Sequence: Synthetic coding sequence
  source 1..1308: mol_type = other DNA
atgcggcggagcgcctaccggatccgggaccagatctgggacgtgtattatcgtttgaacattcgcgatgccatcagctttgtggaccagggtggccatgtgctgagtagtacaggacttacccttccatccatgccgtccagaaatagcgtggccgaaacaagtgtcacaaacctgttacgagaaagcggatccggggcttgcctggacctgcaagttatcgataccgttcgatcgggaagagatagagaggacgctgtgatgcatcacctgctctgcggcggcttgtacaaacctcgccgtcgcatagagctgaggaccgagccttgcggcatgttattgaaaacctttctgcagacagacatggaccaggctttcctgggcaccaagccagctgccgttgccacaagcagccagaggatgcggagatctggtaggacaaggcgcagttcctcccgcatgaaaagaagacttgagagcttcaaatcaactaaacacaatatttgctttaccaagagtaagcccaggcctaggaagactggacgcaggaaaaaggacggcgtggctaatgccgaagcgactaacggaaaacatcgcggtctcggatttcaggacaccgctgcagtcattctaactgttgagagcgaggaggaagaagaggagtctgacagcagtgaaacggaaaaggaagacgatgaaggcataatctttgtagctcgtgctacatctgaagtgctgcaagagggaaaggttagcggtagtctcgaagtctgtcctagccctcgcattatccctccaagccctacctgtgccgagaaagagctaccctggaagtcggggcaaggcgatttggcagtgtatgttagtagtgagactacgaagattgtgccagtggacatgcaaacgggctggaatcagtcaatatcttcattggagtccctcgctagccctccctgcaaccaggccccaattttgacctgcctgcctcctcatccaagaggcactgaagagccccaggtacctctgcatcttccaagtgaccctcgctccagcttcgcatttccccccagcctcgccaaggctgggctcgccgtccgtgccgctctaacgtcccctagcagtcgaagttgtagccccagctgggctacccgaaccacacccattagtgcccaggcccctctgcctcccacgggagcctcctcgtccaccgaagcagctgggtgttcctctcgccccagagggggggcaggaggtggtattcctgttggatccgcaccctgggtaatgggtagggccctagaaacatag

SEQ ID NO: 206468 - DNA, 2106 bp, synthetic construct
  misc_feature 1..2106: note = Description of Artificial Sequence: Synthetic coding sequence
  source 1..2106: mol_type = other DNA
atggcccggcggggctggcggcgggcccccctgcggcggggcgtgggttccagtccacgggcaagacgactcatgcgcccactgtggttgctcctggccgttggagtctttgactgggccggcgccagcgacgggggcggaggggaggcccgagctatggacgaagagattgtgagtgaaaagcaggctgaggagagtcaccgtcaggatagtgccaacttgctgatcttcatcttgttgctgaccctgactatcttgactatttggttgtttaaacaccgcagagcccgctttttgcacgagaccggacttgccatgatctacggcttactggtgggccttgtgctaaggtacggaattcacgttccctcggatgtgaataatgtgactctatcctgcgaggtacagtctagcccaacaacgttattagttaacgtgtcaggaaaattttatgaatatatgctgaaaggggagattagcagccacgagcttaacaacgtccaagataatgaaatgctgaggaaggtgacctttgaccctgaggtttttttcaacatcctcctgccaccaatcatcttctatgccggatattctcttaagcgtagacacttcttcagaaatcttggctcaatacttgcctatgcgttcctgggcaccgccatttcctgcttcgttatagggagcattatgtacgggtgcgtgactttgatgaaggtcactgggcagcttgcaggggatttctatttcactgactgcctcctgttcggggctatcgtcagtgccacggaccccgtcacagttttagcaatctttcacgagctccaggtcgatgttgagctttacgccctcctgttcggcgagagtgtactgaatgacgctgtcgccatcgtcttaagctctagcattgtcgcctaccaaccggcgggagataattctcatacattcgatgtcacagcaatgttcaagtctataggcatcttcttaggtatctttagtgggagtttcgccatgggcgctgccacaggtgtcgtaaccgccttggtgacaaagtttactaagctacgcgagtttcagcttctggagactggcctgttcttcctcatgagctggtctaccttcttgctggccgaggcttgggggttcacaggagtggtcgcagtgctgttctgtggtatcactcaggcccactacacctataacaacctctctaccgagtcacagcaccggaccaaacaactgttcgagctgctgaacttccttgccgagaattttattttctcatacatgggattgaccctgttcaccttccagaaccacgtctttaaccccacttttgtggtgggggcctttgtagccatctttctgggccgggccgctaacatctaccccctgtcactgttgttgaatctggggcggcgttctaagattgggtccaattttcagcatatgatgatgttcgccggtctccggggcgccatggcgtttgcactcgccatccgcgacacggctacgtatgctcgccaaatgatgttttccacgaccttgcttatcgtgttcttcacagtttgggtattcggtggagggaccacggcaatgctgtcttgtctgcacatcagggtgggggtggactccgatcaggagcatttaggagtacctgagaacgagcgcaggacaaccaaggccgagagcgcctggctgtttagaatgtggtacaattttgatcacaattatctgaaacctcttctaacacactccggacccccactgacaacaacccttcctgcctgttgcgggcctatcgcccggtgtctaaccagtccccaagcttacgaaaatcaggagcagttgaaggacgacgactcagacctgatcctgaatgacggcgatataagtctcacttacggtgattcgacggtgaatactgaacctgcaaccagctcagccccaagaaggttcatgggaaattcatctgaagacgcacttgatcgggagttggcttttggggaccatgagctcgtgattcggggaacgaggttggttctgcccatggacgatagcgagccaccactgaatctgctagacaacacgcggcatggacccgcatag

SEQ ID NO: 206469 - DNA, 2010 bp, synthetic construct
  misc_feature 1..2010: note = Description of Artificial Sequence: Synthetic coding sequence
  source 1..2010: mol_type = other DNA
atggcccggcggggctggcggcgggcccccctgcggcggggcgtgggttcctccccccgggctcgaagactgatgaggccattgtggctgctgctcgcagttggagtgtttgattgggcaggtgcatctgacggagggggcggcgaggcgcgagccatggatgaggagatagtatcagagaaacaagccgaggagagtcaccgccaggactctgccaatctattgatctttatcctcctccttacgctgacaattctgaccatttggctgttcaaacatcgaagggcccgctttttgcacgagacaggtcttgccatgatttacggcctgctggtaggcctagttctacgatatggcatacacgttccaagtgatgtgaacaacgtgaccctctcctgtgaagttcagtcttccccgacaacattactggtaacctttgaccctgaagtctttttcaacattttgctccctcccataatattctatgcagggtattcattgaaacgacggcactttttcagaaatctaggctctatcctggcatacgcctttctcgggacagctattagctgcttcgtcataggtagtattatgtatgggtgcgtgacactcatgaaggtaaccgggcagttggccggcgatttttattttacggactgtctcctcttcggtgcaatcgtttcagctaccgatcccgtgaccgttctcgccatttttcacgagttacaagttgacgttgaactgtacgccttactgttcggggagagcgtcctgaatgatgccgttgccatcgttcttagcagttcaatcgtcgcctaccaacctgctggagacaacagccatacctttgatgtgaccgccatgtttaaatccatcgggatctttctgggcattttcagcggatcattcgcaatgggggcagccactggcgtggtgactgccttggtaacaaagttcaccaagttaagagagttccaactgcttgagacagggctgtttttcctgatgtcctggtcaacgttcctactggctgaagcgtggggcttcaccggggtcgtggctgtgttgttctgtggcatcacacaggcacactacacctataataacctctctaccgagagccagcacagaactaagcaactgtttgagctgctgaattttctggccgaaaacttcatttttagctacatgggtttaaccctctttaccttccagaaccacgtcttcaaccctacttttgtggtgggcgcctttgttgccatcttcctcggtcgggctgctaacatttatcctctgtccttgctgctcaacctcggacgaaggtctaagatcggttccaatttccagcatatgatgatgttcgcaggattgagaggagccatggcctttgctctcgcaattagagacaccgccacctatgctaggcagatgatgttcagcacaaccctgctgatcgtgtttttcactgtgtgggtgttcggcggtggaactacagctatgttaagttgtctgcacatcagggttggagtggacagtgatcaggagcacttgggtgtgcctgaaaatgaacggcggacaactaaagcagagtcagcatggctattccgtatgtggtataactttgaccataactatctgaagccgttattaacacatagcgggcccccactgacaacaaccctaccggcctgttgtggacctatcgcgcggtgccttacttcaccacaggcatacgagaatcaagagcagcttaaggatgacgacagcgacctaattctgaacgacggcgacataagcctgacgtatggcgactcaaccgtgaacaccgagccagcaacttcgtcagcacctcgcaggttcatgggaaatagctccgaggacgccctggatcgggagctggctttcggtgatcatgaattagtcatccgaggcactcgccttgttctgcccatggatgacagtgagccaccacttaatcttcttgacaacacgcggcacggtcctgcttag

SEQ ID NO: 206470 - DNA, 1950 bp, synthetic construct
  misc_feature 1..1950: note = Description of Artificial Sequence: Synthetic coding sequence
  source 1..1950: mol_type = other DNA
atggacgaggagatcgtgagcgagaagcaggccgaggagagccaccgtcaggactccgccaatcttctcattttcattctgctgctgactctgaccatcttgacgatttggctgttcaagcacaggcgggcaagatttttgcatgagactggtctcgcaatgatatatggattgttggttggcctcgtactccggtatggcatccacgttccctcagatgtgaataatgtaacactgagctgtgaggtgcagtcaagtccaacaaccctgctagttaacgtctccgggaagttttatgagtacatgctcaagggggaaataagctctcatgaacttaacaacgtgcaagacaatgaaatgctccggaaggtgacctttgatcctgaggtgttctttaacatactgctgcccccaatcatcttctacgcgggttattctctgaaacggcgacatttcttccgcaacctaggttccatccttgcttatgcctttctcggcacggccatttcttgcttcgtaatcggctcaatcatgtacggctgtgtcaccctaatgaaggtcacagggcagctggcgggcgacttctacttcacggactgtctgctgtttggcgccattgtgtctgccacggacccagtgacagttctcgccatttttcacgaacttcaggtcgacgtggaactgtacgctctgctcttcggagagagcgttcttaacgacgccgtggccatagtgttatcaagcagcattgtagcctaccagcctgccggagataactcccacacctttgatgtcaccgctatgttcaaatctatcggcatctttttgggcattttttccggttctttcgcaatgggcgcggcaacaggcgtggtgaccgccctggtgacaaagttcactaagttgagggagttccagctgcttgagacagggctcttcttcctgatgagttggagtacgttcctcctggccgaagcctggggtttcaccggcgtggtcgcagtcctattctgtggcattacccaagcacactacacttataacaatctgtcgaccgagagccagcatcgcaccaaacagctcttcgagctgctaaactttctcgcagagaacttcatattctcatacatgggtttaactctcttcaccttccagaaccacgtgtttaaccccacctttgtggtcggggcctttgtcgccatcttcctgggacgggccgccaatatttatccgctctccctgcttctaaatctgggacgacggagcaagatcggctccaacttccagcacatgatgatgtttgcaggactgaggggggctatggctttcgcgctggcgatcagggacactgctacttacgcccgacagatgatgtttagcacaacccttctgatcgtctttttcaccgtgtgggtgtttgggggtggcacaacagctatgctaagctgcctacatattcgagtcggggttgattccgatcaggaacacctgggagtgcccgaaaacgaacgacggaccaccaaagctgaatctgcctggctgttccgcatgtggtacaatttcgatcataattatcttaaacctttgctgacccactctggcccacctcttaccaccacgctcccagcttgttgtgggcccatcgctaggtgcttaacctctccacaagcatatgaaaaccaagagcaactcaaggacgacgattccgatctgattctgaacgatggggatataagtctgacctacggtgactctacagtgaacaccgagcccgcaacaagttccgcgccacggagatttatgggaaatagctctgaggatgccctggatagggagttagcctttggagatcatgaactcgtgatccgaggcacacgtctggtcctgccgatggatgactccgagcccccactgaacttactggataatacgaggcacggtcccgcctag

SEQ ID NO: 206471 - DNA, 2178 bp, synthetic construct
  misc_feature 1..2178: note = Description of Artificial Sequence: Synthetic coding sequence
  source 1..2178: mol_type = other DNA
atggagcccggcgacgccgcccggcccggcagcggccgggccaccggcgcccccccgcctcgactgctcctgcttcccttactgctcggttgggggctgagagtcgcagcagcagcttccgcatcctcaagtggagctgctgcagaagatagtagcgccatggaggagctggcaaccgagaaggaagctgaagaatcacaccgccaggacagcgtctccctcctgacattcatccttttattaactttgacaatactgacaatttggctcttcaaacatcggcgtgtgcgatttctccacgagaccggcctagccatgatttacggcctcattgtgggggtgattttgaggtatggaacccctgctacctccgggagagacaagagccttagctgcacgcaagaggatcgcgccttctctacactgttagtgaacgtctccggtaagttctttgaatataccctcaagggagagataagtcctggcaagataaattctgtcgagcagaacgatatgctgcggaaagtgacattcgaccccgaggtgttttttaacattctgcttcctcccatcatctttcacgccggctatagccttaaaaagagacattttttccgaaacctggggagtatcctggcctacgcatttttgggcacagctgtctcctgctttattataggaaatcttatgtacggagtagtcaagctgatgaagattatggggcaactgtccgacaaattctactacacagactgtcttttttttggggctatcattagcgcgacggatccagtgaccgtgctcgccattttcaatgagctacacgctgacgtggatctgtacgccctgctgtttggagaaagcgttctaaacgatgcagtagctatagtcctctccagctctatagtggcctatcagccagccggactgaatacgcatgccttcgacgccgcggcattttttaaatctgtaggaatattcctgggaatcttcagcggaagctttacaatgggcgccgtgacaggtgtgaatgccaatgtcaccaaattcaccaagctacattgcttccctctcctggagacggcgttatttttcctgatgtcatggtccacatttttactggcggaggcctgcggattcaccggcgtggtggccgtgcttttttgtgggatcacccaggctcactacacatataataatctcagtgtggaaagtcgctcacggacaaagcagttgttcgaggtactgcatttccttgctgaaaatttcatcttttcttatatgggactggcactttttacttttcagaagcacgtttttagtcccatcttcattataggggcattcgttgccatctttctgggacgtgcggcgcatatttacccactctctttttttctgaaccttggccgtcgccataaaattggttggaacttccagcacatgatgatgttcagtggtttacgcggggcaatggcattcgccctagccattagggatacagctagctacgcaagacagatgatgttcaccaccacattgctgatagtctttttcactgtgtggatcatcggtggcggcaccaccccgatgttgtcctggttgaatattcgcgtgggagtggaggagccatctgaggaggatcagaatgaacaccactggcagtatttccgcgtgggagtcgaccctgaccaggacccgcccccgaataatgatagttttcaggtgttgcagggcgacggaccagactctgctcgcgggaacaggactaagcaggagagtgcatggatattccggctgtggtacagcttcgatcacaattatcttaaaccgatccttacacacagcggcccccctctgacaactacgcttcctgcatggtgtgggctcctcgcccgatgtctgacatcacctcaggtctacgataaccaggagcccttgagggaggaagactctgatttcatcctgactgaaggcgacctgacactcacatatggagacagcaccgtgacagcaaatgggagcagttctagccataccgcctcaaccagcctggagggttctcgccgtactaaatcctcaagtgaggaggtgctggaaagagatctaggcatgggcgaccagaaggtctcctctcgcggaacccgtctggtctttcctctggaagataacgcctag

SEQ ID NO: 206472 - DNA, 1746 bp, synthetic construct
  misc_feature 1..1746: note = Description of Artificial Sequence: Synthetic coding sequence
  source 1..1746: mol_type = other DNA
atgggcgagaagatggccgaggaggagcggttccccaacaccacccatgagggattcaatgtgactctgcacactactctggtcgtgacaactaagctggtgctccccaccccaggcaagccaatcctgcctgtgcagactggcgaacaggctcaacaggaggagcagtctagcggcatgaccatcttcttctccctactagtgctggccatctgcatcatccttgtccatctgttaattcggtaccgactgcactttcttcctgagtccgtcgctgtggtgagtctgggaattctcatgggcgcggtgatcaagatcattgaattcaaaaagctggctaattggaaagaggaggagatgttccgcccaaatatgttctttctactgctgctgcccccgatcattttcgaatccggttactcattacataagggcaatttcttccagaatatcgggtctataacactttttgcagtcttcggtacagcaataagcgcttttgttgtcggcgggggaatttattttttaggacaggctgacgtcatttctaagctcaacatgacggattcgtttgcatttggcagcctgatctccgctgtcgatcctgtcgccacgatagccattttcaacgccttacatgtagaccccgtgctgaatatgttggtgttcggtgagtccatcctgaatgacgctgtgagcatcgtactgaccaacaccgccgagggcttgacaagaaagaatatgtcagatgtgtctggatggcagacctttctgcaagccttagattattttttaaagatgttcttcggctctgctgctctgggcaccctcacaggacttatatctgcactggtgctcaaacatatcgatctgcggaaaacccctagcctcgagtttgggatgatgattatcttcgcgtacctcccctacggcctggcagaggggattagtctgagcggaattatggcaatcctgttttccggaattgtgatgagccactatactcaccacaacctgtcacctgttacccaaatattgatgcagcaaaccctacggaccgtcgcctttctctgtgaaacgtgtgtattcgcatttctcggcctatccatcttttctttcccccacaagttcgaaattagctttgtgatctggtgtattgttctggtactcttcggccgcgctgtaaatattttccccttgagctacctgcttaatttcttcagggatcacaaaatcacccctaaaatgatgtttattatgtggttctcaggcctgaggggagccattccctatgccctgtccctccatctcgacttagagccgatggagaagcgacagttgataggtaccacaaccatcgtgatcgtgctgttcacaatcctcttgctgggcggatctaccatgcctctgattcgcctgatggacattgaggacgcgaaggctcacagacggaataagaaggacgtgaatctgtcaaagaccgagaagatgggaaacaccgtggagagcgaacacctctccgagctgacagaagaagaatacgaagcacactacatcaggcggcaggatctaaaaggattcgtgtggcttgacgccaagtatctgaatccttttttcacccgacggttgacccaggaggacctgcaccatgggagaatccagatgaaaacacttactaataaatggtacgaggaagtgcggcagggtccatccggtagtgaggacgacgagcaggaactcctgtag

SEQ ID NO: 206473 - DNA, 1794 bp, synthetic construct
  misc_feature 1..1794: note = Description of Artificial Sequence: Synthetic coding sequence
  source 1..1794: mol_type = other DNA
atgggcgagaagatggccgaggaggagcggttccccaacaccacccatgagggctttaatgtgactctccatacaacactcgtcgtgacaaccaaactcgtgctgcccactccaggtaagccaatccttcccgtgcagacaggtgaacaggcgcaacaggaggaacagtcaagtggaatgactatattcttctccttgttggtccttgctatctgtattatcctcgtacacttgctgattagataccgtcttcattttttaccagaatccgtagctgttgtatctctgggcatcctgatgggcgctgtaatcaagattatcgagttcaagaaactggcgaactggaaagaagaggaaatgtttcggcccaatatgttcttcctacttctgctccctccaatcatattcgagagcgggtacagcctccataaaggaaacttctttcaaaacattggatcaattaccctcttcgctgtcttcgggacagctatcagcgccttcgtggttggcggaggtatttactttctaggccagggattttttttcgtgtgcgtgtgtgtgttcgtgtgttttatcctgcaagccgacgtgatcagcaagctcaatatgacagacagcttcgcatttgggagcttaatctcagctgtagatccggttgccactatcgcaatcttcaacgcactccacgtggatccagtgctgaatatgttggtattcggcgaaagcatcctcaacgatgccgtgtctatcgttctgacgaacaccgccgagggcctgaccaggaaaaacatgtcagatgtgtccggctggcagaccttcctccaggccttagactatttcttaaagatgttctttggctcagccgcattagggactctgaccgggctgataagcgctttggttctgaagcacatcgacttgcggaagacaccttccttggagtttggtatgatgatcatctttgcctaccttccttatggcctcgccgaaggtatctcattgtcaggaattatggctatcttattcagtgggattgtcatgtcccattacacccaccacaatctgagccctgtcacccagattctcatgcagcagaccctgaggaccgtcgccttcttatgcgaaacctgcgtgtttgcttttctaggcttgagtattttttcctttcctcacaaattcgaaatatcatttgtcatctggtgcatcgtgttggtgctgttcggtagagctgtaaacatattccccctgtcttatctgttgaacttttttagggaccataagattacccccaaaatgatgtttataatgtggttctccggactgcgaggtgcgattccgtacgcgctgtcgctgcacctggacctagaacctatggaaaaacgccagctgatcggcactacaaccattgtgatcgtgctgttcacaatactactgttgggtgggtcaaccatgcccctaatcaggctgatggacattgaagatgcaaaagcccaccgcaggaataaaaaggacgtgaacctaagcaaaactgagaagatggggaacacggtcgaatctgaacatctcagcgagctaaccgaagaggagtacgaagctcattatatccggcggcaagatctgaagggattcgtgtggttggatgccaagtatctcaaccccttcttcacccggaggctgacacaggaggacctgcatcacggcaggattcaaatgaagactctgactaataaatggtacgaagaggtgcgccagggtccctcagggtccgaggatgatgaacaggaacttttatag

SEQ ID NO: 206474 - DNA, 1089 bp, synthetic construct
  misc_feature 1..1089: note = Description of Artificial Sequence: Synthetic coding sequence
  source 1..1089: mol_type = other DNA
atgctggtgttcggcgagagcatcctgaacgacgccgtgagcatcgtcctcacaaatactgcagagggcctgacacgtaaaaatatgagcgatgttagtggctggcaaacctttttgcaggccctggactatttcctgaagatgttctttgggagcgctgccctgggaacgctaacggggctgattagcgcccttgtactaaagcatattgatctgaggaagacccccagtctggagttcggcatgatgatcatcttcgcataccttccctacggtctggccgaagggatcagtctttcaggaatcatggcgatcctcttttccggtatcgtgatgagccattacacgcatcataatctttctcctgtgacccagatcctgatgcagcagacactgcggacagtggcctttctgtgcgagacctgtgtgttcgccttccttgggctgtcaattttcagctttccccacaagttcgaaatttctttcgttatttggtgcattgttctggtcctatttggacgcgcggtgaatatctttcctctgagttacttgctgaatttcttccgagaccataaaatcacacccaagatgatgttcatcatgtggtttagcggccttcggggagcgattccatatgctctttccctccacctggacctggaaccaatggagaaaagacaactgatcgggacaacaactattgttattgtgttatttacgattcttcttctcggcggctctaccatgcctctcatccggttaatggatatcgaggacgcaaaggcacacagaagaaataagaaagacgttaatctgtcaaaaacagaaaaaatgggaaacacggtcgagagtgaacacttatctgagctgaccgaggaggagtatgaagcccattatatacggagacaggatctcaaaggcttcgtatggctggatgcaaagtatcttaatccgttcttcactagaagactcacccaggaagatttgcaccacggacgcatccagatgaagaccttaacaaataagtggtatgaggaggtgcggcagggtcctagcggctccgaggacgatgagcaggagttactgtag

SEQ ID NO: 206475 - DNA, 846 bp, synthetic construct
  misc_feature 1..846: note = Description of Artificial Sequence: Synthetic coding sequence
  source 1..846: mol_type = other DNA
atgatgatcatcttcgcctacctgccctacggcctggccgagggcatctccctgagcggaatcatggccatccttttcagtggcattgttatgtcacactacactcatcacaacctctcacccgtgacccagattctaatgcagcagactcttcgtacagtagcatttctctgtgagacctgcgtgttcgctttcctcggattgagtatattctcatttcctcacaagttcgaaatcagctttgtgatctggtgcatcgttctcgtgttattcgggagggctgtgaacatctttcctctcagctatttgctgaatttttttagagaccacaaaattactcccaaaatgatgttcattatgtggtttagtggactccgcggggctatcccttacgcattgtcactccatttggatctcgaacccatggagaaacgtcagctgattggtactaccaccatcgtcattgttctgtttaccatcttgctgctaggtgggtctactatgcctttgatccggctgatggacatagaggacgcaaaggcccaccgcaggaataagaaagatgtgaaccttagtaagacagagaagatggggaatacggtggaatcagagcacctttccgagctgacagaagaggaatacgaagcccactatattaggcgacaggacttgaaaggttttgtctggctggacgccaagtatctgaatccgttcttcactcgcagattgacacaggaggacctgcatcacgggcggattcagatgaaaactctgaccaacaaatggtatgaggaggtgcgccagggccccagcggcagtgaggatgatgaacaggaattgctgtag

SEQ ID NO: 206476 - DNA, 1938 bp, synthetic construct
  misc_feature 1..1938: note = Description of Artificial Sequence: Synthetic coding sequence
  source 1..1938: mol_type = other DNA
atggagcggcagagccgggtgatgagcgagaaggacgagtaccagttccagcatcagggtgcggtggagcttctggtgtttaacttcctgctaattttaaccatcctgaccatatggctgtttaagaaccatagatttcggttccttcacgagaccgggggggcaatggtttacggcctgatcatggggctcattttgcggtacgcaaccgcacctactgacatcgaaagcggtactgtgtacgattgcgtgaagctaaccttttcacccagcaccctgctggtcaatatcactgaccaggtatacgaatataaatataaaagggagatctcacagcacaatatcaacccacatcagggaaacgcaattcttgagaaaatgaccttcgaccccgagatcttctttaacgtcctgttgccccccattatctttcacgcagggtactcactgaagaaacgccacttttttcagaacctggggtctatccttacttatgcttttctcggaacagccataagctgtatcgtcatcggcctcataatgtatggattcgtaaaagcaatgattcacgcggggcagcttaagaacggcgatttccatttcactgactgtctctttttcgggagcttaatgagcgccactgatcccgttaccgtcttagccatcttccatgagctgcatgtcgacccagatctgtatacgctgctttttggcgaatccgtccttaacgacgcagtggcaatcgtactgacatatagcatcagcatctacagcccaaaagagaatccaaacgcatttgacgcagcggccttctttcagtctgtcggaaattttctagggatattcgctgggtcttttgcgatgggatcggcgtatgctatcattacagctttgttgacaaagttcacaaagctgtgtgaatttcctatgttagagacgggtctgttcttcctgctgtcgtggagtgcctttctttctgcagaggccgctgggctcacagggattgtggctgtcctgttttgtggtgttactcaggctcactacacctataataacctttcttcagacagcaagatacgaacaaagcaactcttcgagttcatgaacttcctggccgagaatgtgatattctgttacatgggactagcactattcacatttcagaatcatatcttcaacgctctgttcattctgggtgcgtttttagctatttttgtcgccagggcgtgcaacatctaccctctgagttttctcctgaatctgggcagaaagcaaaagataccatggaatttccagcacatgatgatgttctcaggcctacgcggggcaattgcatttgcacttgccatcagaaacacagagagccagccgaaacagatgatgtttaccacaactctcctgcttgtgttcttcaccgtgtgggtgtttgggggaggcacgacaccaatgttgacttggctgcagatcagagtgggggtggaccttgacgagaaccttaaggaagacccgtcatctcaacaccaggaggccaataaccttgacaagaacatgacgaaagccgagtcagctcgactgtttcgcatgtggtacagcttcgaccacaaatacctgaagcccatcctcactcatagcggtccaccacttaccaccacactcccagaatggtgcggaccgatatctcgcctccttacttcaccccaggcctatggagagcagctgaaggaagatgatgttgaatgcattgtgaaccaggacgagctcgcaattaattatcaggagcaggcctccagcccctgttctccacctgcccggctcggcttagatcaaaaggcctcaccacaaacccccggcaaagagaatatctacgaaggagatcttggcttggggggctacgaactgaagctcgagcagaccttgggacagtcccagctgaattag

SEQ ID NO: 206477 - DNA, 978 bp, synthetic construct
  misc_feature 1..978: note = Description of Artificial Sequence: Synthetic coding sequence
  source 1..978: mol_type = other DNA
ctgcggctgcagagcagctgggagcagatgaccttcgaccccgagatcttctttaacgtgctgctaccacccatcatcttccatgcaggttactcccttaaaaaaagacatttttttcagaatttgggtagcatcctcacttacgcgtttcttggtacagcaatcagttgcatcgtgattggacttattatgtatgggtttgtcaaggcgatgatccacgccgggcaactgaagaatggcgattttcacttcaccgattgtctcttcttcggaagcttgatgtccgcaaccgatcccgttactgtactagccattttccacgagttgcacgttgatccggacctctatacactgcttttcggcgaaagcgttctgaatgatgctgttgccattgtactgacgtacagcatctcaatctattctcctaaagagaatcccaacgcctttgacgcagcagctttctttcagagtgtgggcaatttcttaggtatcttcgccggttctttcgcgatggggagcgcctatgccattattaccgcactgctgacgaagtttactaaactgtgcgaattccccatgctggaaacaggactgttcttcctgctgtcttggtctgcgttcctcagcgcggaggctgctggcctcacaggaatcgtggcagtgctgttttgcggcgttactcaggctcactatacctacaacaacctttcatctgatagcaagattcgaactaaacagctttttgagttcatgaactttctggctgaaaacgtcattttttgttacatgggactcgctctgttcacttttcagaaccacatttttaacgcgctgtttattcttggagccttcgtgtcaattttccttgctagagcccacactgaactaaagaacctactgttctttttggcttctttcctgtgttacttctctcatcggtcaaaaggattgccaatggcgggttgtgcgctgccgtag

SEQ ID NO: 206478 - DNA, 3534 bp, synthetic construct
  misc_feature 1..3534: note = Description of Artificial Sequence: Synthetic coding sequence
  source 1..3534: mol_type = other DNA
atggccggcatcttcaaggagttcttcttcagcaccgaggacctgccagaggttattctgaccttgagccttatatctagcatcggggccttccttaacaggcatctcgaagactttcctatcccggtccccgttattctgtttctgctagggtgctcattcgaggtgctctcctttacttcatcccaggttcagaggtatgccaacgctatacagtggatgtctcccgaccttttcttccggatatttactcccgttgtgttcttcaccaccgcctttgatatggatacctacatgttgcagaagctgttctggcaaatacttctcatatccatcccaggctttttagtgaattacatcctggtgctctggcacctcgcctccgtgaatcagctactcctgaagccaactcagtggctcttgtttagtgcgattctcgtgagctccgatcctatgctgactgcagccgccatccgcgacttagggttgtcccgcagcctaatctcactcattaatggagaatctttaatgacctcagttatttccctgatcactttcactagcatcatggacttcgatcagcggctccaaagcaaaagaaaccacaccctcgccgaggagattgtgggggggatatgctcatacataatagcaagtttcctttttggtattctgtctagcaaactgatccagttctggatgtcaactgtgtttggagacgacgtcaaccacatttcgttaatatttagtatactttacttaatcttctatatctgcgagctcgtgggtatgtccggtatttttaccctggccattgtaggccttctgctgaattctaccagttttaaggccgcgatagaagagacactgctgctggagttctggacattcctgtcccggattgcgttcctcatggtgtttaccttcttcggcctgctgatccctgcgcatacctacctctatatagaatttgtggacatttactactccctgaacatttacctgactcttatcgtacttcgctttctgacactattgctgatctctccagttctcagcagagtggggcacgagttctcctggcggtggatttttatcatggtatgcagcgaaatgaaagggatgcctaacatcaacatggctctgctcctcgcctatagcgatctctacttcgggagcgacaaggaaaagtcacagatcctgtttcatggtgttctggtgtgcctaatcactctggtggttaacagatttatccttcctgttgcagtaacaattctgggactaagggacgctacaagtacaaagtacaagtcagtgtgctgtacattccagcactttcaagagctcaccaaaagcgcagcgagcgctttaaaattcgataaggaccttgccaatgcagattggaacatgatcgagaaggctattaccttggagaacccttatatgctgaacgaagaggagacgactgagcaccagaaagtgaagtgccctcattgtaataaagagattgacgaaatcttcaacactgaggcaatggaactggccaataggaggcttttgtctgctcagattgcatcctatcagcgccaatacaggaacgagatcctgagccaatccgctgtgcaagtcctggtgggggctgctgagtcctttggcgagaaaaaaggcaagtgtatgagtctggataccatcaaaaattattctgagtcccaaaagaccgttacatttgcaaggaaactgctgctgaattgggtctataatacaagaaaggagaaggaaggccctagcaagtacttcttcttccgtatctgccatacaatagtcttcaccgaggagttcgagcacgtcggctacctcgtaattcttatgaacatctttccttttataatcagttggatatcacagttgaatgtcatctaccacagcgaactcaagcatactaactattgtttccttactctatacatcctggaggcacttctgaagatcgccgccatgcgcaaggacttttttagccacgcttggaacattttcgaactggccatcactctgatcggcatcctccacgtcatcctgatcgagatcgacacgatcaaatacattttcaatgaaacagaagtaattgtatttattaaagtggtgcagttttttcggatattgcgcattttcaagttaatcgcgcctaagctccttcaaatcatagataagaggatgtctcatcagaagacattctggtatggcatcctgaagggatatgtacagggcgaggctgatattatgacgattatagaccagataacatctagcaaacagataaaacaaatgcttcttaaacaggtgatcagaaacatggagcatgccatcaaggagctgggttacctcgagtatgatcaccccgagatcgccgttaccgtcaaaactaaggaagagattaacgtcatgttgaacatggctaccgaaatccttaaagcttttgggttgaaaggaattatctctaagactgaaggcgccggaataaacaagctcatcatggcaaaaaaaaaagaggtactagactctcagtccatcatacgccctctgactgtggaggaggtcctttatcacattccgtggctggataaaaataaggactatataaatttcatccaggaaaaggcaaaggttgtcactttcgactgcgggaatgacatcttcgaagaaggcgacgaacctaaggggatctacattattatctcggggatggtaaagctggaaaagtctaagccaggactgggcatagatcaaatggtcgagtctaaggaaaaggatttccccatcatcgacacagactatatgttgtcaggggagattattggtgaaatcaactgcttgaccaatgagccaatgaagtactccgctacctgtaagacggtcgtggagacctgtttcattcctaagactcatctgtacgacgccttcgagcagtgcagcccactgattaagcagaagatgtggctaaaactaggtctcgccattactgccagaaaaatcagagagcacctgagctacgaggactggaattataacatgcaactgaagttatccaacatctatgttgttgacattcctatgagcactaagaccgacatctatgacgaaaatctcatatacgtgatcctgatccatggggcagtggaagattgtttgttaaggaaaacatacagggctccctttctcattcctatcacctgccaccagatccagtcgatagaggatttcacaaaggtagttataatccaaacacctattaacatgaagacttttagacgcaatatacggaagttcgtgccaaagcataaatcatacctgacacccggcttgatagggtccgtgggaacattagaggaggggatacaggaggagcgcaacgtaaaggaggacggcgcccacagcgcagccacagctcggagccctcagccttgctccctgttgggaacaaagttcaactgcaaagaaagccccagaatcaatcttaggaaggtccggaaagaatag

SEQ ID NO: 206479 - DNA, 3390 bp, synthetic construct
  misc_feature 1..3390: note = Description of Artificial Sequence: Synthetic coding sequence
  source 1..3390: mol_type = other DNA
atggccggcatcttcaaggagttcttcttcagcaccgaggacctgccagaggtgatcctgacactgtcgctcatctcctctattggcgcctttctcaatcgccatctcgaggattttcccatccccgtacccgtgattctgttccttctgggttgcagctttgaagtgctttcttttacctcaagccaggtacagcggtatgcaaacgctatccagtggatgagtccggaccttttctttagaattttcacaccagtggtgttcttcacaacagctttcgatatggatacatacatgttgcagaagttattctggcaaatcctgctgataagtattcctggctttctcgttaattatatcttagtcctgtggcacctggcctcagtaaatcagttgctgctgaaaccaacccagtggttactgttttcagcaatcctcgtgagctctgatcctatgttgacagcggccgcaattcgggacttaggactcagcagatccctgataagtctgattaacggagaaagtctcatgactagcgtgatcagcctcataacgttcacaagtatcatggacttcgaccagcggttgcaaagcaagcgaaaccatacactggccgaggaaattgttggcggcatctgtagttacattattgcgtcatttctatttggcatcctcagttcgaagctgattcagttctggatgtccactgtgttcggcgatgatgtaaatcatattagcctgatttttagtatcctttacctgattttctacatttgcgagctcgtggggatgagcggcatattcacccttgcaattgtgggtctgctgctgaattccacctcctttaaagcagctattgaggagacccttctcctggaattcctgaccctgttgctcatttcgccagtgctatctagggtcggacatgagtttagttggcgctggatcttcattatggtttgctctgagatgaaagggatgcctaacattaatatggccttgctgctggcatacagtgatctttattttgggagcgataaggagaagtcccagattctctttcatggagtactagtatgcctaatcacacttgtcgtgaaccgctttatcttgcctgttgcggttaccatccttggcctgcgagacgccaccagcactaaatataagagcgtatgttgtacgttccaacactttcaagaactcactaaaagtgcagctagcgctctcaaattcgacaaggatctggcgaatgccgactggaatatgattgagaaggctattactcttgagaatccttatatgttaaatgaagaagagacaactgaacaccagaaagtgaaatgccctcattgtaacaaggaaattgatgagatattcaacacagaagcaatggaattggccaaccgcagactgctgagtgcacagatcgccagctatcaacgtcaatatagaaatgagatcctgagtcagagcgccgtgcaagtactggtcggagccgccgagagtttcggcgaaaaaaaaggaaagtgcatgtccctcgatacaatcaagaattatagtgaaagccagaagactgttacctttgcgaggaaattactgctaaactgggtgtataacaccagaaaggaaaaagaaggcccatctaaatattttttcttccgcatctgccacacaatcgtatttaccgaggaatttgagcatgtggggtatctggtcatccttatgaatatttttccatttattattagctggattagtcagctgaatgtgatataccactctgagttaaaacataccaattattgctttctgaccctgtatatactcgaagccttgcttaagattgctgcaatgaggaaagactttttttcccatgcctggaacattttcgaacttgccattacactcatcggtatcctccatgtaattctgatcgagattgacactattaagtacattttcaacgagactgaagtgatagtgtttatcaaggtagtccaattctttcggatcctgcgcatctttaagctgattgctcctaagttgctgcagattattgacaagcggatgtcacaccagaagacattttggtatggtatcctgaagggatatgtgcagggcgaagctgacatcatgactatcattgatcagataacaagctcaaagcagatcaaacagatgttactgaaacaggtcatccgaaatatggaacatgctatcaaagagctgggctacctagaatatgaccaccccgagatcgcggtgaccgttaaaaccaaggaagaaatcaacgtgatgttaaatatggccaccgagatccttaaagcttttggcctcaaaggcattatcagtaaaaccgagggagctggcattaataaactcataatggctaaaaagaaggaggtgttggactcacaatctatcatccggccactcaccgtcgaagaggtgctctatcacatcccatggctggataagaacaaggactatattaactttatccaggaaaaggccaaagttgtgacatttgactgtggcaatgatatctttgaagagggcgatgagcccaagggcatctacattatcatctcagggatggtcaagctggagaagagtaagccgggcctcggtattgatcaaatggtggagtccaaagagaaagattttccgattatcgataccgactatatgctatctggggaaatcatcggcgagatcaactgcttgaccaacgaaccaatgaaatactcagctacatgcaagacagttgttgagacgtgctttattccaaagacccacctatacgacgcattcgaacagtgcagtcccctgatcaaacagaaaatgtggttgaaactgggactggctatcaccgcccgaaaaattagggaacatctctcttacgaagactggaactacaatatgcaattaaagctgagtaatatctatgtagtggatattccaatgtccactaaaaccgacatttacgatgaaaacctcatatacgtgattcttatacacggcgctgtggaagactgcctgctccggaagacttatagagccccattcttgattcctatcacttgtcaccagatccagtctatcgaggactttaccaaggtagttatcattcaaaccccaatcaatatgaagactttcagacgaaacatccgaaagtttgtccccaaacataagtcctacctgactcccgggctgattgggagcgtgggaactctagaagaaggtatccaagaggaacggaatgtcaaagaggacggagcgcacagcgcagcaacagccaggtctccccagccctgctctctcttaggtaccaaattcaattgtaaggaatccccacgcatcaacctccgaaaggtgaggaaagagtag

SEQ ID NO: 206480 - DNA, 2079 bp, synthetic construct
  misc_feature 1..2079: note = Description of Artificial Sequence: Synthetic coding sequence
  source 1..2079: mol_type = other DNA
atgcagggcaagaagcccggcggcagcagcggcggcggccggagcggggagcttcagggggatgaggctcagcgaaacaaaaagaaaaaaaagaaggtttcctgtttttccaatatcaagatattcttggtgtcagagtgcgcgctgatgctcgcccaaggtactgtcggcgcctacttggtctctgttctcactactctggaacgccggtttaatttgcagtccgccgacgtaggggtcatagcgtccagcttcgagattggcaatctcgcacttattcttttcgtctcctatttcggtgcccgcggccacagacctcgtctgatcgggtgcggcggaattgtgatggctctgggcgcactactcagcgcactcccggagttcctcacacatcagtacaagtatgaagccggggagatccgctggggcgctgaaggcagagacgtttgcgcggcaaacgggagtggaggagatgagggtccagatcccgacctaatttgcaggaacagaaccgcgacgaatatgatgtatttgttgctgattggcgcccaagtccttcttggaattggagccactcccgtccagccactgggggtctcctacattgacgaccatgtacggcggaaggattcctctctgtacatcggaatcctctttactatgcttgtgttcggcccagcctgcggattcatcctcggatctttctgtacaaaaatctacgtcgatgccgtctttattgacacctctaacctggacatcacaccagacgaccctcggtggatcggggcgtggtggggcgggtttctcctttgcggcgccttgctgttcttctcctcacttctcatgtttgggtttccgcagtcactaccaccccactctgagccagctatggaaagcgagcaggccatgctctctgaacgggagtacgaaaggccaaagccgtcaaacggagtcctgaggcatccccttgaacccgacagcagcgcttcttgctttcagcagctgcgggtgatcccaaaggtgactaaacatctcctgagcaaccccgttttcacttgcatcattctggcagcctgcatggagatagctgttgtggctgggttcgctgctttccttggaaaatatctggaacagcagtttaacttgaccacatcctcggcaaatcagttgctagggatgactgctattccgtgcgcctgtctcggcatatttctggggggcttattagtgaagaaactgtctctgtccgccttaggggcaatccgaatggcaatgttggttaatctggtgagcaccgcatgctacgttagctttctgtttctggggtgtgatactggccccgtcgcgggggtgaccgtaccatacggcaattcaaccgcccccggctctgccttggacccatatagtccatgcaataacaattgtgagtgccaaaccgattctttcactccggtctgtggagctgacggcattacatacctgagcgcgtgcttcgccggttgtaactctactaacctgaccgggtgcgcctgcctaactaccgtgcctgccgagaacgccaccgttgtgcccgggaagtgcccatctcctggatgccaagaggcttttctgacattcctctgtgttatgtgtatctgttcgttgatcggggcaatggcacaaacaccatccgtcatcatactgattcgcactgtcagccccgaactgaagtcctacgcattaggggtattattcctcctcctgcggctgttaggttttatcccgccacccctcatttttggcgcaggaattgattctacttgcctcttctggtcaacattttgtggcgagcagggagcttgtgtgctgtacgataatgtggtgtaccgctacctttacgttagcatcgctatcgcacttaaatctttcgcattcatcctgtacacgactacctggcagtgcctgagaaagaactataaaagatacattaagaaccacgagggcgggctgtcaactagcaccgagtatcaagatatcgaaacagaaaagacatgcccagaaagtcactctccctctgaagactcattcgtgaggtcctag

SEQ ID NO: 206481 - DNA, 2076 bp, synthetic construct
  misc_feature 1..2076: note = Description of Artificial Sequence: Synthetic coding sequence
  source 1..2076: mol_type = other DNA
atggaccagaaccagcacctgaacaagaccgccgaggcccagcccagtgagaataagaaaactcgctactgcaatggcctgaaaatgttcctcgcagctctgagcttgtcattcatcgctaagaccctgggcgcaattataatgaagtcctctattatacacattgaacggcgttttgagatcagctcctccctcgttggcttcattgatggcagcttcgaaatagggaacctcctggttatcgttttcgtgagctacttcggaagcaagctgcacagaccaaagctgattggaatagggtgttttatcatggggatcggaggagtcctaactgctctaccgcactttttcatgggatattatcgctacagtaaggagactaacattaatagctctgagaacagtacctcaacactctccacatgcctgatcaatcaaatactatcactgaaccgggcgagcccggagatagtggggaaggggtgtctcaaggaatctggctcctatatgtggatctacgttttcatgggcaacatgctccggggtataggggagaccccaatagtgcctctggggctcagttatattgatgattttgccaaggagggacacagcagcctctaccttgggattcttaacgcgatcgcaatgattggccctatcattgggtttacgctgggcagtctcttttcgaagatgtacgtggatatagggtatgttgacctgtcaacaattcgtatcaccccaactgattctcggtgggtgggagcatggtggctcaacttcttggtgagcgggctgttcagcatcatcagctcgattcccttcttcttcctcccgcagacccctaataaaccccagaaagagcggaaggcttccctgtccctgcacgtacttgaaacaaatgatgaaaaagatcagacagcgaacctgaccaaccagggtaaaaatatcacaaagaacgtcaccggcttctttcaaagttttaagtctattctgaccaaccccctgtacgtgatgttcgttctgctgacactcctccaggtgtcttcatatatcggcgcgtttacgtacgtctttaagtatgttgagcagcaatatggccagccaagctctaaggccaacattctactgggcgtaataacgatccctatctttgctagtgggatgttcctgggggggtatattataaaaaaattcaagctaaataccgtggggatcgctaagttcagctgcttcaccgctgtaatgagcctctccttctatcttctgtacttctttatcctgtgcgagaataagtccgtggccggtttgacaatgacatacgacggaaataaccctgtgacttcacatcgtgatgtgccactgagttactgcaactctgactgtaactgtgatgaaagccaatgggaacctgtctgtggcaataatgggatcacctacatctcgccctgtttggccggctgtaaatccagctcaggaaataaaaagcccatcgtgttctataactgtagttgccttgaggtgacaggtttacagaaccgcaattacagtgctcaccttggagagtgtcctcgggatgacgcctgcacaaggaaattctattttttcgtagcgatccaggtgctgaatctcttcttttcagccctggggggcacctctcacgtgatgctcatcgtcaagattgtccagccggagcttaaatccctggcacttgggttccactccatggttatcagagctctgggagggatacttgctccaatctatttcggagccttgatcgataccacctgcatcaagtggtccactaacaattgcggcactcggggcagttgcagaacctataactctacctccttctcacgtgtctatttggggctgtcgagcatgctgagagtctccagcctggtgctttacataatcctgatctacgccatgaagaagaagtaccaggagaaggacatcaacgctagtgagaacggttcggtaatggatgaggccaacttggagtccctgaataaaaacaagcactttgtgcccagtgccggtgcagacagtgagacacactgctag

SEQ ID NO: 206482 - DNA, 2109 bp, synthetic construct
  misc_feature 1..2109: note = Description of Artificial Sequence: Synthetic coding sequence
  source 1..2109: mol_type = other DNA
atggaccagcaccagcacctgaacaagaccgccgagagcgccagctcggagaagaaaaaaactagaagatgcaatggctttaagatgttcctggcagccttgtcattttcatatatcgccaaagcactgggagggattatcatgaagatttcaatcacacagattgaaaggagattcgacatcagcagcagtctggccggcctaattgatgggagctttgagatagggaacctgctggtaattgtgtttgttagttactttggcagtaagctccaccgtcccaagctgataggtattggatgcctgttgatgggcacaggttctattttaacctcactcccccacttcttcatggggtactaccgatatagtaaagagactcacataaacccatccgagaactctactagctcactgtctacatgtctgatcaaccagaccctgtcctttaatggtactagtccagaaatcgttgagaaggattgcgtgaaagaaagcgggagccacatgtggatttatgtgtttatgggcaatatgttgcgcggtataggtgaaacccctatcgtgccattgggcattagctacattgatgatttcgccaaggagggacactccagcctctacctgggtagtcttaatgctatcggcatgataggcccagtgataggatttgccttgggtagtctcttcgccaagatgtacgtggatatcggctatgtcgacctctctaccattagaattactccgaaggattcccgatgggtcggggcctggtggctgggcttcctggtgtctgggctgttttccattatcagctccattccctttttcttcttacccaaaaatcctaataagccccagaaggagcgaaaaatcagcctgtctctgcatgtgcttaagaccaacgacgatcggaaccagacggctaatctcacaaaccagggcaagaacgtgaccaaaaacgttacagggttttttcagagcctgaagagtatcctaaccaaccccttatatgttattttcctgctgctcacattactgcaggtgagctctttcatcgggagctttacgtatgtattcaaatacatggagcagcagtacggccagtcagcctctcacgcaaattttctgctgggcatcatcactatacctactgtggccacaggcatgttcctaggggggttcatcattaagaaattcaaactctctttagtgggaattgccaagttttcttttctgacttctatgatttcatttcttttccaacttctctactttccacttatctgcgagtctaagagcgtcgctggcctcacactgacttacgacggaaataactccgtggccagccatgtcgacgtccctctctcttattgcaacagcgagtgtaattgtgacgagtcccagtgggagccggtatgcggcaataatgggattacctatcttagcccatgcctggcagggtgtaagagcagttctggcataaaaaaacacacggtcttttacaattgctcgtgcgtagaggtcaccggactacagaaccggaactattctgctcatttaggagagtgcccacgcgataatacttgtaccagaaaattcttcatctacgtcgccatccaagtgatcaatagtttgttttccgcaaccgggggaaccacatttattcttctcaccgttaagatcgtacagccagagctaaaagccctcgcgatgggtttccaaagtatggtgataagaacactgggtgggatcctggcgccgatatactttggggccctgatagacaagacctgtatgaaatggtcaaccaacagttgtggagcacagggcgcttgccgcatctacaatagtgtgttctttgggagggtgtatttaggactgagcatcgcgctcaggtttcccgcattggtcctgtatatcgtctttattttcgccatgaagaagaagttccaaggcaaggacacaaaagcaagtgacaatgagcggaaggtgatggatgaggcgaacttggaattcctgaacaatggcgagcactttgtcccctctgcaggcactgatagcaaaacttgtaaccttgatatgcaagacaacgctgcagccaattag

SEQ ID NO: 206483 - DNA, 2109 bp, synthetic construct
  misc_feature 1..2109: note = Description of Artificial Sequence: Synthetic coding sequence
  source 1..2109: mol_type = other DNA
atggaccagcaccagcacctgaacaagaccgccgagagcgccagctccgagaagaagaaaactcggcgctgcaatggatttaaaatgttcctggcagccctgagcttttcctacattgctaaagccctcgggggcattatcatgaagatttctattacacagatagagaggcgcttcgatatttcctcctcactggccggcctgattgatgggagtttcgagattggcaacctcttagtaattgttttcgtctcatattttgggagtaagctccacaggccgaagttgattggaatcggctgtctgttgatgggaacgggatccattctgacctctctgcctcatttttttatgggctattatcgatattccaaagaaacacatattaatccttccgagaactcaacctccagcctctcaacttgcctgattaatcaaacgttgtctttcaatggaacgagtcccgaaatcgtggagaaagactgcgtgaaagaaagtggatcacatatgtggatatacgtttttatgggaaatatgttgaggggtatcggggagacgcccatcgtccctcttggtatttcctacatagatgatttcgccaaagaggggcatagtagtttatatctggggtcactcaacgctatcggcatgatcggaccggtaatcggctttgccctcggaagcttgttcgccaaaatgtatgtagacattggatacgtggatctttccactatcagaattactccaaaggatagtagatgggtgggtgcttggtggctgggatttttggtgtctgggctttttagcatcatatcatccatcccattcttttttctgcctaaaaaccctaacaaaccccagaaggaacggaaaatttccctcagcttgcacgtgttgaagacaaacgatgaccggaatcagacagctaatctgacgaatcagggcaaaaatgtgacaaagaacgttacaggtttttttcagagtctcaagagtatcctcaccaacccactctatgtgattttcctcctcctgacattgcttcaagtttccagcttcattggaagctttacatacgtgtttaaatacatggagcagcaatatggacagagcgcatctcacgcaaactttctgctgggcattatcacgatcccaacagttgctaccggcatgtttttgggcggattcataattaaaaagttcaagctttccctggtgggtatcgcgaagttctccttcttgacaagtatgatctccttcctcttccagcttttgtacttccctctgatctgcgagtccaagtcagtggctgggctgacactgacgtatgacggcaataacagcgtggcctcccacgtcgacgtccctttgagttactgtaattcagaatgtaactgcgatgagtcgcagtgggagcccgtatgcggaaacaacggcattacatatctaagtccctgccttgcaggttgcaaaagtagctccggcatcaaaaagcataccgtgttctacaactgcagttgtgtggaggtgaccggcctccagaatagaaattatagcgcccacctgggcgaatgccctagggacaatacgtgtaccaggaagttttttatctacgtggccattcaggtgatcaacagtcttttcagcgccacagggggtaccacattcatattgttgactgtaaagattgtgcaacccgagctgaaggcactggccatgggctttcagtctatggtcataaggacactcggtggcatcctcgcacccatatacttcggcgctctgatcgataagacatgcatgaaatggtccactaacagttgcggcgcgcagggagcctgcagaatttataacagtgtttttttcggtagagtatacttgggccttagcatcgcccttcgctttccagcattggtactgtacatcgttttcatcttcgccatgaaaaaaaaatttcaggggaaagatacaaaggcaagcgacaacgagcgaaaggttatggacgaagctaacctggagttccttaacaacggagagcactttgttccctctgccggcacggacagcaaaacctgtaatctggatatgcaagataacgccgctgccaattag

SEQ ID NO: 206484 - DNA, 2247 bp, synthetic construct
  misc_feature 1..2247: note = Description of Artificial Sequence: Synthetic coding sequence
  source 1..2247: mol_type = other DNA
atggaccagcaccagcacctgaacaagaccgccgagagcgccagctccgagaaaaaaaagaccaggagatgtaatggcttcaagatgttccttgctgctctaagtttctcatatattgccaaagcacttggagggattatcatgaaaatctcaatcactcagattgaaaggcgattcgatattagctcctcactggcaggcctcattgacggctcatttgaaattgggaatctactcgtgatcgtttttgttagttacttcgggtcgaaacttcatcgcccaaagctgatagggatcgggtgtctgctgatggggaccggaagcattctgacaagcctgccccactttttcatggggtactaccgctactcgaaggagacgcacataaatcccagcgaaaactccactagctcactaagcacttgtctcattaatcaaacactgtctttcaacggcacctctcctgagatcgtggagaaagattgcgtgaaggagtccggcagtcatatgtggatatacgtcttcatgggtaatatgctaagaggcattggggaaacacctatcgttcccttgggcatcagttacattgacgactttgctaaggaggggcactcgagcctgtatctggggagtctgaacgccattggaatgattggcccggtaatcgggttcgcacttggctccttgtttgccaaaatgtatgttgacattggctatgtagatctgtccaccatcaggattactccaaaagactcaagatgggtaggtgcctggtggttgggattccttgtgtctggcctcttcagtattatttcttctatccctttcttctttcttcccaagaatcccaataaacctcagaaggaacgcaagatctctctctctctccatgtgctgaaaacgaacgacgaccgtaatcaaaccgccaatcttacaaaccaggggaagaatgtgaccaaaaatgtgaccggatttttccagtctctgaaaagtattctgacaaaccccctgtatgtgatttttctattgcttactctgctacaagtttccagtttcataggtagctttacatacgtatttaaatacatggagcagcagtatggtcagagcgctagtcatgccaacttcctgctgggtattatcacaatcccaacagtggcaaccggaatgttcctaggcggtttcattatcaaaaaatttaaactctctttagtgggtattgcgaaattcagctttcttacaagcatgatcagctttctttttcagctgctctactttccattaatttgcgaaagtaagagtgtcgctggcctgacattgacatacgatgggaacaacagtgtcgcaagccatgttgatgtgccattgtcttactgcaattctgaatgcaattgcgatgaatcacaatgggaaccagtgtgtggaaacaatggaatcacttacctctccccatgtcttgcgggctgcaaatcatcctctggcatcaagaagcatacagtgttctataactgttcctgtgtggaagtgactgggttacagaacagaaattactctgcacatttaggagagtgccccagggataacacttgtacaagaaagttcttcatctacgttgctattcaagtcatcaactccctcttcagtgcaacaggaggaaccacttttattttgttaactgttaagattgtgcaacccgagctgaaagcacttgctatgggcttccagtccatggtgatacgtactctgggagggattttggccccaatctattttggcgctttgatcgataaaacctgcatgaagtggtctacaaacagctgtggtgctcaaggcgcctgccgaatctacaattcagtttttttcggcattgtccaacccgagctgaaggccctggccatcgggttccacagcatgatcatgagatctctgggcggtatcctcgtccctatttacttcggggcactgattgataccacctgcatgaagtggagtactaacagctgtggagcacggggcgcgtgtaggatttacaacagcacctacctcggccgcgcttttttcggactcaaagtcgccttgatatttcctgtgttggtcctgcttacagtctttatcttcgttgtccgaaagaagtctcatggcaaagacaccaaagttctagaaaatgagcggcaggtcatggatgaggctaatctggagtttctgaacgacagtgagcactttgtgcccagtgcagaagagcagtag

SEQ ID NO: 206485 - DNA, 2139 bp, synthetic construct
  misc_feature 1..2139: note = Description of Artificial Sequence: Synthetic coding sequence
  source 1..2139: mol_type = other DNA
atggacaccagcagcaaggagaacatccagctgttctgcaagaccagtgttcagcccgtgggaagaccatcttttaaaactgagtatcctagcagtgaggagaagcagccatgttgtggcgagctgaaagtattcttgtgcgcactgagctttgtttattttgcgaaagccctggccgagggctatttgaaatcaacgattacacagattgagcggcggtttgacatcccgtcatcactggtgggtgtgattgatgggtcattcgaaatcggcaaccttctggtgatcacttttgtgtcctatttcggagcaaaactccaccgccctaagattatcggcgcgggatgtgtgattatgggtgtggggaccttgctcatcgccatgccccagttttttatggagcagtacaaatacgagagatattccccatcctcaaattccacgttgtcaatcagcccctgtttattggagtcatccagccagttaccagtgtcggttatggaaaagtcaaaaagcaagatatcaaacgaatgcgaggtggacactagctcctccatgtggatctatgtgttcctggggaacctcctgcggggcatcggggaaacacctatccagcccctaggaatagcttacctggacgacttcgcctctgaggacaacgctgccttctacattggctgcgtgcaaactgtggctattatcggtcctatatttggattcctcctgggttcactctgtgctaagctctacgtggatataggattcgttaacttggaccatatcacaattaccccaaaagaccctcagtgggtcggcgcatggtggctcggatatcttatcgcagggataatatccctcctggcagccgttccattctggtacctgcctaagtctttgccaagaagtcagtcccgcgaggattctaactcgagttctgagaaatccaagttcatcatcgacgatcataccgactatcaaacgccacagggggagaatgctaagattatggaaatggcacgggactttttgcccagcctaaagaatttattcgggaaccctgtgtacttcttgtacctgtgcacctccactgtgcagtttaactcacttttcggaatggtgacatataagccgaagtacatagagcaacaatacggtcagagtagctcacgcgccaacttcgtgattggtctgattaacattcccgccgtcgccttggggattttctctggcggaatcgtgatgaagaaattccgaatatccgtgtgtggggcggccaagctgtatcttggttcctcagtcttcggttatctccttttcttatccctctttgcacttggctgcgaaaattcagacgtggcaggcttgacagtgagctaccagggcaccaagccggttagctaccatgaaagggccctgtttagcgactgtaactccagatgtaagtgcagtgaaacgaagtgggagcctatgtgtggcgaaaacggcatcacgtacgtgagtgcctgtcttgccggctgccagaccagcaatcgttcgggtaaaaacattatattttataattgtacatgcgttggaatcgccgcctctaagtccggcaactcgtccggtatagttggcagatgtcagaaggacaacgggtgccctcagatgtttctgtacttcctggttatttccgtgataacctcctacaccctatccctcgggggtatcccagggtatatcctgctcctacgatgtattaaaccacagctgaaatcgttcgcattgggtatctacaccctggccatccgagtgttagccggcattccggcacccgtttattttggcgtgctcatcgatacctcctgtcttaagtggggtttcaagcggtgcggaagtcggggctcttgtaggttatacgactccaacgttttccgacacatatacttgggactcacagtgattcttggaacagtgagcatcttgctgtctatcgccgtcctctttatcctgaaaaaaaattacgtaagtaaacaccggtccttcattacaaagcgtgagcggaccatggtatcaacccgtttccagaaggaaaactacaccacttctgatcatctccttcagccaaactactggcccggaaaggaaactcagctgtag

SEQ ID NO: 206486 - DNA, 2193 bp, synthetic construct
  misc_feature 1..2193: note = Description of Artificial Sequence: Synthetic coding sequence
  source 1..2193: mol_type = other DNA
atggacaccagcagcaaggagaacatccagctgttctgcaagaccagcgtgcaacccgtaggccggccctctttcaaaacggagtatccatccagtgaggaaaagcagccttgctgtggagagctcaaggtgttcctgtgcgcactgtccttcgtatacttcgcaaaggccctcgccgagggctatctgaaaagcaccattacgcagattgagcgtcgctttgacatacctagtagtctggtgggggtgatcgacggctcattcgaaattgggaacttgctggtcataacatttgtgtcttatttcggagctaaactccatagacccaaaatcataggagctggctgcgtgatcatgggggtgggcactctattgattgctatgccacagttttttatggaacaatataaatatgaaaggtattcgcctagttcaaattcaacgctgagcatttccccctgtttgctcgaaagtagcagtcagctgcccgtctctgttatggagaaaagtaaatctaaaatttcaaatgagtgcgaggtcgacacctcaagtagtatgtggatctacgtatttctgggtaacttattaaggggaataggagaaaccccaatccaacccctgggcatcgcatacctagacgactttgccagtgaagataatgctgccttttacataggatgtgtgcagaccgtcgcaatcatagggccaatctttgggtttttgctgggatccttgtgtgctaaactgtacgttgacattgggtttgttaatctggatcacatcacgatcaccccgaaggaccctcagtgggttggcgcctggtggctggggtacttaattgccgggatcatcagtttgctggccgcagtgcctttttggtatctccctaagagtctgcccagatcacaatcaagagaggactcaaactcttcaagtgagaagtcaaaatttattatcgacgaccatacagactaccaaacccctcaaggagagaatgccaaaattatggagatggctcgtgattttctcccatctcttaagaacctatttggtaatccggtgtacttcctttacctctgtacttcaacagtccagttcaactcactcttcggcatggtgacctacaaacccaaatatatcgagcagcagtatggccagagcagttctcgcgctaattttgttattggactgatcaatatccctgccgtagccctgggaatcttcagtggcggaatcgtcatgaagaagtttcgcatctcggtgtgcggcgctgctaagctttatctgggtagcagtgtgttcggctacctcctatttctgtctctctttgcactggggtgcgaaaattccgacgttgcagggctgacagtctcctaccagggcacaaagcccgtctcttatcatgaacgggccctcttctcggattgtaactcaagatgcaaatgtagtgaaacaaagtgggaaccaatgtgtggcgaaaatggtatcacgtacgtgtcggcctgtctggcgggctgccaaacctcaaaccgcagtggtaaaaacatcattttctacaattgtacctgtgtcggaatcgcagcaagcaaatctggcaacagtagcggcatcgtgggccgctgtcaaaaagacaatggatgccctcagatgtttttatattttcttgtgatttctgtgataacctcatacaccctaagcttaggaggcatccccgggtatattctcctgcttcggtgcataaagccccagctcaaatctttcgcactgggcatctacacactggctattcgggttcttgcgggtatcccagccccggtgtactttggcgtgctcattgataccagctgcctaaaatgggggtttaagcgatgcgggtctcggggctcatgccgactatacgatagcaatgtcttcaggtatcagatcaaaagcatcccagcttcccactgttactctatccctgatctgcacaacgcgactgatactaataagttctcatgccacttcacagcctgcaagacgtacatttccggcaccaactgtgacacgggacactctgtaaatagtcctaagcactgcagcactttccacttcaaggagaaattatgcttcaaaactcagaagttttacaatcaggagaggaagaacaacggagtctacaaaattccaaaaggaaagctccattataagtag

SEQ ID NO: 206487 - DNA, 1992 bp, synthetic construct
  misc_feature 1..1992: note = Description of Artificial Sequence: Synthetic coding sequence
  source 1..1992: mol_type = other DNA
atggacaccagcagcaaggagaacatccagctgttctgcaagaccagcgttcagccggtagggaggccttcatttaaaaccgagtacccctcttcagaggaaaaacagccttgctgtggcgagctgaaggtgtttctttgtgctctgtctttcgtttacttcgctaaagctttggccgaagggtatttgaagtctaccattacgcagatcgagcgccggtttgatattccaagctcccttgtgggtgttattgacggatctttcgagattggaaatctactggtaatcacattcgtgtcgtatttcggtgctaaactacaccggccgaaaattattggcgcggggtgcgtgattatgggggtcggtactctcctgatcgctatgccccagttctttatggagcaatataagtacgagagatactcgccgtccagtaacagcacactctcaattagtccgtgcctgctggaaagttcttctcagctccccgtgagcgtgatggaaaagagcaagagcaaaattagcaacgggtgtgttcagactgtggccatcatcgggcccatattcggctttctactcggttccctgtgcgctaaactgtacgtggacatcggcttcgttaacctggaccacatcacaattactccaaaggaccctcagtgggtgggcgcttggtggctcggatacttgatagccggtattattagcctgttggcagccgtgcctttctggtatctgcccaaaagcctgcctaggtcccagtcccgcgaggacagtaatagttctagcgaaaagtctaagttcatcattgatgatcacaccgactatcaaacgccacagggggagaatgccaagatcatggagatggctcgggacttcttaccaagccttaagaacctcttcggcaaccccgtctactttctctatctgtgcacttctaccgtccaatttaatagcctgttcggcatggtcacctataagccaaagtatatcgagcagcagtacggtcagagctcgagtagggcgaatttcgtcattgggctgatcaatatacctgcggtcgcacttggaattttttcaggaggaattgtcatgaaaaagtttaggatcagtgtatgcggagccgccaaactgtacctgggatcaagcgtgtttggatatttgctgtttctttccctgttcgcacttggatgtgagaatagtgacgtcgcaggtctgactgtatcttaccaggggacaaaaccagttagctaccacgagagagcgctgttctctgattgcaactcccgttgtaagtgttccgaaactaaatgggagcctatgtgcggcgaaaacggaattacatatgtgagcgcttgcttggccggttgtcaaacctcaaacagaagcggaaagaatattattttctataattgcacctgcgtaggcatagcggccagcaagagcgggaacagttcaggcattgtgggtcgctgccagaaagataacgggtgtcctcagatgtttctgtattttctggtaatttccgtcatcactagctatacgctgtccctggggggcatccctgggtatatcttattgttgcgttgtattaagccgcagctcaaatcatttgccttgggtatctatacactggctataagggtgctggcaggcatccccgctcctgtgtacttcggtgtgcttatcgacactagctgtctcaagtgggggttcaaaagatgcggctctcgtggaagctgccgcctctacgattcaaacgtgttcagacatatctatctcggcctcacagtaattttaggaacagtaagtatcctgttgtcaattgccgtcctttttatcctcaagaagaattatgtttctaagcacagatcctttatcactaagcgcgagcggactatggtgtcgaccaggtttcagaaggaaaattataccacatcggatcatctgttgcagccgaactactggcctgggaaagaaacccagctctag

SEQ ID NO: 206488 - DNA, 1839 bp, synthetic construct
  misc_feature 1..1839: note = Description of Artificial Sequence: Synthetic coding sequence
  source 1..1839: mol_type = other DNA
atgggcgtgggcaccctgctgatcgccatgccccagttcttcatggagcagtataaatatgagcggtacagccccagctcgaattcaactttgagcatttctccctgcttgctggagagtagctcacaacttcctgtttccgtcatggagaagtcaaagagcaagatcagcaacgagtgcgaggtcgacacttctagctccatgtggatatacgtcttcctgggcaatctgcttcgtgggataggcgagaccccaatacagccccttggaattgcttacctcgacgatttcgctagcgaggacaatgccgcattctatattggctgcgtacagacagtggccattatcgggccgatttttgggttccttctggggtccctgtgtgcgaagttgtacgtcgacatcggtttcgttaatctcgaccacatcaccatcactcctaaagacccccaatgggtcggcgcctggtggcttgggtacctgatcgcgggcattataagcctcctggctgcagttccattttggtacttaccaaagtctctcccaaggtcacagtcccgggaagatagtaactccagctcagagaagagcaagttcatcattgatgaccacaccgattatcagacacctcaaggtgaaaatgccaaaataatggagatggcacgagacttcctgcctagcctcaagaatctattcggcaacccggtgtactttttatacttatgtacatcgacagtgcagttcaactccctctttggtatggtcacatataagcccaagtacatagagcagcagtacggccagtcctcatcccgggcaaactttgttatcggccttatcaatattcctgctgtagcattaggcattttttcagggggcattgtcatgaaaaagttccgaatcagcgtgtgcggggcggccaaactataccttggctctagcgttttcggctacctgctgttcctgagcctttttgccttaggatgtgagaattccgatgtggccgggttaacagtcagttaccaaggaactaagccagtttcttatcacgaacgggctcttttttctgattgtaattcacgctgcaaatgcagtgaaaccaagtgggagcccatgtgcggtgagaatgggatcacctacgtgtccgcctgtctggccgggtgtcagacctctaacaggtccggcaagaacatcattttttataattgcacctgtgttgggattgccgcaagtaagtccggaaacagctccggtatcgtcgggagatgccagaaggacaacggctgtcctcagatgttcctatatttcctggttatctccgtgataacttcttacacactctctctgggcggaatccccggctacattctgctgttgcgctgtattaagccacagcttaagtctttcgccctgggtatttacactctggccatccgggtgttagccggaatccctgctcctgtgtactttggggtcttgatcgacacatcatgccttaagtggggattcaagaggtgtggcagccggggctcatgcaggctgtacgacagtaacgtttttcgatatcagattaaaagtattcccgcctcacattgctattctatccccgacctgcacaacgctacagacacgaacaaattctcttgtcacttcaccgcctgcaagacatacatctcaggaacaaactgtgataccggacacagtgtcaattctcccaaacattgcagcacatttcatttcaaagaaaagctctgttttaagacacaaaagttctataaccaagagaggaaaaacaatggagtgtataagatcccgaagggcaaactccattacaagtag

SEQ ID NO: 206489 - DNA, 2193 bp, synthetic construct
  misc_feature 1..2193: note = Description of Artificial Sequence: Synthetic coding sequence
  source 1..2193: mol_type = other DNA
atggacaccagcagcaaggagaacatccagctgttctgcaagacctccgtccagccagtcggaagaccctcttttaaaactgaatatccatcatccgaagagaaacagccatgctgcggagagctgaaggtctttctgtgtgccctgagcttcgtttacttcgccaaggcattggctgaaggctatctgaaaagtacaatcacccagatcgaaaggaggtttgatattccatccagtttagtgggtgtcatcgacggatcattcgaaattgggaacctacttgtgattacatttgtgtcttactttggcgcaaagctccaccgacccaagatcattggcgccggttgtgttattatgggggtcggcacattgcttattgcaatgccacaattctttatggagcagtacaaatatgagcggtacagtcccagttctaactcaactctgtccatcagcccatgtctcttggagtcatcgagccagctgccagtgtctgtgatggagaaaagtaaatctaaaatatctaacgagtgcgaggttgacacctcctcaagtatgtggatctatgtgtttctaggcaatctgctgagggggataggtgaaacaccgattcaaccacttggcatcgcctatctggacgacttcgctagcgaagataacgctgcgttctacattggctgcgttcagaccgtcgccattattgggccaatcttcggatttctcttgggtagtctttgcgccaaactgtatgtcgatatcgggttcgtcaacctcgatcatataacgatcactccgaaggatcctcagtgggtgggtgcttggtggctgggttacttgattgctggtatcattagcttgcttgcagctgtgcctttttggtacttaccaaaatcgctgcccaggagccaatcccgtgaggactctaattcctcaagcgaaaaatcaaagttcataatagacgatcacacagactaccagacaccacagggggagaacgccaagattatggagatggcacgcgactttcttccttctcttaagaatctgttcggaaaccccgtctatttcctttacttgtgcaccagcacagtccagttcaactctttattcggcatggtgacctacaaaccaaaatacatcgagcagcagtatggccagtcctcatctagagccaattttgtgataggtctgattaacatcccagctgtggctctcggcatcttcagcggaggcatcgtcatgaagaagttcaggatctctgtgtgtggagccgcaaaactctacttgggcagctcggtgttcgggtaccttcttttcctatcgctctttgcacttggatgcgagaatagcgacgtcgccggactgaccgtttcataccagggcacgaaacccgtatcctaccacgaacgggctttattttccgattgcaattcccggtgtaagtgctctgaaacaaaatgggagcctatgtgcggcgagaacggaattacgtacgtgagcgcgtgcctcgcaggctgccagaccagcaacagatccggcaagaatatcatcttttacaactgtacctgcgttggcattgccgcatccaaatctggcaattcgagtggaattgtcgggcgatgtcagaaggataacggatgcccccagatgtttttgtactttctggttattagcgtgattacatcttacacactgagtcttggtggcatcccaggctacatcttactgttacggtgtatcaaaccacaactcaagtccttcgctctgggaatctacactttggccataagggttctcgccggtatcccagcacccgtgtacttcggcgttttaatagatacctcctgcctgaaatgggggtttaagcggtgcgggtctcgagggtcatgccggctgtacgacagcaacgtgtttagataccagataaaaagtattcccgcgagccattgttatagcatccctgatctgcacaatgctacagacaccaataagtttagttgtcacttcacagcctgtaagacctacatctccggaacaaattgcgacacaggacattccgtgaactcaccgaagcattgttccaccttccattttaaagaaaagctctgttttaaaacgcagaaattctataaccaggaacgaaagaataacggcgtgtacaaaattcctaaggggaagttacactataagtag

SEQ ID NO: 206490 - DNA, 1932 bp, synthetic construct
  misc_feature 1..1932: note = Description of Artificial Sequence: Synthetic coding sequence
  source 1..1932: mol_type = other DNA
atgggcctgctgcccaagctgggcgccagccagggcagcgacacctccactagccgggccggtcggtgtgcccgcagcgtgtttgggaacatcaaagtgtttgtgctgtgccagggtctgctgcagctgtgtcagttactttatagcgcctattttaagtcctctctgacaaccatagaaaaaaggtttggcctcagcagtagttccagtggcttaatctcctcactgaacgaaatttctaacgcaatactcatcatctttgtttcttacttcggctcgagagtgcatcgaccgagattgattggaatcggagggttgttcctggcagctggtgcattcattctgacgctgccacatttcctcagtgaaccgtatcagtacaccttagcttctacggggaataactccaggttgcaggccgagctgtgtcaaaaacattggcaggacttaccccctagcaagtgccattctacaacccagaatccacaaaaggaaacctcgagcatgtgggggttgatggtagtggcgcaactcctcgccgggattggtaccgtgcctatacaaccgtttggcatttcctatgtcgatgacttttctgaaccatccaattcacccctctacatctctatcttattcgcaatcagtgtctttgggccagccttcggttacctcctagggtctgtgatgctgcagatctttgtggactacggacgagttaacacagctgcggtcaacctcgtcccaggcgatccaagatggattggcgcctggtggctgggccttctgatatcctctgccctcctggtcttgacttccttccccttttttttcttcccccgcgctatgcctatcggggcaaaacgagcccctgcaaccgccgatgaggccaggaaactggaggaggctaagagccgcgggtcccttgtggattttattaagcgctttccttgcatctttctacgccttctaatgaattcactattcgtcctcgtggtccttgctcaatgcacgttttcatctgtgatagcgggattgtcgacctttcttaacaaatttctggagaagcagtacggtaccagcgcagcatacgcaaactttctgattggcgctgttaatctgcctgctgcagccctgggcatgctgttcggcggaattctgatgaaaagatttgtcttctccttgcaggcaattccacgaatagccaccaccattataacgatctcgatgattctttgcgtgccactgttttttatgggctgctctactcctacagtggcagaagtctacccgccgtccacctcctcatctatacatcctcagtctccggcttgtcggcgggactgctcctgccccgatagtatcttccaccctgtgtgtggggataacgggatcgagtatctcagtccatgtcacgccggttgctccaatatcaatatgagttccgccacttctaagcagctgatctacctcaattgtagttgcgttaccggaggcagcgccagcgccaagaccggctcttgcccagtcccatgcgcccatttcctgctgcctgccatcttcttaatctccttcgtaagcctgattgcatgcatcagccataacccgctgtatatgatggtccttagagtggttaaccaagaagagaaaagcttcgcaataggagtgcaattccttctcatgcgactgctggcctggttgcccagtcctgcactatacggactgactatcgaccactcctgcatcaggtggaactctctatgcctggggagaaggggcgcgtgtgcttattacgataacgacgcgctgcgcgaccgttatctgggcctccagatggggtataaggcgctgggcatgctcttgctgtgctttatatcttggcgagtgaagaaaaacaaagaatataacgtccagaaggccgccggcctgatttag

SEQ ID NO: 206491 - DNA, 1248 bp, synthetic construct
  misc_feature 1..1248: note = Description of Artificial Sequence: Synthetic coding sequence
  source 1..1248: mol_type = other DNA
atgggcctgctgcccaagctgggcgccagccagggcagcgacaccagcacaagcagagccggcaggtgtgctagaagtgtcttcggcaacattaaggtgttcgtactgtgtcaaggactgttgcagctctgccagctgctctactctgcgtatttcaagagctcccttacaacaatcgagaagagattcgggcttagctcaagctcctccggcctgatcagtagcttaaacgagatatccaatgccatccttatcatattcgtgtcatactttggcagcagggttcatcgaccccggctcataggaattggcggcctctttcttgccgctggtgcctttatcctaacactgccacacttcctcagtgaaccctaccaatatactctcgcctctaccggcaataactctcgcctgcaagccgagctgtgtcagaaacattggcaagacctcccaccttccaaatgccactccaccactcagaacccccagaaagagacaagtagcatgtgggggctgatggtggtggcccagctcctggcgggaataggaactgtccctatccagccctttgggatcagctacgtagatgacttctcagagccaagcaactcaccactgtacatctccatactctttgccatctctgtgtttggccctgccttcggctatttgcttggctcagttatgctacagatattcgtagattacggccgcgtgaacaccgctgcagttaacttagtgccgggggatccccggtggataggggcctggtggctagggctactgatcagctcagccctgctggtgctcaccagcttcccttttttcttctttccgagagcaatgcctatcggggctaagagggcaccggcgacagccgatgaggcaaggaagctggaagaagccaaaagtcggggcagcctcgttgactttattaagaggttcccgtgtatctttttaagattactcatgaattctttgtttgtcctggtggtcctggctcagtgcacgtttagtagtgtgattgcagggctgtccactttcctgaataagtttctcgagaagcagtatgggacctctgccgcatacgcaaattttctgatcgcccaccaggtgctgtacattcgaagcctcctgcccgcagctggaacagccagggcacagattctctcgagcactcgtagcgtggagactatggaatcaagcacttctcctttggcgatgccggctgcagctacgtctacctag

SEQ ID NO: 206492 - DNA, 2133 bp, synthetic construct
  misc_feature 1..2133: note = Description of Artificial Sequence: Synthetic coding sequence
  source 1..2133: mol_type = other DNA
atgcagggcaagaagcccggcggcagcagcggcggcggccggagcggggagctccaaggcgacgaggctcaaaggaataagaagaagaaaaaaaaagtgagctgtttttcgaatatcaaaatttttttggtgtctgagtgcgcacttatgctggctcaggggaccgtcggcgcttacttagtgagcgttttgacaacactcgagagacggttcaacttgcaatctgccgacgttggggtcattgcttcttcatttgaaatcgggaatttagcgttgatcctgttcgtttcctatttcggagcccgaggacaccgcccacggctgattggctgcggaggaattgtgatggccctgggggcactgctgtcagccctgcccgaattcctgacacaccagtacaaatatgaagctggggagattcgatggggggctgagggacgggacgtgtgcgcagctaatggtagtggcggcgacgagggtcccgatccagacctgatttgcaggaaccgcaccgctactaatatgatgtatctcctgttgatcggcgcccaagtgctccttggcattggggcaactccagtacagcctctgggcgtgtcttatatcgacgatcacgtccggcgtaaggactctagtctgtacatcggaatcctgtttaccatgttagtgttcggaccagcttgtgggttcattctgggtagcttttgcaccaagatttatgtggatgctgtctttatcgacacctcaaacctggacataactccagatgaccccagatggatcggcgcgtggtggggtggtttcctcctgtgcggggccctcctcttcttttccagtttgctgatgtttggatttccccagtccttgccaccccattcagaaccggcaatggagtctgagcaggcgatgctgagcgaaagagagtacgaacgtccaaagccttccaatggcgtcctccgccaccctttggagcccgacagttcagcctcatgcttccagcagctccgggtgatccccaaggtgacaaaacatttactgtctaaccctgtctttacatgcatcatattagcagcgtgtatggagattgccgtcgtggccggcttcgccgctttcctgggcaagtatttggagcagcaatttaacctaactacatcaagcgccaatcagctcctgggcatgaccgcaattccctgtgcctgcctagggatattcctggggggtttactggtcaagaagctgtcactcagtgccctgggcgccattcggatggccatgctggttaaccttgtttctacagcttgctatgtgagtttcctgttcctgggctgcgataccggaccagtcgccggtgtcactgtgccgtacggcaatagcacggcgcccggtagtgcactcgacccgtactccccatgcaataacaattgtgaatgtcagaccgattcctttacgccagtttgtggcgctgacggtattacatatcttagcgcctgtttcgcagggtgcaatagcacaaacctcacagggtgcgcgtgcctgacaacagtgccagctgagaacgcaactgttgtccccggcaaatgccctagccctggctgccaggaggcctttctgacatttctttgcgtgatgtgcatttgttccttaataggggcaatggcccaaaccccttcggtcataattttgattcgcacagtgtcgcccgaattgaaatcctatgcgttgggagtcctcttcctgctcctgaggctgctgggatttatcccaccccctctgatcttcggtgctggtatcgacagcacatgcttgttttggtctacattttgcggggaacagggcgcctgcgtcttatacgataacgtggtgtaccggtacttgtatgtctcaatcgctatagcgttgaagagcttcgccttcatcttgtatacgacaacatggcagtgtctgagaaaaaattataaacgctacatcaagaatcacgaggggggactttccactagcgagtttttcgcgagtactctaaccctggacaatctgggaagggatcccgtgccagccaatcagacccatagaacaaaatttatatataatttggaggaccatgagtggtgcgagaacatggagtcggtgctgtag

SEQ ID NO: 206493 - DNA, 1356 bp, synthetic construct
  misc_feature 1..1356: note = Description of Artificial Sequence: Synthetic coding sequence
  source 1..1356: mol_type = other DNA
atgcgggagatcgtgcacatccagatcggccagtgcggcaaccagattggagccaagttttgggaaatgattggcgaggaacatggtatcgacttggccggttctgaccggggcgcctccgctctacagctggagcgtatctcagtctattataatgaggcctacggccgcaaatatgttccccgcgcggtcctggttgacctggagcccggaaccatggattcgatccggagctcaaagttaggggctctgtttcagcctgacagttttgtgcacggtaattccggcgctggcaataattgggccaaaggtcattatactgagggtgctgagctgatagagaacgttttggaggtcgtgcgacacgagtccgagagctgcgactgtcttcaagggtttcaaatcgttcattccctcggcggcggcactggctcagggatgggaacactccttatgaacaaaattcgcgaggagtacccagatagaattatgaactccttctctgtcatgccctctccaaaggtgtctgacacagtggtggagccttacaacgccgtgctcagcatccaccagctgatagagaacgccgatgcttgcttttgcatcgataacgaggccctctacgacatctgttttaggacgcttaagctcaccacccctacttatggagatctcaatcatcttgttagtttgaccatgtctggcatcaccacttctctccgcttccccgggcagctgaacgctgacctcaggaagttggctgtaaatatggtgccatttccgaggctgcacttcttcatgccaggattcgcccccctcactgcccaaggctcccagcagtacagagctttgtccgtcgcagaactgacccaacaaatgttcgacgctcgaaatacaatggccgcctgcgacctgcgccgcggtagatatctgacagtggcatgtatcttcagaggtaagatgagcactaaggaagtggaccagcagctcctctccgtccagactagaaactcatcttgtttcgtcgagtggatccccaacaacgtcaaggtggccgtctgtgatattcccccacggggcctcagcatggcggcaacattcatagggaacaatacagctatccaggaaatttttaaccgggttagcgagcacttcagcgccatgttcaaacgaaaagcttttgtgcattggtatacctccgaaggcatggatattaatgaatttggcgaggccgagaacaacattcatgaccttgtctccgagtaccagcagttccaggatgctaaggcggtgctggaagaggatgaggaggtgacggaggaggccgaaatggagcccgaggacaaaggccattag

SEQ ID NO: 206494 - DNA, 1749 bp, synthetic construct
  misc_feature 1..1749: note = Description of Artificial Sequence: Synthetic coding sequence
  source 1..1749: mol_type = other DNA
atgcccctgcaccagctgggcgacaagcccctgaccttccccagcccaaactctgcgatggagaatggtctggaccacactcccccttcacgtagggcgtcgcccggaacccctctttctccaggtagcctgcgcagcgccgctcactctcctttagatacatcgaagcaaccactctgccaactgtgggcagagaagcatggagcgaggggaacacatgaagtacgctacgtgtcagccggacagtctgtggcctgcggctggtgggcattcgccccgccttgtctccaagttttgaatacaccaaaaggcatcttgttctttctgtgcgcggctgcgttcctgcagggaatgaccgtgaatggtttcattaacacagttatcacatccctggagagacgatacgacctccactcttaccagagcgggcttatcgcctccagctatgatattgccgcttgcttgtgtctcacctttgtttcctatttcggaggcagcggacacaaacctcggtggctggggtggggggtgttattaatgggaacaggatctttggtcttcgcactacctcattttacagctggacgttacgaggtcgaattggatgccggggtcagaacatgtcccgctaaccctggtgccgtgtgcgccgacagcactagcgggcttagtcggtatcagcttgtctttatgctcggtcaattcttgcacggggtaggtgctacccctctttatacactgggtgtcacatatctgggaatgagcacctttagccctaagttcttggagagccaattttctttatccgccagcgaggccgcaacactctttggctatcttgttgtgccggcaggcggcggaggaactttcttgggaggattctttgttaataagttacgactgagggggtccgctgtgatcaagttttgcctcttctgtaccgttgtgagtttattgggcatcctggtcttttctcttcattgcccctcggtgcccatggccggcgtgacagcctcctatggaggctccctgttgcccgagggccacttgaacctgactgccccatgtaatgcagcatgttcctgtcagcctgaacactattcacctgtctgcgggtctgatggcttaatgtatttcagtctgtgccacgcaggctgtcctgccgctaccgaaactaatgttgacggacagaaagtgtacagggactgtagttgcatcccacagaatctatccagtggctttggacacgccaccgccgggaaatgtaccagtacatgtcagcggaagcccctgcttttagtcttcatcttcgtagtgatctttttcacatttctctcctccattcctgctctgacagctacgctgaggtgcgtgagggatccccagcgctccttcgcactcgggattcagtggatagtcgtgcgtatactcggcggtattccaggccccatagcttttggctgggtcatcgacaaagcttgtttactatggcaggaccaatgcgggcagcaaggctcatgcctagtttatcagaactctgctatgtcccgatatatcctgatcatggggctgctttacaaggtactcggagtgcttttctttgctatcgcctcaagccgggcggcctccgatcacagacctcgcccccctggccacggaggtcactccgcatttcccgacgaccgaactgtgccgctgggagacgccattacaagagagctgctcttcgatttgcagccttctacatag

SEQ ID NO: 206495 - DNA, 2169 bp, synthetic construct
  misc_feature 1..2169: note = Description of Artificial Sequence: Synthetic coding sequence
  source 1..2169: mol_type = other DNA
atgcccctgcaccagctgggcgacaagcccctgaccttccccagccccaacagcgcaatggaaaatgggcttgatcatacccctccatctaggagggcatctcctgggaccccgctgtcacccggaagtctgcggagcgctgctcattcacctcttgatacaagcaagcagccgctctgtcagctttgggccgaaaaacatggcgcaagaggaacccacgaggtcaggtacgtgagcgcaggtcagtccgtggcatgcggttggtgggcctttgcccctccttgcctgcaagtgcttaacacccccaaggggatcctgttttttttgtgcgcagctgcatttctccaaggaatgaccgttaatggtttcatcaacacagtgataacaagcctggaacgaaggtatgatctgcacagctatcaaagcggcctgattgcaagcagttacgatattgccgcttgcctttgcctcaccttcgtgtcctacttcggtggatctgggcataaaccacggtggctgggatggggcgttctcctcatgggtaccggctctttggtgttcgccctgccacactttactgccgggagatatgaagtcgagctggatgctggggtcagaacatgcccagcaaacccaggtgctgtgtgcgccgattcaaccagcgggctcagtaggtatcaactggtctttatgctaggccaattcctgcatggcgttggagctacccctctgtacacgctgggcgtgacgtatctggatgaaaacgttaaaagttcctgctcgcctgtatatatagcaatcttctatacagcagctatcttaggcccagctgcagggtacttgatcggtggcgcactactaaacatttacaccgagatgggccgcaggacagagctcactaccgagtccccattgtgggtgggcgcctggtgggttggctttctgggctctggggcagccgcttttttcactgctgtccccatcctaggctaccccagacagctgcccgggtcacagaggtatgcagtgatgcgggcagcagagatgcatcagcttaaagattcgtcacgcggcgaggccagcaatcctgactttggcaagactatcagggatctgccgctgtccatttggctgctgctaaagaaccctaccttcatcctcctgtgccttgccggcgcgacagaagccaccctgatcactgggatgtccacattttctcctaaattcctggaaagccagttctcactgagcgcgtccgaggccgcaactctttttggctacttggtggtgcccgctggaggcgggggcacatttctgggcggatttttcgtaaataaactgcgactaagaggatcagctgtcataaagttctgcctgttttgcaccgtcgttagtctgctcggaattctcgtgtttagtctccattgcccatccgttcccatggccggggtcaccgctagctacggaggttcactgctcccagagggacacctcaacttgacggcaccttgtaatgctgcatgttcttgtcagccagaacactattcgcccgtctgtggctcagacggactgatgtacttcagcctctgccacgctggctgccccgctgctacagagacgaacgtagatggacagaaggtgtacagagactgttcttgcatcccacaaaacctcagctcgggattcgggcatgcaacagccggtaagtgtacttccacgtgtcagcgcaagcctctgttgctggtctttattttcgttgttatatttttcacatttttgtcgagtatacccgccctgaccgccactctccgctgtgtgagggacccccagcgctcctttgcccttggtattcagtggatcgttgtgcgcattctcggcggcattcctggtcctatcgcgttcgggtgggtaatcgacaaggcatgcttattgtggcaggatcaatgcgggcagcagggctcctgcctcgtgtatcagaactctgcaatgagccgatacatccttatcatgggactgctttataaggtgttgggagtgctgttcttcgcaatcgcatgtttcttgtacaaaccgttatctgagagctcagatggacttgagacctgccttccctcccaaagctcagctccagatagcgccactgactcccagctgcagtccagtgtctag

SEQ ID NO: 206496 - DNA, 2169 bp, synthetic construct
  misc_feature 1..2169: note = Description of Artificial Sequence: Synthetic coding sequence
  source 1..2169: mol_type = other DNA
atgcccctgcaccagctgggcgacaagcccctgaccttccccagcccaaattccgccatggagaacgggctcgatcacacccccccctctcgtcgtgcgagccctgggactcctcttagcccgggatccttgagaagcgccgcccattcaccgctggacacgtcaaaacagccgctttgtcaattgtgggctgagaagcatggggcccgcggcacacatgaagtacgatacgtgtctgccgggcagtcagtggcgtgcggttggtgggcttttgcccctccatgtctccaggttctgaataccccaaaggggatactcttcttcctctgtgccgctgcattccttcaggggatgacagttaatggctttatcaatactgtcatcacttctctggaaagaagatacgatctccattcttatcagtctggactgatcgcttcgtcgtatgatatcgcagcctgcttatgcctcactttcgtgtcatactttggcgggtctggccacaagcccaggtggctggggtggggcgtgcttctgatgggaaccggcagtctcgtcttcgctctgccacacttcacagcaggtaggtacgaagtcgagctggacgctggagtccgtacatgcccagccaatccaggcgctgtttgtgccgactctactagcgggctctccagatatcagttggtgttcatgctcggacagttcctgcatggagtgggtgccactcccctgtataccctgggtgtgacatatctcgatgaaaacgtgaagtcgagctgtagtccagtctacattgcaattttctacaccgcagcgatattgggacctgcagccgggtacctgatcgggggcgctctcctaaatatctatactgaaatgggacgaagaacagaactaaccacagaatcacctctctgggtgggagcgtggtgggttggcttcctcgggagtggtgcagccgccttttttactgcagtccccattctgggttatccccggcagttgccagggtcacaaagatatgccgtcatgagggctgccgagatgcaccagttaaaagactctagtcggggagaggccagtaaccctgactttggaaagaccattagagatctcccactgtcaatatggcttttgctgaagaatcccactttcatcctcctgtgcctggccggcgcaactgaagcgacgcttatcaccggcatgtcaaccttcagccccaaattcctcgaatcacaattcagcctgagcgctagcgaggccgccacactatttggctacctggtggtgccggcaggcgggggcgggacatttctcggtggttttttcgttaataagctaaggttgcgtggctcagccgttatcaaattctgtcttttctgcacagtcgtgtctctgctgggcatactggtgtttagtctacattgccccagcgtccctatggcaggcgtgactgcatcctacggcggctcccttttaccagagggtcacctgaatttgacagcgccctgtaatgccgcctgtagttgtcagcctgaacactatagtcccgtttgcggcagtgatggacttatgtatttcagtctgtgccatgcaggctgccccgccgctaccgagactaacgtggatgggcaaaaggtgtatagagactgtagctgtataccccaaaacctctccagtggattcggacacgccaccgctggcaagtgcacatctacctttctgtatatccctcagcagcacagctgcacgaacggcaattccaccaccggggctctgcaggagactcctcggtcaaaacgcgcatgtagatgcgtccgtgatccgcaacgctcttttgcacttggcatacagtggattgtggtaaggattctgggtggaatcccgggccccatcgcttttggctgggttattgataaggcctgtttgttgtggcaggatcagtgtggccaacagggctcttgcctggtctaccagaactcagcaatgtcaaggtatatcctgataatggggttgttgtataaggttctgggagtgctgtttttcgccatagcctgcttcctctacaaaccactgagcgaatcttccgacggccttgagacatgcttgccttcacagtcttctgcccctgactccgcaacagactcacaactccagtcatcggtctag

SEQ ID NO: 206497 - DNA, 456 bp, synthetic construct
  misc_feature 1..456: note = Description of Artificial Sequence: Synthetic coding sequence
  source 1..456: mol_type = other DNA
accaccgccctgtgcgccgcccggaccgccagctgcaccagccactgtgccacccagggggccctacaaccccgcagacggatgtggactgcaaggagatgcgtacgcgatccgcaacggtcttttgccctgggcatccaatggattgtggtcagaattttaggggggatccccggacctattgccttcgggtgggtgatcgataaggcgtgcctgttgtggcaggatcagtgtgggcagcagggttcttgcctcgtctaccagaattctgccatgtcgcggtacatcctcattatgggactcctgtataaagtactgggcgtgttattcttcgcaattgcatgctttctctacaaaccactatcagagagcagtgatgggctcgagacttgcctcccgagccagtcctctgctccagatagcgccactgattcccagcttcagagctccgtctag

SEQ ID NO: 206498 - DNA, 1863 bp, synthetic construct
  misc_feature 1..1863: note = Description of Artificial Sequence: Synthetic coding sequence
  source 1..1863: mol_type = other DNA
atgcccctgcaccagctgggcgacaagcccctgaccttccccagcccaaacagcgccatggaaaacggattagaccacacacctccctcaaggcgcgccagcccagggactcccttgtccccagggtccctgagatcagccgcacatagcccccttgatacgagcaaacagcccctctgccagctgtgggccgagaagcacggtgcaaggggtacccacgaggtgcgctatgtgagcgccggacaaagcgtggcctgtgggtggtgggccttcgctcctccctgcctgcaagttctgaacactcccaagggtatcctgtttttcctctgcgctgctgcgtttttacagggaatgactgtaaatggttttattaatactgtcatcactagcttggagagaaggtatgatctgcactcttaccagtcgggcttgattgcctcatcgtacgatatcgcagcgtgtctttgcctgacatttgtgagttactttggaggctccgggcataagcctaggtggttagggtggggggtactcttaatgggcacagggtccctcgtctttgccctgcctcactttacagccgggcggtatgaggtagagctggacgctggggtgagaacatgccctgccaatcctggcgcggtatgtgcggatagcacctccgggttatccagataccagctcgtgtttatgctcggccagttcctacacggggtgggggcaacacccctctacacactgggggtgacctatttggacgaaaatgtaaagtctagctgcagccctgtctacattgcaatcttttacactgccgcgattttaggcccagctgctgggtacctgattggcggtgcactactcaatatttacaccgagatgggacggcgcacggagctaacaactgagtcccctctctgggtgggtgcctggtgggtagggtttttgggctcaggagcagctgctttttttactgccgtgccaatccttggttacccccgccagctccctggcagccaacgctatgccgtaatgcgggctgctgagatgcaccaattgaaggattcgagccggggggaggcttccaatcctgattttggcaagacgattagagatttaccactttctatctggctgttgctcaagaaccctacttttatcctcttgtgtcttgccggtgccacagaggccaccctcataactgggatgtctactttcagccctaaattcctggaatcccagttcagcttgagtgccagtgaagcagcaaccctctttggttatctagtggtgcccgcgggcggtggcggcaccttcctgggcggtttctttgttaataaactaaggctgcggggtagcgccgtcattaaattttgtttgttctgcacagttgtctcactcttggggatactggtcttcagtctgcactgtccttccgtgcctatggcaggcgtgacggctagctacggaggatccctgttgccagaaggccacttgaatctgaccgccccttgcaacgcagcttgctcctgccagcctgaacactacagtcccgtctgtggctctgacgggctgatgtactttagtctgtgccacgcaggatgcccagccgccaccgaaaccaacgtagacggacagaaggtgtcaggcgccgcggcatatcggccatgccctcccctagacccaggaaagggacctccctgcctcccactagttatcggggccatagtgggcctccctcgttgtaccgagacagtagcagtgtcactgcgaatctttccgctggtgctcgctatgccccttcaggggaacgccctgcagctggttcgggagtccccctccttttggttttcttactccctctag

SEQ ID NO: 206499 - DNA, 2160 bp, synthetic construct
  misc_feature 1..2160: note = Description of Artificial Sequence: Synthetic coding sequence
  source 1..2160: mol_type = other DNA
atgttcgtgggcgtggcccggcacagcggcagccaggacgaggtgtcccgcggggtggagccactggaagcggcgagggctcagccagcgaaggacaggagagctaagggcaccccaaagtccagtaagcctggtaagaagcatcgttacctgagactcttgcctgaggctctgattcggttcggtgggttccgcaagaggaagaaagcaaagtccagcgtctcaaagaaacccggcgaagtggacgactctttggagcaaccgtgtggcttaggctgcttagtgtccacctgctgtgagtgttgcaacaatattcgctgctttatgattttctactgtattctgcttatttgccaaggtgtagtcttcggcctgattgatgtgtctatcggcgatttccaaaaagagtatcagcttaagacaattgaaaagttggccttggaaaagagctatgatattagttccggcctggtggccattttcatagcattttatggagatcggaagaaagtaatttggtttgtggcatcttcttttttaataggactcggaagtctcctgtgcgctttcccgagtatcaacgaggaaaataaacagtcaaaagttggtatcgaagacatctgcgaagagataaaagtagtttcaggctgccagagtagtggaattagcttccagtcaaaatacctgagtttctttatcctgggccagaccgttcaaggcatagcaggaatgcccctgtatatcttgggtatcactttcatcgatgaaaacgtagccactcattccgccggcatttacttaggtatcgccgagtgcacatcaatgatcgggtatgccctgggatacgtgcttggggcccccctagttaaggtccctgagaatacgacttcggccacgaataccacggtgaataatgggtcccccgagtggctttggacatggtggataaatttcctgttcgctgccgtcgtcgcttggtgtacactcatccccctgtcgtgctttccaaacaacatgcccggctccacaagaataaaagcacggaagcgcaaacaactccacttcttcgatagtcggctcaaggacttaaagctcggtacaaatattaaagatctttgcgccgccctctggattctgatgaaaaacccagtgttgatttgtctggcactgagcaaagcaactgaatacctggtgattatcggagcatccgagttccttcctatctatcttgagaaccagttcatcctcaccccaacagtggccacaacgcttgcaggcttagtgctgatcccaggcggggcactgggtcagctgcttgggggagttatcgtgagtacgctggaaatgtcgtgtaaggcacttatgcgatttataatggtaacatcggttatctcactcatccttcttgttttcatcatcttcgtccgctgcaacccagttcaatttgccgggataaatgaggactacgacggcactggaaaactgggcaatttgactgcgccttgcaacgagaaatgcagatgcagttcttccatctattcttctatatgtggtcgtgacgacatcgagtattttagcccatgctttgcgggatgcacctactcaaaagcccaaaatcagaaaaagatgtattacaactgctcatgtataaaggaaggcctaatcaccgccgatgcagagggagactttatcgatgcccggcccggtaagtgtgatgctaagtgttataagctccccctcttcattgctttcattttcagcactctcattttttcaggctttagcggggtcccgatcgtccttgcgatgacccgcgtggtccctgacaaactgcgctccctggccctcggagtcagttacgtgattttgcggatattcggaacgattccaggcccttcaatctttaaaatgagcggtgagacctcttgtattttgagggatgtgaacaaatgtggccacaccgggaggtgctggatctacaacaaaactaagatggcgttcctgctagtcggcatttgctttttatgtaaattgtgcacaattatctttaccaccatagcctttttcatttataagcggaggctcaatgagaacactgactttccagacgtcaccgtcaaaaatccaaaggtcaaaaagaaagaggaaaccgacctatag

SEQ ID NO: 206500 - DNA, 1401 bp, synthetic construct
  misc_feature 1..1401: note = Description of Artificial Sequence: Synthetic coding sequence
  source 1..1401: mol_type = other DNA
atgttcgtgggcgtggcccggcacagcggcagccaggacgaggtgagccgaggggtggaacctctggaagcggccagagcacagccggctaaggatagacgggccaaggggacaccaaaaagcagcaaaccaggcaagaaacatcgctacctccggctgctacctgaggctttgatccgctttggaggctttagaaagcgcaaaaaggctaaatcttccgtgagcaagaagcctggtgaggtggatgatagcttggagcaaccatgcggtcttggatgtctggtctctacatgttgtgaatgctgcaacaacatccgctgcttcatgattttttactgtatcctgctgatttgccaaggcgtggtgtttggactgatcgatgtgtccattggagattttcaaaaggagtaccagcttaaaaccattgagaaactcgctctcgagaagagctacgacatctcttctgggctcgtggctatctttatcgccttctacggggatcgcaagaaggtgatctggttcgtcgcttcctcattcctgattggcctaggaagtctactgtgtgcatttcctagcatcaacgaggagaacaaacagtccaaggtgggcattgaggggatcgccgagtgtacttccatgattggctacgctctggggtacgtcctgggagcaccgctggtgaaagtgcccgagaataccacgagcgcgacgaaaacaggaaagctgggaaatctcactgccccatgtaatgagaaatgtcgttgttcgtcctctatctactcaagtatctgcggtcgggacgacatagaatatttcagtccatgtttcgctgggtgtacttacagcaaagcacagaatcagaagaagatgtactacaattgctcatgtattaaagagggccttatcacggccgatgccgaaggggatttcattgatgctcgtcctggaaaatgcgacgcaaaatgctataagctacccctttttattgcctttatattcagtacgttgattttcagcgggttttcaggagtcccaatagtgctggcaatgacccgtgtggtgcccgataaattaagatccttggctctgggcgtgagttatgtgatcctccgaattttcgggaccatccccggcccaagtatctttaagatgtccggcgagaccagctgtatcctgcgggacgtcaacaaatgcgggcatactggcaggtgctggatctacaataagactaagatggccttcctgttagttggcatctgttttctgtgtaagctctgcacaatcatttttacaacgatcgcattcttcatatataagcgccgcctgaatgagaacacagattttcccgatgtgacggttaaaaatcccaaagtcaagaaaaaggaagagaccgacctgtag

SEQ ID NO: 206501 - DNA, 1974 bp, synthetic construct
  misc_feature 1..1974: note = Description of Artificial Sequence: Synthetic coding sequence
  source 1..1974: mol_type = other DNA
atgttcgtgggcgtggcccggcacagcggcagccaggacgaggtgtctagaggtgttgagccattggaggctgctagagcccagccggccaaggataggagagcaaaaggcactccaaaatcctccaagcccggtaagaaacatagatacctacgccttctccccgaggcattaatccggtttggcggatttcgtaaaagaaagaaggccaagtcatccgtctccaaaaagcccggggaggtagatgactccctcgaacagccttgcggcctcggatgcctggtctcaacctgctgcgagtgctgtaataacataagatgtttcatgatattttactgcatactcttaatttgtcagggcgtggtttttggacttatcgacgtttcaattggcgacttccagaaagagtaccagctcaagaccatcgaaaaactggccctggaaaagtcttatgatattagcagcggattggtcgcaattttcatagccttttatggcgacagaaagaaggttatctggtttgttgcatcctcatttttgatcggcctcgggtctctgttgtgcgccttcccttccattaatgaggaaaataaacagagcaaggtgggaatagagggaatagcggagtgcacctcaatgattgggtatgctctaggatacgtccttggcgctccccttgtgaaggttcctgagaacactacctctgctaccaacacaacagtcaataacggctcgcctgagtggctgtggacctggtggatcaatttcctttttgctgccgtggtggcatggtgcaccctcattcctctgagctgtttccctaataatatgcctggtagcaccagaatcaaagctagaaaacgtaagcagcttcactttttcgacagcagactcaaagatttaaaactcggaaccaacatcaaggatctttgcgcagcactgtggatcctaatgaaaaatcccgttctcatttgcctggcactctcaaaggcaacagaatacttggtcatcatcggggcttcagagttccttcccatatatctcgagaatcagttcattttgactcccaccgtggcaacgactctggccgggctcgttcttatacctggaggcgctttgggacagctcttgggtggcgtcatcgtctccactttggagatgagctgcaaggcccttatgcgctttatcatggtgacatctgtcatcagcctaattctattggttttcatcattttcgtccggtgcaatcctgtgcagtttgctggaatcaatgaagattatgacggcactggtaagctgggcaatctgacggctccttgcaatgaaaaatgtcgatgctcctctagcatttattcaagtatctgcggaagggatgacatcgagtatttcagcccctgcttcgctggctgtacatattccaaggctcagaatcagaagaaaatgtactacaactgtagttgtatcaaagagggcctcattacagctgacgcggagggcgattttattgatgcaagacctggaaaatgcgatgcaaaatgctataagctgccactctttattgccttcatcttcagtacgctcatatttagcggcttctccggcgtaccaatcgtcctcgcgatgacccgagtggtgccagataaactgagaagcctggccttgggggtaagctacgtcatcctcagaatattcggtactattcctgggccgagtatctttaagatgtccggagagacaagctgtattctgagggatgtcaacaagtgcgggcataccggccgttgctggatctataataaaactaaaatggctttcctgctcgttggcatttgctttctatgcaagctctgcactatcatctttaccaccatcgcgttcttcatctataagagaagacttaatgaaaacacagatttccctgatgtgacagtgaagaaccccaaggtgaagaaaaaagaggagaccgacctctag

SEQ ID NO: 206502 - DNA, 2160 bp, synthetic construct
  misc_feature 1..2160: note = Description of Artificial Sequence: Synthetic coding sequence
  source 1..2160: mol_type = other DNA
atgttcgtgggcgtggcccggcacagcggcagccaggacgaggtgtctcgtggagtggagcctttggaagctgccagggcccaacctgcaaaggaccgacgtgccaaaggcaccccgaaatccagcaaacctgggaaaaagcatagatacctcaggcttttgcctgaagcccttattcgttttggcgggttccggaagaggaagaaagccaaaagcagcgtgagcaaaaagcccggtgaagtcgatgactcccttgagcagccctgtggccttggttgcctggtttccacatgctgcgaatgttgcaacaacatccgctgctttatgatattctattgcatcctactgatctgccaaggagtggtttttggactgatcgacgtctctatcggtgacttccagaaggagtatcagttgaagactatcgagaagctcgccctcgaaaagtcgtatgacattagtagcggacttgtggcaattttcatcgccttttacggcgatcgcaaaaaggttatctggttcgtggccagttcttttttaatcggtcttggcagtttactgtgtgcgtttcctagtatcaatgaggaaaataagcagagcaaagttggaattgaagatatctgtgaggagattaaggtcgtctccggatgccagtcctccggtatcagcttccagtctaaatatttatcgttctttatactggggcagacagtgcagggcattgccgggatgcccttgtatatcctgggcattacttttatcgacgagaacgttgccactcactccgcgggtatctatcttggaatagctgagtgcacgagcatgatcggctacgctcttggctatgtgctgggggcacccctggtcaaggtccccgagaacacaaccagtgcaaccaacaccaccgtgaacaatggatctcctgagtggttgtggacatggtggatcaattttctgtttgcagccgttgtggcgtggtgcacactgattcccttgtcttgctttccaaataacatgcccggctccactcggattaaggctcgcaaaagaaaacagcttcatttttttgattcccgcctcaaggacctgaagctaggcaccaatatcaaagatttatgcgcggccctgtggatcctgatgaagaatccagtgctgatctgcttggctctgagtaaagccaccgagtatttagtgatcatcggagcaagcgagtttctgcctatatatctggagaaccagtttattttgactccaaccgtcgccaccacacttgctggactagtgcttattcccgggggagcactgggtcagctgctgggcggggtcatcgtgtcaacactggaaatgtcatgcaaagccctgatgagattcatcatggtgacctcagtcatttcacttattctactggtattcatcattttcgtgcgatgtaaccccgttcagttcgcaggaattaacgaggactatgacgggacgggcaagctcgggaacctgaccgcaccatgcaatgagaagtgtcgttgctcaagctctatctatagcagcatctgtggaagggatgacattgagtacttctccccatgtttcgccggctgtacttattccaaggcccagaaccagaagaagatgtattacaactgctcctgcattaaagaggggttgattacagcagacgcagaaggagacttcattgacgcgagacctggtaagtgcgacgctaaatgctacaagctacctcttttcatcgcctttatcttctccacccttatcttctccggcttttccggcgttccaattgtgctggccatgactcgagtggtcccggacaagcttcgcagtctggcccttggagtgagttatgttatccttcgcattttcggcactattcccggacccagcatcttcaagatgtctggcgagacttcatgtatcctgcgcgatgtgaacaaatgtggccacaccggacggtgctggatatacaataagactaaaatggcgttcctcctggttggcatttgtttcctgtgtaaactgtgcaccattatattcaccacaatcgctttttttatttacaagcgacggttgaatgagaatactgactttccagacgtcactgtcaagaatccgaaggtaaagaaaaaggaggagacagacctgtag

SEQ ID NO: 206503 - DNA, 78 bp, synthetic construct
  misc_feature 1..78: note = Description of Artificial Sequence: Synthetic coding sequence
  source 1..78: mol_type = other DNA
ctgaacgagaacaccgacttccccgacgtgaccgtgaagaaccccaaggtcaagaagaaagaggagacagacctgtag

SEQ ID NO: 206504 - DNA, 1401 bp, synthetic construct
  misc_feature 1..1401: note = Description of Artificial Sequence: Synthetic coding sequence
  source 1..1401: mol_type = other DNA
atgttcgtgggcgtggcccggcacagcggcagccaggacgaggtgtccaggggcgtagagcctcttgaagccgcacgagctcagcccgccaaagatcggcgagcaaaaggtactccaaagagtagcaaacccggcaagaagcaccggtacttacgcctgttacccgaggccctgattcgattcgggggttttcgcaaacgaaagaaagctaagagctctgtttctaagaaacctggcgaggttgatgactccctggaacaaccctgtggcctgggttgtctggtgtctacttgttgtgaatgttgtaacaacattcgatgtttcatgattttctactgcattctactgatttgccaaggggtggtgttcggcctaattgacgtcagcattggggattttcagaaggagtatcaacttaagaccatcgaaaaattggctttggaaaaaagctatgatattagttccggcctggtcgcgatctttattgctttctatggtgaccgaaaaaaagtaatttggtttgtagccagttccttcctcatcggcctcggttctcttctctgcgcgttcccttcgatcaatgaagaaaacaaacagtctaaagtcggtattgaggggattgccgagtgtacctcgatgattgggtacgctcttggttacgtgcttggcgctcccctcgttaaagtgccagagaataccacgtcggccaccaagaccgggaagctgggaaacttgaccgccccatgcaatgaaaagtgcagatgtagctccagcatttacagcagcatatgcgggagggacgacatcgagtatttctcaccttgttttgccggatgcacatatagtaaggcacagaaccagaaaaaaatgtactacaactgttcgtgtatcaaagaaggactcattactgccgacgccgagggggattttatcgacgctaggcccggcaagtgtgatgccaagtgttacaagctgcccctcttcattgcctttattttctctaccctgattttctctggcttctccggcgtgcccatagtgcttgccatgacccgggttgtgccagacaaattgaggtctctggccctcggcgtctcttatgtgattttgcgcatcttcgggacaatcccaggacccagtattttcaagatgagcggggagaccagctgtatcctcagagatgtgaacaagtgtggtcacacagggaggtgttggatttacaataagactaaaatggcattcttgctggtcgggatctgcttcttgtgtaaactttgtacgattatttttaccactatagctttctttatttataaaaggcgactgaatgagaacacagattttcccgatgtaaccgtgaagaacccaaaggtgaagaagaaggaagagacagatctctag

SEQ ID NO: 206505 - DNA, 351 bp, synthetic construct
  misc_feature 1..351: note = Description of Artificial Sequence: Synthetic coding sequence
  source 1..351: mol_type = other DNA
atgctgagctgccggctgcagtgcgccctggccgccctgagcatcgtgcttgctttagggtgcgttactggcgctccctcagaccccagattgaggcaattcctccaaaaatcattagcagcagcagctggtaaacaggaacttgccaagtacttccttgctgagttgctttcagaacctaatcagaccgagaacgatgccctggaaccggaggatctgtcacaggccgcggagcaggatgagatgagactggagttgcagcggtctgcaaattctaatccagccatggccccccgagagaggaaggccggctgcaagaattttttctggaaaaccttcacaagttgctag

SEQ ID NO: 206506 - DNA, 1176 bp, synthetic construct
  misc_feature 1..1176: note = Description of Artificial Sequence: Synthetic coding sequence
  source 1..1176: mol_type = other DNA
atgttccccaacggcaccgccagcagccccagcagcagccccagccccagccctggaagctgcggggaggggggtggaagtcggggccccggcgcaggagcagctgatgggatggaggagccaggcaggaacgcatcgcagaatggcactctctcagaaggccaggggagtgcaatcctgatctcttttatatatagcgttgtgtgtctcgtaggtctgtgcggaaactccatggtgatttatgtgattctgaggtatgccaagatgaagacagccacgaatatatacatcctaaatttagctatcgccgacgaactcctaatgctcagcgtccctttcttggtcacttccacactgctccgccattggccattcggagccctgctttgcagactcgtcctctcggttgatgccgttaacatgttcacctctatttattgcttgaccgtgctcagcgttgacagatacgttgccgtggtccaccctattaaggcggctagataccgacgacctactgtggctaaggtcgttaatttgggcgtgtgggtgctgtctttactggtgattttgccgatcgtggtcttcagccgtactgctgctaacagcgatggcactgtagcgtgtaacatgctgatgccggaacccgcacagcggtggctggtgggctttgtgctttacactttcctgatgggatttctcttgcctgtgggtgcaatctgtctatgttatgtcctgattattgccaaaatgcggatggtggctctgaaagctggttggcagcagcggaaaagatctgaaaggaagattaccctgatggtaatgatggtcgtgatggtttttgtcatttgctggatgcccttctacgtggtgcagttggtgaatgtgtttgcggaacaggacgatgccaccgtatcacagttgtctgttattctggggtacgccaattcatgtgccaacccaattttgtacggatttctgagcgataacttcaagagatcttttcagcggattctgtgtctctcttggatggataatgctgccgaggagccagtcgattattacgccacagctctgaagtctcgagcttactccgtggaagacttccagccagagaacctagaaagtgggggcgtcttccgaaatggaacctgtacgtcacggatcaccacgctctag

SEQ ID NO: 206507 - DNA, 1257 bp, synthetic construct
  misc_feature 1..1257: note = Description of Artificial Sequence: Synthetic coding sequence
  source 1..1257: mol_type = other DNA
atggacatgctgcaccccagcagcgtgagcaccaccagcgagcccgaaaatgccagcagcgcttggccgcccgatgccacactggggaacgtttcagctggtccttctcccgccggcctggctgtctccggtgtactcattcccctggtgtacttggtcgtgtgcgtggtcggtctcctgggtaacagtctggtgatctatgttgtattgcgccataccgccagtccctctgttactaatgtttatatcctgaacctcgccttagctgatgaactcttcatgctgggtctcccatttctggccgctcagaatgcattatcgtactggcctttcggctccctgatgtgtcgcctcgttatggccgttgacggcattaatcagttcacaagcattttttgtttaaccgtgatgagcgtggatcgctacctggcggtggtccaccccaccagaagtgcgcggtggcgaacagctccggtggctagaactgtgtccgctgcagtctgggtagcgtccgcagtggttgtcctgcccgtcgttgtctttagcggagtccctcgcggtatgagtacttgtcacatgcagtggcccgagcctgcagccgcatggcgggccggattcattatctacacagccgccctggggttttttgggccacttctggttatatgcctgtgttatttgctgattgtggtgaaagtgaggtccgctggtcggagggtttgggccccgagctgtcagaggcgcaggcgtagcgaacgaagagtcaccagaatggtggtggctgtggtagccctgtttgtcctgtgttggatgccgttctatgtgctgaacatcgtgaatgtcgtctgccctctccccgaagagccagcctttttcggcctctactttcttgtagtggctctgccctacgccaacagctgtgccaatcccatactctacggctttctaagctacagatttaagcaaggattcagacgcgtgcttctgcggccatccaggagagtgcgttcacaggaaccaacggtaggcccccccgaaaagaccgaggaagaggacgaggaggaagaagacggggaagagagtcgcgaggggggcaagggtaaggagatgaacggcagagtgagccagatcacccagccaggcaccagcggtcaggagcgcccaccgtccagggtggcctcaaaagaacaacagctgcttccacaggaggccagcaccggagagaagtcatccaccatgaggataagttatctgtag

SEQ ID NO: 206508 - DNA, 1257 bp, synthetic construct
  misc_feature 1..1257: note = Description of Artificial Sequence: Synthetic coding sequence
  source 1..1257: mol_type = other DNA
atggacatgctgcaccccagcagcgtgagcaccaccagcgagcccgaaaatgcctcatccgcctggcctcccgacgcaaccctggggaatgtgagtgccggccctagccccgctggacttgccgtgagcggagtgctcatcccgctagtctacctggtggtgtgtgtggtcggactgctgggcaacagcctggtaatttatgttgttcttaggcatactgccagcccctccgtcacaaacgtgtatatcttgaacctggctctcgcagacgagctattcatgctgggcttacctttcctcgcagctcaaaatgccctttcctactggccatttggttcccttatgtgccggctggttatggccgtcgatggtataaatcagtttacgtccatcttctgtctcacagtgatgtccgtagacagataccttgccgtagtgcatccaacgcggtccgcaaggtggaggaccgcgccggtggcccggacagtatctgctgctgtttgggttgcctcggcggtggtggtactccccgtggtcgtgttctccggagtgcccaggggcatgagcacttgtcacatgcagtggccagagcccgcagccgcctggagagccgggtttattatttataccgcagctctgggcttcttcggacccttactggttatatgtctgtgctatcttctgatcgtggtgaaggtacgttctgccgggagacgtgtctgggcaccatcttgtcagaggagaaggcgatcagaaagaagagtgaccagaatggtggtggccgtggttgcactcttcgtgctttgttggatgccattttacgtactgaatatcgttaatgtggtttgtccactccctgaggagcctgctttcttcggtctgtatttcttggtcgtggccctcccctacgctaattcctgcgccaatcctatactttacggtttcctatcatatcgatttaagcagggttttcgcagagtattgcttcggccttcccgtagggttcgcagccaagagccgacggtaggtccccccgaaaaaacagaggaagaagacgaggaggaagaggatggcgaggaatcacgggaaggtgggaagggcaaggagatgaatggtcgcgtgtcacagattactcaaccgggcacctcagggcaagaaaggcctccaagccgcgtggcaagcaaggagcagcaattactcccccaagaggctagcactggtgaaaagagttccaccatgcgtatctcatatctgtag

SEQ ID NO: 206509 - DNA, 1167 bp, synthetic construct
  misc_feature 1..1167: note = Description of Artificial Sequence: Synthetic coding sequence
  source 1..1167: mol_type = other DNA
atgagcgcccccagcaccctgccccccggcggcgaggagggcctggggactgcctggcccagcgctgctaacgcgagcagtgctccagcagaggctgaggaagccgttgcaggcccgggggatgcgagggcagccggaatggtggctatccagtgcatctatgccctcgtgtgtctcgtgggtctcgttggtaacgctctggtcattttcgtcattctgcgctatgcaaagatgaagacagctactaatatttatctccttaacctggctgtggccgatgaactgtttatgcttagcgtacccttcgtcgccagctcagcagcactgaggcattggccgttcggaagcgtgctctgtcgggcagtcttgagcgtggatggactcaacatgttcacctctgtgttttgccttactgtcttatccgttgatcgatacgttgctgtggtgcaccccctgagagccgcgacctatcgtagaccatcagtagctaaactcatcaaccttggggtgtggctggcctcactcctggtgacattacccatcgcgatctttgctgacactcggccagcacgtggcggtcaggctgtggcttgcaatctgcagtggcctcatccagcgtggagcgccgtgtttgtggtgtacactttcctcttaggcttcttgcttcccgtgctagccatcggactgtgctacctattaattgtgggcaagatgcgtgcagtcgctcttagagccggctggcagcagcggaggcggtctgagaaaaaaatcacgcgactggtcttaatggtagtcgtagttttcgtactttgttggatgcctttctatgtggtgcagctgttaaacttgttcgtcacgtccctcgatgccacagtgaatcacgtgagcctgattttatcctacgcgaacagctgtgccaatccaattttgtatgggttccttagtgataactttcgcaggttcttccagcgggtactctgcctgaggtgctgtctgctggaaggtgcaggtggcgctgaagaggagcccttagattattacgccactgctctgaagtctaaggggggcgcaggttgcatgtgtccgccccttccttgtcagcaggaggccctacaaccagagccaggtcggaagagaatcccattgacgcgcactaccactttctag

SEQ ID NO: 206510 - DNA, 1095 bp, synthetic construct
  misc_feature 1..1095: note = Description of Artificial Sequence: Synthetic coding sequence
  source 1..1095: mol_type = other DNA
atggagcccctgttccccgccagcacccccagctggaacgccagcagtcccggcgccgccagcggaggaggagacaatcggaccttagtgggcccagcaccctctgcgggcgccagggctgttttggtgcctgttctctatctgcttgtctgcgccgcaggactgggcgggaatactctggtcatctacgtggttttaagatttgctaagatgaaaaccgtcacgaacatctatattctcaatctggccgtagccgatgtattgtacatgttgggtctgccattcctagcaacacaaaacgcggctagcttctggccttttggccctgtcctctgcagacttgtcatgaccctcgacggagttaaccagtttaccagcgtgttctgtttgactgtgatgagtgtggaccggtatctcgctgtggtgcaccctcttagtagtgctcgctggcggaggcccagagtggccaagctggcgagcgctgctgcgtgggtcctgtctctgtgcatgtccctaccactactcgtgttcgcagacgtgcaggaaggagggacttgtaatgctagctggcccgagccagttgggctctggggagccgtcttcatcatctacacagccgtgctcggcttcttcgcgcctctgctagttatctgtctgtgctacctgctcattgttgttaaagtgagagcagctggagtccgcgtagggtgcgtgagacggagaagcgagcgaaaggtgactcggatggttttagttgtggttctcgtgttcgcaggatgctggctgcccttctttacagtgaacatcgttaacctggccgttgccctccctcaagagcctgcctcagccggcctttatttttttgtggtgatcctgagttatgccaatagctgcgcaaatcccgtgctgtatggtttcctatccgacaattttcgccaatctttccagaaggtattatgtctgcgaaagggctccggggcaaaagacgcagacgcaactgagcccagacccgaccggatacgacagcagcaggaagcaacgccacctgcacatcgggcggccgccaatggcttaatgcagaccagcaaactgtag

SEQ ID NO: 206511 - DNA, 1095 bp, synthetic construct
  misc_feature 1..1095: note = Description of Artificial Sequence: Synthetic coding sequence
  source 1..1095: mol_type = other DNA
atggagcccctgttccccgccagcacccccagctggaacgccagctcacccggcgcagctagcggcgggggtgataaccgcaccctggtcgggcctgcacccagtgcgggggcacgcgctgtgctggttccagtgctgtatcttttagtgtgcgccgcaggtctaggagggaacaccctggtgatttacgtggttcttcggttcgccaagatgaagactgtgaccaatatctatatcttgaacctggctgtggcagacgttctgtacatgttgggcctgccatttttggctactcagaatgccgcctctttctggccatttgggccagtgctgtgtagactggttatgacactggacggagtgaaccaattcactagtgtgttttgtctcacggtcatgtcagtggacagatacctcgccgtggtgcacccattatcttcagcccgctggcgaagacctagggtcgcaaagctcgcatctgctgctgcttgggtcttgtcattatgtatgagcctgccacttttggtatttgctgatgtccaagagggcggcacttgcaatgcatcatggcccgagcccgtgggcctgtggggcgcagtatttatcatatataccgccgtactgggatttttcgcccctcttcttgtgatttgtttatgctacctgctcatcgtggtaaaggtgcgggccgctggggtccgagtcggctgtgtgagaaggagatcagaacggaaagttactcgtatggtgctggtggtcgttctagtgtttgctgggtgttggctgccgttctttactgtcaacattgttaatctcgccgtggctctccctcaggaacctgcgagtgccggcctgtacttcttcgttgtgattctgagctacgccaattcctgcgccaaccccgtgctgtatggcttcctcagcgataattttagacagagtttccagaaggttttgtgtctgcgcaaaggctccggagccaaagatgcagacgcgacggagccacgcccagacagaattcgacagcagcaagaggccactccaccagcccatcgcgccgcagccaacggcttgatgcagacttctaaactgtag

SEQ ID NO: 206512 - DNA, 822 bp, synthetic construct
  misc_feature 1..822: note = Description of Artificial Sequence: Synthetic coding sequence
  source 1..822: mol_type = other DNA
atggagcccctgttccccgccagcacccccagctggaacgccagctcaccaggggcggccagtggcggcggagataacagaactttggtcggccccgccccatctgctggcgctcgggctgtgctggtgcccgtcttatacttactggtgtgcgctgccggcttgggaggaaacacgctcgtgatttacgtggtcctacgcttcgctaagatgaaaacagttacaaatatatatatcctcaatctggctgtggcagacgttctctatatgctgggcctgcctttccttgccacacagaacgccgcctctttctggccattcggccccgttctctgtcgtcttgtgatgacgttggacggtgtgaatcagtttacaagcgtgttttgccttacagttatgtctgtagaccggtacttagcagtggtgcaccctctcagcagcgcccgatggcggcggccacgcgtggccaagttggcttcagcggccgcttgggtcctgagcctttgcatgtctctgcctctgcttgtcttcgccgatgtccaggagggaggtacgtgcaatgcttcgtggccagagccggtgggactgtggggcgcagtctttatcatatacacggcggtgttagggttctttgcacccctcctcagggggtctggcagggccggagacgctaacggacggccttgggaatctaggagactcccccccaggatcgtcctgcctcctccgccccagacccccgccttcccgggtgcaccaggcccagaaagaggtccccgcgaaccttgctgggggctttgggggactctggctttgctctag

SEQ ID NO: 206513 - DNA, 6978 bp, synthetic construct
  misc_feature 1..6978: note = Description of Artificial Sequence: Synthetic coding sequence
  source 1..6978: mol_type = other DNA
atggccaccaacatcgagcagatcttccggagcttcgtggtgagcaaattccgcgagatacagcaggaactgagctccggaagaaacgaagggcaactgaacggagagacaaacactcccatagaaggcaaccaggccggtgatgccgcagcgtctgctaggagcctgcccaacgaggaaattgttcagaagatcgaagaagttctgtcaggagtgctcgatacagaactccgctacaagccggatctgaaagagggctcccgcaagtctagatgtgtcagtgtgcagactgatccgactgacgaaatcccaacaaagaagtccaagaaacataaaaagcacaagaacaaaaaaaagaaaaagaagaaggaaaaggagaagaaatacaaaagacagccagaggaatccgaaagcaaaaccaaatcccatgacgacgggaacatagatttagagtcagactcattcttaaaattcgactcagagccatcagctgtcgccctggaactaccaacccgagcttttggccctagcgagaccaacgagagcccagccgtcgtgctagagccaccagtcgttagcatggaggtgtccgaaccacacattctggagaccctcaaacctgcgactaaaacagcagaattgtccgtcgtgtctacgtccgtgatctccgagcaaagcgagcagagcgtggccgtgatgcctgaaccgtctatgacgaagattctggactcttttgctgcagccccagttcccacaacaacgcttgtgctgaagagttcagaacccgtagtcactatgtctgtggagtatcagatgaagtctgttctgaaatccgtggagtcgacctccccggagccaagcaagattatgcttgttgaaccgcctgtggccaaggtcctcgagccaagcgaaactcttgttgtgtctagtgagacaccaaccgaggtgtacccagaaccaagtacatcaaccactatggacttcccagagagttcagccatagaggccttacggctgccagaacagccagtcgacgtcccttccgaaatagcagattcctccatgacaaggccccaggaactgccagaacttccaaaaaccaccgccctggaactccaggagtcatcagtggccagcgcaatggaactgccgggcccccctgcaacctctatgcctgagctgcagggtccacctgtgaccccagtactggagctgcctggaccatcagccacacccgtacccgagctccctggcccattgagcacccctgtgcctgagcttcctgggcctccagccacagcagttcccgagttacccgggcctagcgtgactccagtgccccagctgagtcaggagctaccgggactgcctgccccgagcatgggtctggagcccccgcaggaagttccggagccacccgttatggctcaagagcttccggggctgcctttggtcacagctgccgtcgagctgcctgagcaacctgccgtcactgtggctatggaactgacggagcagcccgtgacgacgacagagctggaacagccggttggcatgacaaccgtcgaacaccctggtcatccagaagtgactaccgccaccggcttactggggcaacccgaagccacgatggtactggagctcccaggacagccagtggcaacgactgccttagagctgccaggccagccttctgtgacaggcgtccctgagctgccaggcctgccttcagcaacgagggccctcgagctgagtggacagccggttgctactggcgcccttgagctcccagggcctctgatggcagcaggagcgctagaatttagtgggcagtccggcgctgccggcgctctggaactcttagggcagcctcttgcaacgggagtgctggagctgcctgggcagcccggggcccccgagctgccgggacagccagtggctacagtggcactcgagattagtgttcagtcggtcgttaccaccagcgagctgagcaccatgacagttagccaatcacttgaagtccctagcactaccgcactggaaagttacaacacagtggctcaggagttgcccaccacactggtgggcgagacctctgtgaccgtcggggtggatccactgatggcgcccgagagtcacatcctggcttctaatacaatggagacccacattttagccagtaacaccatggacagtcagatgctggcgtcaaacactatggactctcagatgctggcctctaataccatggactcccagatgctggcaagttcaactatggattcccaaatgctcgctacatcctcaatggattcccagatgttagccacatcctctatggattctcagatgctagctacatctacaatggactcacagatgctcgctacctccagcatggacagtcagatgttggctacatccagcatggatagtcagatgcttgccactagcagtatggattctcaaatgctggccacgtcaagtatggactcacagatgcttgctacatccactatggactcgcagatgctcgcaacttctaccatggactcacagatgctggccacctctagcatggactctcagatgcttgcttctggcaccatggacagccagatgctggccagcggaaccatggacgcacagatgctggcctcgggaaccatggatgcgcagatgttggcttcctctacccaggatagcgctatgctggggagtaagagtcccgacccgtacaggctggcccaggacccatatcggctggcccaagacccctacagacttggccatgatccgtaccgcctggggcacgacgcataccggttgggccaggacccatacagacttggacatgatccctaccggctgacccctgacccataccgcatgtcacccaggccatatcggattgcaccgaggtcctaccggatagccccccggccttaccgcttagcaccccgcccgttgatgctggccagcagaagaagtatgatgatgagctacgcagcggagcgctctatgatgtcctcttatgaaaggagcatgatgtcctacgaaagaagtatgatgagcccaatggctgaacgttccatgatgtccgcttacgagcgtagtatgatgtctgcgtacgagaggtctatgatgtcccccatggccgagcgatccatgatgagtgcctacgaacggagtatgatgagtgcctatgagcggtcaatgatgtcccctatggccgatagaagcatgatgtctatgggagctgacagaagtatgatgtcgtcatactctgctgccgataggtcaatgatgtctagctactcagccgccgacaggagcatgatgtccagctacaccgccgatcggtccatgatgtctatggcggcagacagctatacagacagttataccgatacctataccgaggcctatatggtaccaccactcccacccgaggagccacctactatgccacctctccctccagaggaaccgccaatgacgcccccactacccccagaagagcctcctgagggtccagctctccctactgagcaatcggcacttactgctgagaacacttggccgaccgaggttcccagctctccatcagaggaatctgtctctcaacccgagcccccagttagccagtcggagattagtgagccaagcgctgtgccaactgactacagcgtatctgcaagcgatccctccgtgctggtgtccgaagcagctgttacagtccctgaaccccccccagagccagagtcctctataacactgacgccagtggagtccgccgtagtagcagaggagcatgaggtagtacccgagagacctgtgacttgtatggtttccgagaccccggccatgagcgcggagcccaccgtgttagcgtctgaaccccccgttatgtcagaaacagctgagactttcgattccatgagggcttctggccacgtggcatcagaggtgtcaactagtctcctggtgccagccgtcactactcccgtactggcagaaagtattctagaacccccagccatggcggcccccgagagttccgccatggctgtactggagtcttctgctgtgactgtgcttgaatccagcaccgtgactgtgctcgagtcgagcaccgttaccgtacttgagccctcagtggtaaccgttcccgagccaccagtggtggcagaaccagactatgttacaatcccagttccggtagtgagtgcactagaacccagtgtcccagtgttagaaccggcggttagcgtattacaaccttctatgatcgtgtcagagccttctgtaagcgttcaggaaagcacagttacagtgagcgagccagctgttacggtttctgagcaaacccaggtgatcccaacagaagtcgctatcgaatcgactccaatgatccttgagtcttctatcatgtcgtctcacgtgatgaaagggataaatctgagcagtggggaccagaatctggcaccggagatcggcatgcaggaaatagctcttcattccggggaagaaccccacgctgaagagcacctgaaaggcgacttctatgagtctgagcacggcatcaacatagacctgaacatcaacaaccacttaatcgctaaggagatggaacacaacactgtctgtgccgccggaacatcgcccgtcggagaaatcggagaggaaaaaatcctgccaacgagcgagacaaagcagcgtaccgtgctggatacctatccaggggttagcgaagcagacgcaggcgagactctttcatccaccggcccgtttgcccttgaaccagacgccactggaacttctaaagggatcgaattcacaacagcctctacactgagcctcgtgaataaatacgacgtagatctgtctctaacaacccaagacactgaacacgatatggtcatctcgaccagcccctccggcggctcggaggcagacatcgaaggccctctcccggctaaggacatacatttagatctgccgtctaataacaatctggtcagcaaagacactgaggaaccgcttcctgtcaaagagtctgatcaaaccttggctgcactgctgtccccaaaggaaagctcagggggcgagaaggaggtccccccacctcctaaagagaccctaccagatagcggtttttccgccaatatcgaggatataaacgaggctgatctggtcaggcccctcctccccaaggatatggaaagattgacatccctccgcgccggaattgagggccctttgcttgcatccgacgtgggacgggaccgatcggccgcaagccccgtggtgagctccatgccggagagggccagcgaatcatcctctgaagagaaggacgattatgaaatcttcgtcaaagtaaaggacacgcatgaaaagtcaaaaaagaataaaaacagagataagggcgagaaagagaagaaacgagactccagtctgcgttctagatcgaagagaagtaagtcttctgagcacaaatccagaaagaggacgtcggaaagcagaagtcgcgcacgcaaaagaagctccaagagcaaaagtcatcggtctcagacccgtagtagaagcaggagccggagacgtaggcgctccagcaggtcacggtccaagtctcgcggccggagatcagtgtcgaaggaaaagagaaaacggagtcccaagcatcgttcaaaaagccgcgagagaaagcggaagcggtcttcatcgagggataatcgaaaaaccgtcagagcgcggtcccgcactccatcacgcagatcacggagccataccccctccagaagaagacgttcacgatctgttgggaggcgccgatccttcagcatctcacctagccgaaggtcccgcacacctagtcggcgctcccgtactccttctcgtaggtctcgcacaccctctcgccggagtaggactccctcccggcgctctagaacacctagcagacgtagcaggacaccatccagacgccgacgctcgagaagcgtggttcggagacgatcattctccatttcccccgttaggttacgtcgcagccgcactcccttgcgccgcagattctcaaggtcgcctatacggagaaagagatcgaggagcagcgaacgggggagatccccaaaacgtcttactgacctggacaaggctcagcttctggaaatcgcgaaggctaacgctgctgccatgtgcgctaaggctggtgtccctcttccccctaacctcaagccagctccaccacctactatcgaagaaaaagtcgctaagaagtcagggggagccacaatcgaggaattaactgagaagtgtaagcaaatagctcaatccaaggaagacgacgatgtaatcgtgaataaacctcatgtttccgatgaggaagaggaagagccccctttttaccaccatcccttcaaactcagcgagcccaagcccatatttttcaatctgaatattgccgccgccaagccaactcccccaaaaagccaggttaccctgaccaaggagttcccggtgagctccggcagtcaacaccgcaaaaaggaagccgactctgtgtacggggaatgggtcccggtagagaagaacggggaagaaaataaagacgacgacaatgttttcagtagcaacctgccatctgaacctgtcgatatttcgacagcaatgagcgagcgtgcactcgcccagaaaaggcttagcgagaacgcctttgacctggaggctatgtctatgctgaatcgcgcccaggaacgcatcgatgcatgggctcagttaaatagtatccctggccagttcactggcagtacaggcgtgcaagtgcttactcaggaacagctcgcaaacacaggggctcaagcctggattaagaaagggcagatattggtggccgtgttcctgcctcggtccgtgcccgctgtgctgtttacaaccctgttactccctcggcccaggatatcctcatag

SEQ ID NO: 206514 - DNA, 6912 bp, synthetic construct
  misc_feature 1..6912: note = Description of Artificial Sequence: Synthetic coding sequence
  source 1..6912: mol_type = other DNA
atggccaccaacatcgagcagatcttccggagcttcgtggtgagcaagtttcgggaaattcagcaggagctctccagcggaaggaacgagggacagctaaacggcgaaactaatacccctatcgagggcaaccaggctggtgacgcagcagcaagtgcaagatcacttccgaatgaggaaatcgtgcagaagatcgaagaggtattgtctggggttcttgacaccgaactgcgctataaacccgacttgaaagaaggcagccgcaagtcccgctgtgtgtccgtgcaaacagaccccactgatgaaatccccaccaagaaatctaagaagcacaagaagcataaaaacaagaagaaaaagaagaagaaggagaaagagaagaaatataagcgacaacccgaggagtcagagtctaagacaaagtctcacgacgatggtaacatcgatttggagagtgactcatttttaaagtttgactccgaacccagcgccgtggcactcgaacttccgactagggcctttggcccttcagaaaccaatgaaagccctgccgtggtgctggagccccctgtcgtcagtatggaggtgtccgagcctcatatcctagagaccctgaagcccgcgacaaagacagccgagctctctgtcgtcagcaccagcgtgatatctgagcagagtgagcagtctgttgccgtgatgccggaaccatcaatgaccaagatactggactcgtttgccgccgcgccagtgcccaccactaccttggtccttaaatcgagcgagcctgtggtaactatgtcggtggagtatcagatgaaatctgtgctgaaatccgtagaatctacttctccagagcctagcaagataatgttggtggaaccccccgtcgccaaagttttggaaccctccgaaactctggtggtgtcaagtgagactcctacagaggtttatcctgagccatctacatccaccaccatggacttcccagaatcaagtgctatcgaagctctgaggttgccagagcagccagtggacgtgccttctgagatcgcggacagtagcatgaccaggcctcaagagctgccagaacttcccaagaccactgcgcttgagttgcaggagtccagtgtggctagtgctatggagcttcctggccctccagctacttcaatgccggaactgcagggaccacctgtgaccccggtgcttgagttgcctgggccctcggctactccagtgcctgagttgccgggccccctgtcaacccccgtgcccgaactgccggggcccccagccaccgcagtcccagaactgcccgggcccagcgtaacccccgtgccgcaactgtcccaagagttgcccggcctccccgcaccatcaatgggactggaaccaccacaggaagtgccagaaccaccagttatggcacaggagttgccggggctgcctctcgtcacagcagccgtggagctgccagagcagcccgccgttacagttgcaatggagctgaccgaacaacctgtcaccacgaccgaactagaacagccagtaggaatgacaaccgttgaacatcccggccaccccgaagtcaccaccgccacgggcctgttgggccagccagaggccaccatggtgctggagctccctggccagccagttgcaactaccgcccttgaactacccggacagccgagcgtgacaggagtgccagagcttcccggcttgccgtcagcgacccgcgccttagagctgtcagggcagcccgtagccacaggcgctctcgaactgcccggccctctgatggccgcgggggccctcgaatttagcgggcagtccggggccgccggcgccctcgaactgttgggacaaccacttgctaccggcgtcctagaactcccaggacagcctggagccccagagctgcctgggcagccagtggcaactgtggctctggagatttccgtgcagtccgtggtgacaacatccgaactctcgacaatgacagtgtctcaatctctggaggtgccatccacaactgctctggaatcttacaacactgtggcacaggagctgcctaccactctggtgggagagaccagcgtcacagttggcgtcgatcctctaatggcccccgaaagccacattctggccagcaataccatggaaacccacatccttgcttccaacacgatggacagtcagatgcttgcttctaataccatggatagccagatgctcgccagcaataccatggattcacaaatgctcgcctctagtaccatggattcgcagatgctggcgacgagttctatggattcccagatgctcgccacctcatcaatggattcacagatgctggccaccagcaccatggatagtcagatgcttgcaacctcttccatggatagccagatgctggcgacctcatcgatggattcacagatgctagctacttcttccatggacagtcaaatgctggcaacatcttccatggacagccagatgctggccacatccaccatggactctcagatgctggccacatccactatggattcacaaatgcttgcaacatcgtctatggacagtcaaatgctcgcctctgggaccatggactcacagatgctggcttcagggacgatggatgcacagatgctggcctcagggactatggatgctcagatgttggcctcctccacacaagactcagctatgcttggatctaagtctccggatccttaccgacttgcacaagacccctaccgcttggcccaggacccttatcgcctaggacacgatccctaccgccttggccatgatgcctacaggctggggcaggatccttatcggctgggtcatgatccataccggttaacgcccgatccatacagaatgagccctagaccctatcggatcgctccacgatcttaccggatcgctcctagaccttaccggcttgctccgcgcccacttatgctggcctctaggcgttctatgatgatgtcctacgctgcagaaaggagtatgatgagcagctacgaacggagcatgatgtcttatgagcggagtatgatgagcccaatggccgaaagaagtatgatgtctgcatacgaaaggtcaatgatgtccgcttatgaacgatctatgatgtctccaatggcggaacgctcaatgatgtctgcttacgagaggagcatgatgtccgcatacgagcgctcaatgatgtcccccatggcagacaggtcgatgatgagcatgggagctgatcgcagtatgatgagttcatattcagctgccgataggtctatgatgagcagctacagcgccgccgaccgttcaatgatgagctcatatactgctgatcgtagtatgatgagcatggccgccgattcatacaccgacagctacacggacacctacactgaggcgtatatggtgcccccattgccaccagaagagcctcccaccatgcccccgctgcctccggaagagccccccatgactcctcccctgccgcccgaagagccccccgaggggccagcgctccctacagaacaatcagctctaaccgctgaaaatacttggcctacagaagttccttcatcccccagtgaggagagtgtctctcagccggagcctccagtcagccagtctgaaatctctgagcctagcgccgtgccgacagattactcagtcagtgcctcagatccctccgtgctcgtgagcgaggccgccgtgaccgtaccggaacccccacctgagccagaatcttctatcacactcacccctgtggagagcgccgtcgtggctgaagagcacgaagttgttcctgagcggcctgtgacttgtatggtatcagagacaccagccatgagcgccgagccaaccgtgctggcctccgagcctcccgtgatgtccgagacagccgaaaccttcgactccatgcgcgccagcggccacgttgcttccgaggtatccaccagcttactggtccccgcagtgacaaccccggtcttggcggagagtatccttgaaccgcctgctatggccgcccccgagtcctctgccatggcagtgttggagagctctgctgttacagtacttgaaagcagtacagttacagttctggagagttcgaccgtcaccgtgctggaaccaagcgtggttactgtgcccgagcctcctgtggtcgcagaacccgattacgtcaccattcccgtccccgtggtttctgctctggagccctctgtaccggttttagaaccagctgtgagcgtgctgcagccctctatgatcgtgagcgaaccaagcgtttctgtgcaggaaagcacagtgaccgtttcagagcccgccgtgaccgtaagtgaacagacccaggttatccccactgaagttgcaattgagtccactcctatgattctggagtcctctatcatgagctcccatgtcatgaagggcataaatctgagttcaggggatcagaatctagctcctgaaatcggtatgcaggagattgctttgcactccggtgaggagccacacgccgaggagcacctaaagggagacttctacgagagcgagcatggcattaatatcgacttgaacattaacaaccacctgatcgctaaagagatggaacataatacggtttgtgctgcgggcacttcaccagttggggagatcggtgaagagaagatattgcctacctccgagacaaagcagagaacagtgctagacacttaccccggggtgtccgaagctgacgccggcgagacccttagtagtaccggtccatttgctcttgagcccgatgccaccggcacatctaaaggtatagagtttaccacggcttctaccctgtccctcgtcaacaaatatgacgtggacctctcactcaccacccaagatacggagcatgatatggtcatctccacctctccctccggcggcagcgaggccgatatcgagggacccctccccgccaaggacatccacctcgacctcccatctaataataacctggtgagtaaggataccgaagaaccactcccagtgaaggaaagcgaccagaccctcgccgcactgctgagtcctaaggagagtagtgggggtgaaaaagaagtccctcccccaccgaaagaaacactgccagactctggtttttctgccaatatcgaggatataaatgaggccgacctggtgagaccattactacccaaggacatggagcgcctgacaagcttgcgagcagggatcgagggaccactgctagcctctgacgtgggccgcgatcgctcagctgccagtcctgttgtcagttcaatgccagaacgggctagcgagtcatccagcgaagagaaggacgattacgaaatctttgtcaaggtgaaggatacacacgaaaagtctaaaaaaaacaaaaatcgggacaagggtgagaaggagaaaaagagggatagcagtctgaggagccgttctaaaagaagtaaatccagtgaacacaaaagccgtaagaggaccagcgaatcacgaagccgtgcccgcaagagatcctctaaaagtaagagtcatagaagccagacacgtagcaggtccagaagtaggcgacgcagacgctcatcacgttcacgatccaagagtagaggacggaggagtgtatccaaggaaaaacggaagcgtagtccaaagcaccgaagtaaaagccgcgaacgcaagagaaagcggtcatcgagtcgcgataacagaaagactgtgagagctcgctctagaaccccctcacggagaagcaggtcacacaccccctcacgccgtagacgaagccgctctgtgggacgaagacgtagcttctctatcagccccagcaggcgttcgcgcacccccagccggaggagccgcacaccctcccggcggtctagaacaccctcgaggagaagtaggaccccatcccgccgctcacgaacgccatctcgacggtctaggacgcccagtaggaggcggaggagcagatctgtcgtgagacggcggtcgttttccatttctcccgttaggttgaggaggagccgcactcctttacgtcggaggttttcccgctctccaattcggcggaaacgaagccggagcagcgagcggggaaggtcccctaaacggctgacagacctcgacaaggcccagctgctggagattgcaaaagccaacgccgctgccatgtgcgctaaggccggcgtgccactgcccccgaacctgaagcctgctccgccccccaccattgaggaaaaggtagccaagaaatccggcggcgccaccatcgaggaattaactgagaaatgtaaacagatcgcccagtcaaaggaggatgacgacgtcattgtgaataagccacacgtgtcagatgaagaggaagaggagccgcccttctatcaccatcctttcaaactaagcgagccgaaaccaatcttcttcaacctgaacattgctgctgccaaaccaacccctcccaagtcccaggtcacactcacaaaggagttccccgtgtcttcgggctcacagcaccgcaagaaggaggcggattctgtgtatggtgaatgggtgcctgtcgagaaaaacggggaggagaataaggatgacgacaacgttttcagttcaaacctgcctagcgaggggcgcgtcaaaagacaggggagggtgagacgccagatgaagcagcccgcagcgtctcatttgaccgtaacccgatgcaattccctgtgcggcacaaagccacagagcgagaaacaccgcatagccgagaacagtgtcataacatccctcccaaatattggaccgagtctgcatttatgggaagggagtcccaggtacaattatctcgcttccagatttgcctccagactgtactcatctaggttctggtggtag

SEQ ID NO: 206515 - DNA, 7281 bp, synthetic construct
  misc_feature 1..7281: note = Description of Artificial Sequence: Synthetic coding sequence
  source 1..7281: mol_type = other DNA
atggccaccaacatcgagcagatcttccggagcttcgtggtgagcaaattccgggagattcagcaggaactcagcagcggacgaaatgaaggccaactgaatggagaaaccaatactcctatcgaggggaaccaagcaggggatgccgccgcttccgctagatctctgcctaacgaggaaatcgtacaaaagatcgaagaagtactatctggtgtgttagacacagagctaaggtataaacctgacctcaaagagggtagcaggaaaagcagatgtgtttccgtacaaactgaccctaccgacgagatacccactaagaaatccaaaaagcacaaaaagcataagaataaaaaaaaaaagaaaaaaaaagagaaagagaaaaagtataaaaggcagccggaagaaagcgagtccaagacgaaaagccacgatgacgggaacatcgatctcgaatctgattcctttctgaagtttgactcagaaccttccgcagttgccctggaattacccactagagcttttggcccatcggagacaaatgagagcccagctgttgtgctggaaccaccagtcgtgagcatggaggtgtcggagcctcacatccttgagaccctgaagcctgccaccaaaaccgctgaactctcagtcgtctctacttcggtgattagtgagcagtcagaacagtccgtggcagtcatgccagaaccttctatgactaaaatactggatagttttgccgccgctccagtccctacgacgaccctcgttctcaagagctccgagcccgtggtgaccatgagcgttgagtaccagatgaagtcagtgcttaagtctgtcgagagcacctcgcctgagccaagtaagattatgctagtcgagcccccggtggccaaggtattagagccttctgaaaccctcgtcgtgtctagtgagactccgaccgaggtgtatcctgagccttcgacctcgaccactatggattttcctgagagttccgccatcgaagcactgagactgcccgaacaacccgtggacgttccctccgaaattgctgactcaagcatgactcgtcctcaagagctcccagagctaccgaagacaaccgcccttgagctgcaggaatcatccgttgcttctgctatggaattaccgggcccaccggcgacctccatgcccgaacttcaggggccgcctgttacgcccgtgctcgaactccccgggccgtcagcgacaccagtaccggagctgccaggcccgctgtctactccggtgcccgagctccctggccccccagccactgcagttcccgagttaccgggtccgtcagtaacaccagtgccccaactctcacaggaacttcccgggcttcccgcccctagtatgggcttggagcctcctcaggaggtgcctgaaccccccgttatggcccaggaattgcccgggctgcccttggtaacagcggcagtggaactacccgaacagccagctgtaacggtagccatggagttgacagaacagccagtgacaactaccgaactggaacagcccgtgggaatgactacagtggagcatcctggccatcctgaggttactaccgcaaccggtctgctaggacagccagaggccaccatggtgctggagctccccggacagcccgtcgctacgactgcactggagcttcccgggcagccttcggtgaccggagttcctgagctaccaggcctgcccagcgcaacacgagccttagagctgtcagggcaacccgtcgcaacaggcgcactcgaactgcctggcccccttatggccgccggcgctctggaattctccggccagagtggggccgccggagcccttgagctgctcggccagcccctcgcaaccggcgtccttgagctgccaggtcagcctggcgcaccagaactgcctggtcaacccgtggctacagtggctctggagatctccgtgcagagtgtcgttactacctcagagctgtctacaatgaccgtttctcaatccctggaagtgcctagtaccactgccctggaatcttataacaccgtcgcacaggaactccccactacactggtgggggaaacttcagtcaccgtaggagttgacccacttatggcccccgagtcccacattctcgcaagcaatacgatggagactcacatcctggcctccaatactatggatagccaaatgctcgcatccaataccatggactctcaaatgctggcctccaataccatggactcacagatgctagcaagcagtacaatggactcccagatgctggctacttccagtatggacagccagatgttggcaacctccagcatggactcccagatgttggcgacatctacaatggacagccagatgctagccacatccagcatggactcgcagatgcttgccacttcttccatggattcccagatgctcgccaccagtagtatggattctcagatgcttgccacttcgtcaatggacagccagatgctcgccacgtccaccatggacagtcagatgcttgccacctccactatggacagccagatgcttgccacaagtagtatggatagccaaatgctagcatccgggacaatggattcccagatgctggcctcagggacaatggatgcccaaatgttggcatccggcaccatggacgcccagatgttggcctcaagcacccaggatagtgctatgctggggtctaagtcccctgatccatacaggctggcacaagacccttatcggctggcccaagacccctataggcttggacatgacccgtatcgtctcggccacgatgcgtaccgcctaggccaggacccctaccgattagggcacgatccatacagactgacccccgacccctacagaatgagcccaaggccctaccggatcgctccacggtcatacaggatagcccctaggccctacagactggccccacgacccctgatgttagcatcacgcagatctatgatgatgtcctatgccgcagagagaagcatgatgagttcctacgagagatctatgatgagttatgagcgatctatgatgtctcccatggcagaaaggtcaatgatgtcagcctatgagcgctccatgatgtcggcctatgaaagatccatgatgagcccaatggccgagcggtcaatgatgagcgcctacgagagaagcatgatgagcgcctacgagaggagtatgatgagcccaatggcagatcgcagtatgatgtcgatgggagccgaccggtcaatgatgtcttcctactctgcggccgacagatccatgatgtcttcatactcagctgccgatcggtccatgatgagctcctacactgctgaccggagtatgatgtccatggcagcagattcgtatacggactcttataccgatacctatacggaagcatatatggttcccccacttccacctgaggaacctccgaccatgcccccattgcccccagaggagccaccaatgactccacccctgccacctgaagagccacctgagggcccagccctcccaaccgagcagagcgcgctgaccgctgaaaatacttggcccaccgaagtaccatcctctccatctgaggaatccgtgtcccagccagagcctcccgtgtcacaatcagaaatcagcgagccttcagccgtccccaccgattacagtgtgtcagcttcagacccctctgtcctggtgtcagaagcagctgtaacggtgccagagcccccacctgaacccgagagtagcattactctcactccagtggaatcagccgtcgtagccgaggagcacgaggtcgtgcctgagcggcccgtcacatgtatggtgagtgagacccccgcgatgagcgccgagcctacagtgctggccagcgagcctccagttatgtcagagacagcagaaaccttcgactctatgagggcttcaggccatgtggcgtcagaggtgtccacctcccttctggtaccagccgtcacaaccccagtgctagcagagagcattctagagccccccgccatggcggcacccgaaagcagtgcgatggctgtgttggagtcctccgcagttactgttctagagtcctctaccgtcaccgtgctggagagctcaactgtcaccgttctggagccctcagtggtgaccgttcctgaacctccggtggttgccgagcctgactacgtgacgatccccgtgcctgtggtgtccgcccttgagcctagcgttcctgtcctagagcctgccgtaagcgtgctgcagccttccatgatcgtatctgagccctcggtttccgttcaggaatccacagtgacggtttcagaaccggcagtcacagtgtccgaacagacacaggtaattcctaccgaggtcgccattgagagtacaccaatgattctggaatcgagtatcatgtcttcacacgtaatgaagggcatcaacctgtcatctggtgatcaaaatttagccccagaaattgggatgcaggagattgctctgcattcaggagaggagccacatgctgaagagcatctaaaaggcgacttttacgaaagtgaacatggcatcaacattgacctaaacataaacaaccatctgattgcgaaggagatggagcacaatacagtatgtgcagcagggacaagcccggttggtgagataggcgaagagaaaatcctgccaacatccgagaccaagcagaggaccgtgttggacacgtaccccggggtatcagaggctgacgcgggggagaccctgtcctccactggccccttcgcgctcgagcccgatgctactggaacatcaaagggcatcgaatttactacagccagtactctctcgctcgtgaataaatatgatgtggatctgtccttaaccacccaggatactgaacacgatatggtgatttccacatcgccttctggcgggagcgaagctgatatagaaggccctcttcctgccaaagatattcacttggacttgccgtccaataataatctggtcagcaaggacaccgaggagcctctcccagtcaaggagagtgatcagacactggcggccctgttgagtcctaaagagtcatccggcggggagaaggaagttcctccccccccaaaggaaacgttgcctgatagcggattctccgccaacatcgaagacattaatgaagcagatcttgttcgtcccttgttgccaaaagatatggagagactgacatcactacgcgccggaattgagggcccattgttggcctccgacgtcggccgcgataggtctgcagcatcgccagtggtcagctccatgccagaacgggccagcgagagttcctcagaagagaaagatgactacgagatctttgtgaaggtcaaagacacacacgagaagagcaagaaaaataagaatagggacaagggtgaaaaggaaaagaagagagattcttctttgcgatctcggagcaaaagaagcaaatcctcagagcataagagccgcaagcgaacttccgagtcaagaagtcgagcgcggaaaagaagctctaaatcaaagtcccatcgctcgcaaacacggagccgctcccgatccaggcggaggcgccgctctagccgcagcaggtcaaaaagtagaggtaggcgatccgtcagtaaggaaaaacggaagaggtcacccaagcatcgctctaaatccagagagaggaagcgcaaaagatcaagctcacgcgataacagaaagacagtgcgggctaggtccagaacacccagtcggcgctcccgtagccacacccccagccgcagacggcggtcacgatctgtgggcaggaggcggtccttttccatttcaccttcacgaaggtcaagaactccatcccggaggagccgcaccccgtccagacggagtagaaccccatcgcggcgtagtcgcaccccctcccgccggtcccgtaccccgagcagaaggtctagaaccccttctcggaggagaagatcacgttcagtcgtgcgacggcggtcattcagcatctcacctgtgaggctcaggagaagtcgaacccccctcaggcgtagattctctcggtcaccgattcggagaaagaggagtcgttcttcagaaagaggaagatctccaaagagattgacggacttagacaaagcacagctgctcgagatcgccaaagcgaacgcggctgctatgtgtgccaaggccggggtaccactccctccgaatctaaagcccgcaccgccaccgacaattgaggaaaaggtggctaaaaaatccggcggcgctacaattgaagaacttaccgagaagtgcaaacaaatcgctcaaagtaaggaggacgacgatgttattgtgaataaaccccacgtcagcgacgaggaggaagaggagccacccttttatcaccacccatttaaactcagtgagcctaaacccatctttttcaacctgaatatagcggctgcaaagcccacaccccctaaatcacaagtcactctgaccaaagagtttcccgtcagtagtggctcacagcaccgtaaaaaggaggcggactcagtatacggggaatgggtccccgtggagaagaacggcgaggaaaacaaagacgatgacaacgtgttttcttcgaatttgccaagcgaacccgtggacattagcacagccatgtccgagcgggctctggcccagaagagattgagcgagaatgccttcgatttggaggctatgtcaatgctgaacagagcacaagaaaggattgacgcttgggcgcagttgaacagcattcccggccaattcactgggtcaacaggcgtccaggtgttaacccaggaacagttggcgaataccggggcgcaggcatggatcaagaaggatcagttcttacgtgcagcccccgtgaccggcggcatgggcgccgtcctgatgcggaagatggggtggagggagggcgagggcctgggaaaaaacaaggaagggaacaaggaaccaattctcgttgacttcaaaacagaccgtaagggcctcgttgctgtgggagaacgagcacagaagagaagcggcaatttttcagctgctatgaaggaccttagtgggaagcatcctgtgagcgcattgatggagatctgcaataaaagacgctggcaacctcctgaatttcttctcgtgcacgacagcggtcccgatcatcggaaacattttctgttcagagtcctgagaaacggggccctgacacggcccaattgtatgttctttctgaaccggtattag

SEQ ID NO: 206516 - DNA, 1584 bp, synthetic construct
  misc_feature 1..1584: note = Description of Artificial Sequence: Synthetic coding sequence
  source 1..1584: mol_type = other DNA
atggcccccgagcggctgcggagccgggccctgagcgccttcaagcttcggggcctgctgctgagaggcgaggctataaaatacttgacagaagctttgcagtctattagtgagctggaattagaggacaagttagagaagatcattaacgcagtggagaaacagcctctgagtagtaatatgattgagcgatctgtcgtagaagccgccgttcaagagtgttctcagagtgttgacgagaccattgagcatgtctttaacatcatcggggcctttgacattccccggttcgtttataattcagaacggaagaagttcttacccctgctcatgacaaaccatccagcccccaatttgttcggaaccccaagagataaggcagagatgtttcgggagcgatataccatcttgcatcagaggacccacaggcatgagctcttcacccctccggtgattgggtctcacccggatgaatccgggagcaagttccaactgaagactatagagactcttctgggatcaaccactaagatcggtgatgcgatcgttctgggaatgatcactcagctgaaggagggaaaattcttcctggaggacccgaccggcacagtccagcttgatctgtctaaggctcaattccacagcggactctataccgaggcttgctttgttcttgctgaaggttggttcgaagaccaggtctttcacgtgaacgcattcgggttcccaccaaccgaaccctcctctaccacgcgagcttactatggaaacatcaatttttttggtggcccttccaataccagcgtcaaaactagtgctaagttaaagcagttggaggaggagaacaaagacgccatgtttgtgttcttgagcgatgtgtggctggatcaggtggaggttctggagaagttacgaataatgttcgctggctactcacccgcgccccctacctgctttatcctttgtgggaatttctcttctgcgccatacggcaaaaaccaggtgcaggctctgaaagattctctgaagacactggcggacattatatgtgagtaccctgacattcaccagagctcgcggttcgtgtttgtccccggccctgaggatccaggtttcggctcaattcttccacggcctcctttggcagaatcaatcaccaacgagtttagacagcgcgtgccattctcagtgtttaccactaacccctgtagaatccaatattgtacacaggagattacagtgttcagagaggatcttgtcaacaagatgtgccgcaactgcgtgcgctttccttcgtctaatctcgctattccaaaccatttcgttaagaccattttgagccagggccacctcactcccttgcccctctatgtgtgccccgtctattgggcctatgactatgcattgagggtttatccagtgccagatctactggtgattgcagataagtacgacccgtttactacgacaaacacagagtgtttatgcatcaacccaggctccttccccagatcaggattttccttcaaggtgttttacccaagcaacaagacagtggaggactctaagctccagggcttctag

SEQ ID NO: 206517 - DNA, 3900 bp, synthetic construct
  misc_feature 1..3900: note = Description of Artificial Sequence: Synthetic coding sequence
  source 1..3900: mol_type = other DNA
atgcagcaggccccccagccctacgagttcttcagcgaggagaactcacctaagtggcggggtttgctggtgtctgctttgcgtaaagtacaagaacaggtgcatcccacactatctgcaaacgaagagtccctgtactacatcgaggagctgatcttccagctactcaacaagctatgcatggctcagcctcgaacagtccaggacgtggaggagagggttcaaaaaactttcccgcacccgatagacaagtgggccatagctgacgcccagtcagctattgaaaaacgtaagcggaggaacccccttctgctgcccgtcgacaagattcatccatcactaaaggaggtgctaggctacaaagtggattaccatgtgtccttgtacattgttgccgtacttgaatacattagcgctgacattctcaaactcgctggtaattacgtctttaatataagacattacgagatctcgcagcaagatattaaggtgtcgatgtgcgcagacaaagtgttaatggatatgtttgaccaggacgacattggactcgtgagtttgtgtgaagatgagccttcgagctccggtgagctcaactattatgaccttgtcaggactgagatagcagaagagagacaatatttgcgggaactgaatatgatcattaaggtgttcagagaggcattcctcagtgatcgaaagcttttcaaacctagcgatatcgagaagatcttttctaatattagtgacatccatgagctcactgtcaagctactaggcctgattgaagatacggtagagatgactgacgaatcctcaccccatccacttgccggaagctgcttcgaagatctggccgaagagcaagcgttcgacccgtacgaaactttgtcacaggacatactctcacccgagtttcatgagcacttcaacaagctgatggccaggccagctgtggcgctgcacttccagcaattgaaggcttgttcagaggaacaggaagaccgtgaatgcctgaaccaagcgattaccgctctaatgaacctgcaggggagtatggatcgcatatacaaacaatattctcccagacggcggcccggggacccggtctgtcccttttacagtcatcagctccgtagcaagcacctcgccataaaaaagatgaatgaaatccagaagaatattgatggctgggaaggcaaggatatcgggcagtgttgcaatgagttcattatggaaggccccctgacccgtatcggagcaaaacatgaaagacatattttcctgttcgacggacttatgatttcatgtaaacctaaccatgggcagacccgtctgcctgggtattctagtgcagagtatagactaaaagagaaattcgtgatgaggaagattcagatttgcgataaggaggacacatgcgaacataagcatgcattcgagttagtgtctaaggatgagaactcgattatttttgcggcaaaatccgcggaggagaaaaacaactggatggccgcactgatttctttacattacagatctaccttggatcgtatgctcgattccgtcctcctgaaggaagagaacgagcagcctttgcggttgcctagccctgaagtctacaggtttgtggtgaaggattctgaagaaaatatagttttcgaggataatctgcagtctcgatctggcattccaatcattaagggcggcacagtggtcaagctgatcgagagactgacttaccatatgtatgctgaccccaacttcgttcgcacgttcttgactacataccgatctttctgcaagcctcaggagctgttgagtttgttaatcgagcgctttgaaatacccgagcccgaacccacggatgcagacaagctcgccatcgagaaaggggagcagccaatcagtgcggatctaaaacggttccggaaagagtacgtccagccggtgcagcttagaattttaaatgttttccgacactgggtcgagcaccacttttatgatttcgagcgggacttggaattacttgagaggcttgagagctttatctcgtccgtacgtggaaaggccatgaaaaaatgggtggaatcaattgccaaaattatccggcggaagaagcaggctcaagccaacggagtcagccacaacataacattcgagagccctccccctcccattgagtggcatatctcaaagcctggccaatttgaaacgttcgatttgatgactctgcacccaatcgaaattgctcggcagcttaccctgctagagtctgacctctatcgcaaagtacagccctctgagcttgtcggatccgtgtggacaaaggaggataaggaaattaactcacccaatctgctcaagatgattcgacacaccacaaatctgacactttggttcgagaaatgtattgtcgaggctgaaaattttgaggagagggtcgccgttctctccaggatcattgaaatacttcaggtgttccaggacctgaacaactttaacggcgtgctcgagatcgtctctgccgtaaattccgtgtccgtgtacaggctggatcatacattcgaagccctgcaggaacgaaagcgaaaaatcctggatgaagcagttgaactgtcacaggatcatttcaagaagtacctggtcaagctaaaatctataaatccaccgtgcgttccttttttcgggatctacctcacaaatattctcaagaccgaggaagggaacaacgacttcctgaaaaagaagggcaaggatcttatcaatttctccaagagaaggaaagtggccgaaatcactggcgagattcaacaataccagaatcagccatattgcttgcggattgagcccgatatgcgacgatttttcgagaacctcaatcccatggggtccgctagtgagaaagagttcacagattatctttttaataagtctctggaaatcgaaccccggaattgcaaacaacctccaagattcccccggaagtcaaccttctcactcaagtcccccgggattaggccaaacaccgggcgtcatggctccacaagcggcacgttgagaggtcaccctacgccacttgaaagagaaccctgtaaaatctccttctctcgcattgccgaaacagagttggaaagtacggtgtccgcccccactagtccaaacaccccgtcaacacccccagtgagcgcgtctagtgatctttccgtcttcttggatgttgacctgaacagctcttgtggtagcaattctatcttcgcaccggtcttactgcctcacagtaaatcttttttttctagctgtgggagccttcacaagctatccgaagaaccacttattccccccccccttcctccacggaagaagttcgatcatgatgccagcaattcgaaaggcaatatgaaaagcgacgatgatccgcctgctatccccccacgtcagcctcctcctcctaaggttaaacccagggtccctgttccaacaggcgcgttcgatggacccctccacagcccgccaccacctccaccacgcgacccacttccggatactccaccccctgttccacttagaccccctgagcactttatcaattgtccttttaatcttcagcccccgcctcttggtcacctgcacagggactcagactggttaagggatatctcgacctgcccgaattcaccctctacccctcctagcactccatcccctcgtgtgcctcgcaggtgctacgtgctttcaagtagccaaaacaacctcgcgcatcctcctgcccctccggtgccgccgcgacaaaattctagtcctcatctccccaagcttccaccaaaaacgtacaaaagggagcttagccaccctcccttgtataggctccccctgctggaaaatgctgaaacaccccaatag

SEQ ID NO: 206518 - DNA, 1389 bp, synthetic construct
  misc_feature 1..1389: note = Description of Artificial Sequence: Synthetic coding sequence
  source 1..1389: mol_type = other DNA
atgctgctgctggcccggtgcctgctgctggtgctggtgagcagcctgctggtgtgctctgggttggcttgcggtccaggcaggggtttcggcaagcgaaggcacccaaagaaactcacccctctggcttacaaacagttcatccctaacgtggccgagaaaacccttggtgcctctggcagatatgagggcaagatttccagaaattcagaaagattcaaggagttgaccccaaactacaacccagacataatattcaaggatgaggagaacactggcgcagatcgactgatgacccagcgatgtaaggacaaattgaacgcattagcaattagcgtgatgaatcagtggcccggtgtgaaattacgcgtcacggagggctgggacgaggacggccatcactcagaagaaagtttgcactacgaagggcgggccgtggacattactacgtctgatcgcgaccgctccaagtacggcatgcttgcgcggcttgcagtggaggccgggttcgactgggtctattacgaaagcaaagctcacatccactgctccgttaaagccgagaactcggtagccgctaaatccggcgggtgtttccccggcagtgctaccgtccacctggagcagggcggtaccaagctggtgaaggacctgtcccccggagacagggtgctggccgccgacgatcagggacggctgttatactcggactttcttactttcctcgaccgggatgatggcgctaaaaaagtgttttatgtgattgagaccagggaacctagggagcggttgttgctgaccgcggcccatctccttttcgtggcgccccacaacgacagtgcaactggcgaacccgaagcctcctcagggagcggacctccttctggcggcgctctgggacctagggccttattcgcttctagagtcaggcccggacagcgcgtctatgtggttgccgaacgggatggcgatagaagattgctacctgctgccgtccactctgtgactctgagcgaagaagctgctggtgcgtatgccccccttacagcacaagggactatcctaattaatcgggttttagccagttgttacgctgtcattgaagaacactcctgggctcatagagcgttcgcgcccttcaggttagcccatgccctgctggccgccttggcccccgcccgcaccgaccgcggaggcgacagcggaggaggcgatcgtggaggggggggagggagggtggcgctcactgcaccaggcgctgcggatgctccgggcgccggagcaactgcaggcattcactggtattcccagctgctgtatcagattggtacttggcttttggatagcgaggcactccacccgcttggaatggcagtaaagtctagctag

SEQ ID NO: 206519 - DNA, 3456 bp, synthetic construct
  misc_feature 1..3456: note = Description of Artificial Sequence: Synthetic coding sequence
  source 1..3456: mol_type = other DNA
atgagcagcgagtgcgacggcggcagcaaggccgtgatgaacggcttggcacccgggtccaatggacaggacaaagctaccgccgacccgctgcgagctcggtctatcagtgccgtcaagataatacccgtgaagacagtgaaaaatgcttctggcctcgtgctgccgacagatatggacctcaccaagatctgtacagggaagggcgccgttaccctgcgggcctcgagctcgtacagggaaaccccatcatcatcccctgccagtcctcaggagacccgtcaacatgagagcaaacccggcctggagcctgagccaagctccgctgatgaatggagactctcaagctcagcagacgccaacggaaacgcacaaccttcttccttagctgccaaggggtatcgttcagtacaccctaacttgcctagtgacaaatcacaggacgcgaccagcagcagcgccgcgcagcctgaggttattgtggtccctctttatctggtcaataccgacaggggacaggaaggtaccgctagaccacccaccccgttgggaccactaggttgtgtacctactattcccgctactgcttcagcggcatcccctctcactttcccgacactagacgactttattcccccccatttgcaacgatggccccaccatagtcagcccgcgcgtgcctctgggtcttttgcccccatcagccagacaccaccatcctttagtcctccgcctcctctcgtgccacccgcgccagaagacttaagaagggtgagcgagccggacttaacaggggccgtgtcgtccaccgatagttcacctcttcttaatgaagttagcagtagcttgattgggaccgactcacaggctttccctagtgtatccaagccctcctctgcctatccctccacaacgatcgtcaaccctacaatcgtgcttctgcaacacaaccgggagcaacagaaaaggctcagttctcttagcgacccagtatctgaaaggcgcgtgggcgaacaagactccgccccgacacaggagaagccaacttcccccggcaaagccatcgaaaaacgggccaaggatgatagccggcgggtggtgaagtccacgcaggatctctctgacgtctccatggacgaagttggaattcctctccgcaatacagaaaggagcaaagactggtacaagactatgttcaaacagatccacaaactgaatcgcgatacaccagaggagaatccctattttccgacctataagttccccgaactacccgaaattcagcagacctccgaggagacaaagagctgtagtgttatgtccccccgcctggaatgtagcggaaccgtgatagcacactgtagcctcaagcttctggactcaagcaacccccctactagtgcctcgcaggtggctggcacagccgacgacgactcagacctctattcacctcgttatagcttttcagaggacaccaagtctcccctgagtgtgcctagatcaaagtctgagatgagctacatagatggagaaaaggtggtaaagcgatccgccacgttacccctgccggctcgctcaagttccttaaaatcaagtagtgaaagaaatgactgggagccccccgacaagaaagtggacactcgcaaatatagggcagagccaaaaagcatctacgagtatcaacccggaaaatctagtgtgctgacaaacgagaagatgagccgcgatatatccccggaagagattgatcttaaaaatgagccttggtacaaatttttctctgaactcgaatttggcaagcccccacccaagaaaatttgggactacacccccggggactgtagtatactcccccgggaggatcgcaaaaccaacctggataaagaccttagtttatgtcaaaccgagttggaggcagatttagaaaagatggagacccttaataaagcgccctctgcgaacgtcccacagagctccgccattagcccgacaccggagatttccagcgagacaccagggtacatctatagttcaaattttcacgcagttaaacgggagtcggatggggctcccggggacctaacatctttagaaaatgagcggcagatatataagagcgttctagagggtggcgatattcctctccagggcctgtccgggctgaagagaccaagctcctctgccagcaccaaggattcggagtctcccaggcacttcattccagccgactatctcgagagtaccgaggaattcatcaggagaagacacgatgataaggagaagctcctggctgaccagcgtcggctgaaacgagagcaagaagaggcagatatcgccgccaggaggcatacaggggtcattccaacacaccatcaattcatcactaacgaacgattcggcgatctgttaaacatagatgataccgctaaacgaaaatcaggatccgaaatgaggccagctagggccaagtttgatttcaaagcgcaaacattaaaagagcttcccctgcagaagggagatatcgtctatatttacaaacagattgaccagaactggtacgaaggagagcaccatggcagggtcgggatatttcctcgcacatacattgaattgcttccgcctgctgagaaagcccagccaaagaaacttactccagtgcaggtattagagtacggggaggctatcgctaagtttaattttaacggcgacactcaagttgagatgtcatttcggaagggggagagaattaccctgctgcgacaggtggatgaaaattggtatgaaggccgaatccctggcacatcccgccagggtatttttccaattacgtacgtcgacgtgatcaagcgcccactggtcaaaaatcccgtggactacatggacctcccattctcttcctcccctagccgttctgccacggcctctccacaaccctggcgcgaggagagcggtcagtacgagcgcaaagctgagcgcggagccggcgaaagaggacctgggggtcctaagatctcaaagaaatcatgcctgaagccttctgacgtggttagatgcctctccactgagcagcgcttgtccgatctgaataccccagaggagagccgacccggtaaaccactcggtagcgcattcccaggcagtgaagcagagcaaacggagaggcaccgcggcggagagcaagcagggcgcaaggcagctaggaggggaggatcccagcaaccccaggcgcagcaacggcgagtgacccctgaccgttcccagacttcgcaggacctgttctcataccaagctttgtactcttacataccacaaaatgatgatgaactggagctgcgcgatggggatattgtggacgtgatggaaaagtgtgatgatgggtggtttgtgggaacttcccgcagaacaaagcagtttggcactttccccggtaactacgtaaaacccctgtacctttag

SEQ ID NO: 206520 - DNA, 2346 bp, synthetic construct
  misc_feature 1..2346: note = Description of Artificial Sequence: Synthetic coding sequence
  source 1..2346: mol_type = other DNA
atgagcagcgagtgcgacggcggcagcaaggccgtgatgaacggcctcgcgccaggcagtaatgggcaagacaaggcgacggcagatccactgcgggctcgttccatcagcgctgtgaagattatcccagtgaagacagttaagaacgcatcaggcctagtgctgccgaccgatatggatctgactaagatctgtactggaaagggagccgtcacactgcgcgcctctagctcttaccgtgagaccccttccagctcccccgcgagccctcaagagactcgtcagcatgagtctaagccaggcctagagcccgaaccatccagcgcggacgagtggaggctctccagttccgccgacgctaacgggaacgcccagcctagttccctggctgccaagggctaccgatcggtccaccccaatttaccatccgataaatcacaggacagttctcccctgttgaacgaggtaagcagctccctgataggcactgattcccaggcttttccatcagtcagcaaaccttcctctgcatatccatctactactatcgtgaatccaacaatagtgctgctgcaacacaacagagagcagcagaaacggctttcctcactgagtgacccggtttctgagaggcgcgtgggtgaacaagacagtgcacccacacaggagaaacccacttctcccggaaaagctattgagaagagagcaaaggacgacagtaggagagtggtaaaatctacccaggacctcagcgacgtgtctatggacgaggtaggcattccattgcggaatacggagagaagcaaggactggtacaagactatgttcaagcaaattcacaagcttaatcgggatgatgacagcgatctgtacagccccaggtatagtttctcagaagatactaaatctccactgtctgtgccccgtagcaaatctgagatgagctacattgacggagaaaaggtggtcaagcgtagtgctacactaccactgccagccagaagcagctctttaaaaagtagcagcgagcgaaacgactgggaaccacctgacaagaaagtggatacaagaaagtaccgcgcagaacccaaatcaatctacgaataccagcccggcaagtcaagtgttctcactaatgaaaagatgagcagcgctatttctcccactccagaaatttcctcagagaccccgggatatatttattcctcaaatttccacgctgtcaagcgcgaatcagacggcgctccaggtgacctcacttctctggagaacgaacgtcaaatctacaagtctgtactagagggcggcgatattcccctccaggggttgtctggactgaagcggcccagcagcagtgccagcactaaagactccgaatcaccgagacacttcatccctgccgactacctcgaaagtactgaagagtttattagacggcggcacgatgataaggagaaattgctagccgatcaacgccgcctgaaaagagaacaagaggaagctgacatcgcagctcgtaggcacacgggagtgatccctacacaccaccagttcataacaaatgaaaggtttggtgatttgctcaatattgacgatactgctaaaagaaaatctggcagtgaaatgaggccagcaagagccaaattcgacttcaaggcccaaaccctgaaagagctgccgctacaaaaaggcgatatagtatatatctataaacaaatcgaccagaactggtacgagggcgaacaccatggaagagtgggcatattcccccgcacttacatcgagcttctgccacctgcggagaaggctcaaccaaagaagctcactcccgtgcaggtgctcgaatacggggaagctatagccaaattcaatttcaatggggacacacaggtggaaatgtctttcagaaagggagagcggatcacactcctgcgccaggtggacgagaactggtatgagggacgcatccccggcactagcagacagggcatcttcccaattacgtacgtggatgtgatcaagcgacctcttgtgaagaatcctgtcgactatatggacctgcccttttcctcatccccctcaaggagcgctaccgcctccccgcaacagcctcaagcacaacagaggcgagtgacgcccgatcggtcacaaacaagccaggatctgttttcctaccaggctctatacagttacatcccacagaatgatgatgagctcgagctgagggatggggacatagttgatgtgatggaaaaatgcgacgacggctggttcgtgggtacttccagaaggacaaagcagtttgggacttttccaggaaattatgttaagcctctgtacttatag

SEQ ID NO: 206521 - DNA, 2541 bp, synthetic construct
  misc_feature 1..2541: note = Description of Artificial Sequence: Synthetic coding sequence
  source 1..2541: mol_type = other DNA
atgagcagcgagtgcgacggcggcagcaaggccgtgatgaacggcttggcgcccggcagtaacggacaggacaaggcaacggccgacccacttcgagcacggtccatctccgccgtgaagatcatcccagttaagactgtcaagaacgcctcaggcctggtgctgccgacggatatggatctgacaaagatctgcaccggaaaaggagcggtgactctgagggcctcgagcagttacagagaaacaccctctagctcacctgcttcgccccaggaaactagacagcatgaatctaaacctgatgaatggcgtctctcctcttcagccgatgctaacggtaatgcccaaccctcctcactggccgccaaaggctaccggtcagtgcatcccaatttgcctagcgataagtctcaggactctagtccactgttaaacgaagtttccagctccttaattgggactgattctcaggcttttcctagcgtcagcaaacccagcagcgcgtatcctagcacaacaattgtcaatccgaccattgtgctgttgcagcataatcgggagcagcaaaaaagactgagcagcctttcggatccagtctccgagcggcgagtcggggagcaggactccgctccgacacaggaaaagccaacctcccctgggaaagctatcgagaaacgcgccaaagatgacagtagaagggtcgtaaaaagtacccaagacctgtccgacgtgagcatggacgaagtgggtattccactgagaaatactgagaggtctaaggactggtataagaccatgttcaagcagattcacaagctcaatcgagatacgcccgaggaaaatccgtacttccccacttacaagttcccagaactccctgaaatccagcagacctcggaagaggacaacccatatactcctacttatcaatttccggcctctactccaagccctaaaagcgaggatgacgactccgacctgtacagtcctcgatacagcttctcagaggataccaaatcgccactttctgtgccccggagcaaatcggagatgtcatatatagacggggagaaggtggttaaacggagtgctacccttccacttccagcaaggagctcttctctgaaaagtagttccgagcggaatgattgggagccccctgataagaaagtagacactaggaaatacagggcggagcctaagtcgatatacgagtaccagcctgggaaaagctcggtactgaccaacgaaaagatgagtcgggacatcagccccgaggagatagacctcaaaaacgagccttggtacaaatttttcagcgagcttgaatttggaaaaccctcaagtgccatctctcccacaccagagattagctcagaaaccccaggctatatttattctagcaactttcatgcagttaaaagggagtccgacggtgcccccggggacctgacaagcctggagaacgaaagacagatctacaagtcagtgctggagggcggcgacatacctctgcagggcctgagcgggctgaaaagacctagcagcagcgcaagcaccaaggattcagagtctccacggcattttatccctgcagactacctcgagtcaacagaagaattcatacgccgtcgacatgatgacaaggaaaagctgctggctgaccaacgcaggctcaagagagaacaggaggaggccgacattgcagccagaaggcacaccggggtaatacctactcaccaccagttcattaccaatgaaagattcggcgacttgctcaatatcgacgacacggccaagcgaaaatccggatccgaaatgcggccggccagggcaaagttcgacttcaaggcacaaaccttgaaagaattaccccttcaaaagggcgatatcgtgtacatttacaagcagattgatcagaattggtatgaaggagaacaccatggcagggtgggcatcttccctcgcacctatatcgaacttctccctcctgctgaaaaggcccagcccaagaagcttacgccagtgcaggtgctagagtatggcgaagccattgcaaagtttaacttcaatggcgacacccaagtcgagatgagtttcaggaagggggagaggattacactactgaggcaggttgacgaaaactggtatgaggggcgcatcccgggcacctctcgccagggaatttttccgatcacctatgtagatgtgatcaaacgacctctagtcaaaaaccctgtggactatatggacctgcccttctctagctcaccttcaagaagcgccacagcaagtccccagcagccacaagcccaacagagacgggtcacacccgatcgcagccagacaagccaggacctgttctcatatcaggccctctactcttacattccgcagaatgacgacgaattagaattacgggacggagacatcgtggacgtgatggaaaagtgcgacgatgggtggttcgtggggacaagtagaaggacgaaacagtttggtacatttccaggcaattatgtgaaacctctttatctctag

SEQ ID NO: 206522 - DNA, 2718 bp, synthetic construct
  misc_feature 1..2718: note = Description of Artificial Sequence: Synthetic coding sequence
  source 1..2718: mol_type = other DNA
atgagcagcgagtgcgacggcggcagcaaggccgtgatgaacggcttagcgcctggctcgaacggacaggacaaggctaccgctgatccgctcagagccagaagcatctcagccgtgaaaattattcctgtcaagaccgtcaaaaatgcatcaggactggttttgcctacagacatggacctcacaaagatctgtacaggcaagggcgcagttaccctgcgcgctagctcgtcttacagagagaccccctctagtagccctgcatctccccaagaaactaggcaacacgagtccaagccaggcctagagcccgagccctcaagcgccgatgagtggcgcctatctagttctgcagacgccaacggtaacgctcagccaagctcactggcagccaagggatatcgatccgtccaccccaacctgcccagcgacaagagtcaacgttggccacatcattcacaacccgccagagcttctggctcctttgcccccatctcccaaactccgccctcattcagtccccccccgcctcttgtgccccctgcccccgaagacctgagacgggtgagcgaacctgacttgaccggggccgtctctagtaccgactcttcgcctctgttaaacgaagtctcaagcagcctgattggtaccgactcccaggcttttccctcagtgtcaaaaccctcttccgcctacccttcaacgactatcgtcaaccctactatagtgctgctgcagcacaacagagaacagcagaagcggttgtcttctctgtccgacccagtgtctgagagaagggtgggtgaacaggattcagcgccgacacaagagaagcccacttcgcctgggaaagcaatcgagaaacgcgccaaagatgattccagacgcgtggttaagtcgactcaggatctttcggacgtgagcatggatgaagtgggaattcccctgagaaatacagagcgaagtaaagactggtataagacgatgtttaagcagattcacaaacttaatagggatgatgatagcgatctctatagcccccgttacagcttttcagaggacacaaaaagtccgctgtctgtgccccgtagcaaaagcgagatgagctacatcgacggcgagaaagtcgtgaaaaggtctgcaacattaccgctcccggcccggtccagctcactgaagtcatcctcggagaggaatgactgggagcccccagacaaaaaggtggatacgcggaaataccgagcggagccaaagagcatctacgagtaccagcccgggaaatccagcgttctgactaacgaaaaaatgtcaagggatatctcccctgaggaaattgacttaaagaatgagccatggtataaattcttcagtgagttagagttcggcaagcctccacccaaaaaaatttgggattacacccccggcgactgcagcatcctacctcgtgaagataggaaatccagcgcaatttcccccacaccggaaatctcttctgagaccccggggtatatttacagcagcaattttcatgctgtgaaaagggaaagcgatggcgcccccggggatctgacctccctggagaatgaaaggcagatatacaagagtgtcctggaggggggtgacatacccttgcagggactctcaggcctgaagaggcctagcagctcagcgtccaccaaggattccgaaagtccaagacatttcataccggctgattatctagagtcaacagaagagttcatccggcggcggcacgatgataaagaaaagttgctggccgaccagcgcagactcaagcgagaacaggaggaagcggatattgccgcgagaaggcacaccggagtgatcccaacgcatcaccaatttattacgaatgaacgctttggtgatttgttaaacatcgacgatacagccaagaggaaatcggggtctgagatgcggcctgccagagccaagtttgatttcaaggcgcagacactcaaggaactcccactgcagaagggggatattgtttacatttacaagcaaatagatcaaaattggtatgagggcgaacaccacgggcgcgttggcatttttccaagaacttatatcgagttgctaccacctgccgagaaagcgcagcctaaaaagctaactccagtgcaggtcctggaatatggggaggccatcgccaagttcaacttcaacggagacactcaggttgagatgtcatttcggaagggcgaacggatcaccctcctccgccaagtggacgagaattggtacgaaggaaggatccccggaacgtctcggcaggggatttttcccattacttatgtagatgttatcaagcgcccactggttaagaatccagtggactatatggacttacccttttcttcctcacctagcaggagcgccacggcttcacctcagctatctcaccattctcttagagccggacctgaccttaccgagagcgagaagagctacgtacagccccaggctcagcagagaagagtaacgccagatcggtcccagacgtctcaggatctgtttagctaccaagctctctatagctatatcccgcagaatgatgatgagctggaattaagggacggcgacatcgtggatgttatggagaagtgcgacgacggctggttcgtgggaacaagccggcggacgaaacagttcggtaccttcccaggtaactatgtgaagcccctctacctttag

SEQ ID NO: 206523 - DNA, 3015 bp, synthetic construct
  misc_feature 1..3015: note = Description of Artificial Sequence: Synthetic coding sequence
  source 1..3015: mol_type = other DNA
atgagcagcgagtgcgacggcggcagcaaggccgtgatgaacggcctcgcacccggctccaacgggcaggacaaggccacagcagaccccctccgggccagatccatcagtgccgtgaaaatcatcccggtgaagacagtcaaaaatgccagtggattggttctccctacggatatggacctaacgaaaatctgtactggcaaaggagccgtcactttgagggcttcctctagctacagggaaacccctagtagctctcccgctagcccgcaggagacccgccagcacgagtcaaagccagacgaatggcggctgtccagctcagcagacgcaaatggcaacgctcagcccagtagtttggcagccaaagggtacaggtcagtccaccccaacctccctagcgacaaatcacaggacgccacctcctctagcgccgctcagcccgaggttatcgtggtacccctgtacctagtaaacaccgataggggacaggagggcactgcccgaccaccaacccccttagggccactaggttgcgtgcctactatcccagctaccgcaagcgctgcatccccacttacatttccaaccttggacgatttcatacctccgcacttgcagcggtggccccaccactcacaacccgcccgagcatccggtagcttcgcccccatatcacagactccaccttctttctcccccccgcctcccttggttcccccagcccctgaggacctgagacgagtcagcgagccagacctgacgggggccgtgtcatccaccgattcgtctccactactgaacgaggtgagtagtagcctcatcggaacagattcacaagccttccccagtgtgtcgaagccaagttccgcctacccatccacaacaattgtgaatcccaccattgttctcctccagcataatcgcgaacagcagaagcggttgagttctctttcagatccggtgtcagaacgacgcgtgggcgaacaggattctgcgccgacacaggagaagcccacttcacctggaaaggccatcgagaaaagagccaaagacgacagcaggcgcgttgtgaaatctacgcaggatttgtctgacgtgtccatggacgaagttggtatccctctgaggaacacagaacgtagcaaagactggtacaagacgatgtttaagcagatccacaaactgaacagggatacccctgaagaaaacccttacttccctacctacaagtttcccgagctgcctgagatccaacaaacctctgaggacgatgactcagacctgtattcgcccagatattctttcagcgaggacactaaaagcccattatccgtgcctcggtccaaatctgagatgtcctacatcgatggtgagaaagtggtgaaacggagcgccactctcccccttcctgcgcgaagctcctcccttaaatccagctccgagaggaatgattgggagcctccagacaagaaagtggacacacgcaagtatcgggctgaacccaaatccatttacgagtatcagccaggtaagagctccgtgctgactaatgaaaaaatgtcccgggacatctcccctgaggaaatcgacctcaaaaacgagccatggtacaaatttttttcagagctagaattcggaaagccgccccctaaaaaaatctgggattatacccctggagactgttcaatcctgccacgcgaggataggaagacaaacctggataaggatctgtccctctgtcagactgagctagaagccgatctggagaagatggaaaccctgaacaaagcccccagcgccaatgtcccacagtcctctgctattagtccaacacccgaaataagcagtgagacacccggatatatttatagtagcaacttccacgccgtcaagcgagaaagcgatggcgcccccggcgacctcacttcactggaaaatgagcgccagatctataaaagtgtccttgagggcggggacattcccctccagggcctcagtggactcaagaggcccagctcttctgcctcgacgaaagactctgagtccccccggcacttcatcccagctgattacctggaaagcacagaggagttcattcggaggcgacacgatgataaagaaaagctgctcgccgaccaacgcaggctcaagagggagcaggaggaggcagacattgccgcacgaaggcacacaggtgtgattccaactcaccaccagttcatcaccaacgaaagatttggagacctgctgaacatagacgatacagccaaacggaaatctggttctgaaatgcgcccagcaagagcaaagtttgacttcaaggcccaaaccctaaaggagttgccgctccaaaagggggacattgtctacatttataaacagatagaccagaactggtacgagggcgagcaccacggacgggtgggaatcttcccacggacctacattgagctgttgccacccgccgagaaagcacagcccaaaaagctaacacccgttcaagtcctggaatacggtgaggccatcgctaagttcaatttcaatggtgacactcaggtggagatgtccttccggaagggggagcgtattacactgctgaggcaggtagatgagaactggtacgagggaagaattccaggcacctctcgacaagggatcttcccgattacctatgttgacgtcattaaacgccccctggtgaaaaaccccgtggattatatggacctgcctttctctagcagcccatctagaagcgccactgcatcaccgcagcaacctcaggctcagcagcgtagagttactcccgaccggagccagacaagtcaggatctgttctcatatcaagctctgtactcttacatcccgcagaacgacgacgaactggaacttcgcgacggcgacatagtcgacgttatggaaaagtgcgatgacggctggttcgtgggaacttcccgccggaccaaacagttcggtacatttcctgggaactacgtgaagccattgtacttatag

SEQ ID NO: 206524 - DNA, 3879 bp, synthetic construct
  misc_feature 1..3879: note = Description of Artificial Sequence: Synthetic coding sequence
  source 1..3879: mol_type = other DNA
atgagcagcgagtgcgacggcggcagcaaggccgtgatgaacggcctggcaccaggctccaacggccaggataaagccactgccgatccattgcgagcccgatcaatctcagccgtgaaaattatcccagtcaagaccgtgaaaaatgcatctggattagtgctacccaccgacatggacctcaccaagatctgtactgggaaaggagccgttaccctcagagccagcagtagctaccgcgaaaccccaagcagttccccagcctctccccaagagacccgccagcatgagagcaagcctgggttggaaccagagccaagtagtgcagacgaatggagactgagttccagcgccgacgcaaacggtaacgcccagccttccagtctggccgctaaaggttatcgatctgtccatccgaatctgccatcagataagagccaggatgccacaagttcttctgccgcccagcctgaggtaatcgtcgtccccctgtacttggtgaacacggacagaggacaggaagggaccgctcggcccccaacacccctgggccctttgggctgcgtgcctacgatccccgctacagcctccgctgcttcacccctcacatttcccaccctggacgacttcattccgccacacctacaacgttggccccaccacagccagccggccagggcctccggcagctttgcacccatctcgcaaaccccgccaagtttcagtccccccccccctctggtgccccctgcacccgaagatctgcgaagagtgagcgaaccggatctcaccggggccgtgagttctaccgacagctcccccctcctcaacgaagtgtctagctctttaattggtactgattcccaagcattcccatctgtttctaagccatcctccgcatacccttctaccactatagttaacccaaccatcgtactgctgcaacacaatcgagagcaacagaagcgtctgtcttcactgtctgatcccgtgtcagagaggcgagtaggtgaacaggatagcgccccaacccaagagaagcccacttctccaggcaaggcaattgagaagcgcgcgaaggacgactctcggcgggtggtcaagagtacacaagacctttccgacgtttccatggatgaagtcggcattccattgcgtaacaccgaacgttccaaggactggtacaaaaccatgttcaagcagatccataaacttaacagggatacacccgaagagaatccttattttccaacttacaagttcccagaactgccggaaattcaacagacatcggaagaggacaatccctacacccccacctaccagttcccagcgtccacccccagtcccaaatcagaagatgatgacagcgatctgtactctcctaggtacagtttctctgaggacactaaatctcccctgagcgtaccccgatctaaatcagagatgagttatatagatggtgagaaggttgtcaagaggtccgctaccttacccttgcccgcccgtagctcatccctaaagagttccagtgaacggaatgattgggaacctccagacaagaaagtcgacactcgaaagtatagggctgagccaaaaagcatttacgagtatcaaccggggaaatcatccgtgcttacgaatgaaaaaatgtcaagggatattagccctgaggagattgacttgaaaaacgagccctggtacaaatttttctctgaactggaattcgggaaaccacctccgaaaaagatttgggattatactccaggggactgcagcattcttccacgggaggatcgaaagaccaatttagataaggatctgagcctgtgccaaaccgaactggaggctgatctggagaagatggagactctgaataaggccccgtccgctaatgtaccccagagcagtgccatctcaccaacacccgaaataagttcagaaaccccagggtacatttatagctccaacttccacgcagtaaagcgggaaagtgatggagcccccggagatctcacctccctggaaaacgagcgccagatctataagtcagtgttggaggggggggacattccgttgcagggcctctctggactgaagcggccatcctcgtctgcctctaccaaggactcagagagccccaggcattttatcccagccgattatctggagtcaaccgaggaattcatcagacggcgtcacgacgataaggaaaaactcctggcagaccaaagacgcctcaaaagggagcaggaggaagccgacattgcagcgcgacgccacactggggtgattcccacccaccatcaattcatcaccaacgaaagattcggagatttactgaatatagacgataccgccaaacgtaaatccggatcagagatgaggccagctagagcaaagtttgactttaaggcacagacgctcaaggaactgcctctacagaaaggcgacatcgtctacatttataaacagatcgatcagaattggtatgagggggaacaccacggcagggtgggcatatttcctaggacctatattgaacttttgccccctgctgaaaaagcgcagcccaagaagttgacccctgtgcaggttctcgaatatggagaggctattgcgaagttcaattttaatggtgacacacaagtcgaaatgagcttccgcaaaggagagagaattactctactccgccaggtggacgagaactggtatgagggccgcatcccgggtacttctcggcaaggcatcttccctataacctacgtggacgttatcaaacggcctttggtcaagaaccctgtcgattatatggatttgccattctcgagctctccatcccggtccgccactgccagcccccagtttagctctcatagtaagctaatcactcccgcccccagctcactgcctcattccaggcgagctctcagccccgagatgcacgctgtgacttcggagtggatctctcttacggtcggcgtgccaggacgccgctccctcgcactgaccccaccattgccacccctgcctgaggcatcgatttataacacagatcacttggcactttctccccgggcctcaccttccctctctctctccctgccacatctctcctggtctgaccgaccaacaccacgctcagttgcctctccactcgccctgcccagtcctcataagacttactcattagcgcctaccagccaggcctccctgcacatgaacggcgacggaggggtgcatacacccagttctggcatccaccaggactccttcttacagctcccgctaggcagttcagacagtgtgatttctcagctgtctgatgctttctcaagccagtcaaaaaggcagccgtggcgggaagaaagcggccaatacgagcggaaggcagagcgcggcgctggagaacgcggccccggggggccgaagataagcaagaagagctgtctgaagcccagtgacgttgttagatgcctatccaccgaacagcgcctttccgacctcaacacgcccgaagaaagcagacccggaaagcctctggggagtgcatttccgggctccgaagccgaacagaccgagcggcatcgcggaggagaacaggccggccggaaggcggcacgtcggggcggttctcagcaaccacaggctcagcagcggcgggtgacgccagatcgtagccaaaccagtcaggacctcttttcttatcaagctctatactcttatatcccacagaatgatgacgagctcgagctgcgagacggtgatatcgtggacgtgatggagaagtgtgatgacgggtggtttgtggggacttctcggcggacaaaacaatttggcaccttccccgggaattacgtgaaacctctgtacctctag

SEQ ID NO: 206525 - DNA, 3801 bp, synthetic construct
  misc_feature 1..3801: note = Description of Artificial Sequence: Synthetic coding sequence
  source 1..3801: mol_type = other DNA
atgagcagcgagtgcgacggcggcagcaaggccgtgatgaacggcttggcacctggttctaatgggcaggataaggccactgctgatcctctaagagcgcggtctatttcagccgtgaagattattcctgtgaagactgtgaagaacgcctctggattggtcctgcctacagatatggacctcaccaagatatgtactgggaaaggtgccgtaacgctaagagcctcatcctcttatcgggagacgccttcgagcagtccagcgagtccacaagagacccggcagcatgagtctaaacccggcttggaacctgagccatcatcagccgacgagtggcggctcagtagcagcgccgacgctaatggcaacgctcagccgtctagcctggcagcgaaaggctaccggtctgtacaccccaatctcccatcagataagagtcaggatgccaccagtagctctgctgctcaaccagaggtgatcgtggtccccctgtacctcgtcaatacagatcgagggcaagaagggaccgcacggcccccaacgcccttgggtccactcgggtgcgtgcctactatcccagctactgcatccgccgcctcgcccttaacattcccaaccctggatgacttcatcccaccccaccttcagaggtggcctcatcattctcagccagcgcgtgcgagtggtagttttgcaccaatatcgcagactcccccatcctttagtcctccgccgcctttagtgcctccagcgccagaagacctaagaagggtgtctgagcctgatcttaccggagcggtgagctcaacggacagttcacctttgttgaacgaagtcagcagttccctgattggaaccgacagccaggcatttcccagcgtttctaagcctagtagcgcgtacccctctacgacaattgttaatccaacaattgttctgctccaacataaccgagagcaacagaaacgattgagctccctgagcgatcccgtctccgagcgcagggtaggcgagcaggatagcgccccaacccaggagaagcccaccagcccgggcaaggcgatcgaaaaacgtgccaaagacgatagcaggcgtgtggtcaaaagtacccaagatctgtcagatgtctcaatggacgaggtgggtatccctctgagaaacacagagagaagcaaggactggtataagaccatgttcaagcaaatacacaagttaaaccgagatgatgattcagacctgtattccccccggtactcttttagtgaggatacgaaatcacccctttcagtgccgcgaagcaagagtgagatgtcctacatcgacggtgaaaaggtggtgaagcggtcagctactctcccgctgccagcacgcagctcctctttgaaatccagctcagaacggaacgattgggagccacccgacaaaaaggtggacacccgcaaataccgcgcagaacctaagagtatatacgaataccagccaggcaaatcaagcgtcctgaccaatgagaaaatgagtagggacatatctcccgaggaaattgacctgaagaatgagccctggtataaattcttctcggaactggagttcggtaagcccccaccaaagaaaatttgggattacacccctggagactgcagcatcctgcctcgagaggaccggaaaacgaacctggataaagatctctctttgtgtcagaccgaattagaggctgacctcgagaaaatggagacccttaacaaagctcctagcgccaacgtcccccagagttctgctatcagtcctaccccggagatatcgtcagaaaccccgggttatatttactctagcaactttcatgccgttaaacgtgaaagtgacggggctcccggtgatctgacaagcttagagaacgaaagacagatctataagtctgtgttagaaggaggcgatatcccactgcaaggtctaagcgggctgaaacgtcccagcagctcagcatcaactaaggattcggaatctccacggcacttcattccagcagattacctggagtcaaccgaggaattcattcggcggcggcacgacgataaagagaagctactggccgaccagagacgacttaagagggaacaggaggaagccgatattgcggctaggcgacataccggggtgattccgacacatcaccaattcataaccaacgagagattcggggacctcctcaatatcgacgacaccgcaaagcgaaagagcggaagcgagatgcgtcctgcacgggctaaattcgactttaaagctcagaccttaaaagaattgccgttacagaagggtgatatagtgtacatctataaacagatcgatcaaaattggtatgaaggggaacaccatggccgtgtcggaattttcccccgcacttatattgagcttttgccacctgccgagaaagctcaacctaaaaagctgactcccgtgcaagtgcttgagtacggagaggcaattgcaaaatttaatttcaatggtgacactcaggtggagatgagctttagaaaaggcgaaagaattaccctattgcggcaagtggatgagaattggtatgagggcaggattcctgggacaagtcgacaaggaatttttcctatcacgtatgtcgatgttattaagcgtcccttagttaagaacccagtggattatatggatcttccattcagcagtagcccatctcgaagtgcaaccgcatcacctcagttttctagccacagcaaacttattactcccgctccaagcagcctgccacactcacgcagagctttatcacccgagatgcatgccgtaacgagcgaatggataagcctgaccgtcggagtgccaggaaggcgctcactggctctgactcctcctctgcctccgctgccggaggctagtatatataacaccgaccaccttgccctgtcccctcgcgcttcaccctcactgagtttgagtctaccgcacctgtcctggtctgatcggcccacacccagaagtgtggccagccctctagccctgccttccccccacaagacctactctttagccccaaccagccaagcgagtcttcacatgaatggcgatgggggcgttcatacaccatcttcgggcatccaccaagattcattcctgcagttgcccttggggagctcagactcagtaatcagccagctcagtgatgcgttctctagccagtccaaacgccagccttggcgcgaagaatccgggcagtatgaacggaaagccgagcgcggtgccggcgagaggggtcctggcggcccgaaaatttcgaagaaaagttgtctgaaaccctccgatgtagttcggtgtctgtccactgaacagcggctaagtgacctcaatacccctgaggaatccaggccgggaaagcctcttggatccgcgtttcccgggtcagaggctgaacaaaccgagagacatagaggcggagagcaagctgggaggaaagccgcacggcgtggtgggtcccagttatcccatcacagccttagggctggtcctgatttaactgaaagtgagaagtcttacgttcaaccccaggcacagcagcggcgggtgactccagatcggtcacaaaccagccaagatctgttctcctaccaagcgctttactcatacattccgcaaaacgacgacgagctggaactgcgcgatggagatattgtggacgttatggaaaaatgtgacgatggatggtttgtgggaacaagcagaaggacgaaacagtttgggacattccccgggaactacgtcaagcccttgtatctatag

SEQ ID NO: 206526 - DNA, 2436 bp, synthetic construct
  misc_feature 1..2436: note = Description of Artificial Sequence: Synthetic coding sequence
  source 1..2436: mol_type = other DNA
atgagcagcgagtgcgacggcggcagcaaggccgtgatgaacggcttagccccagggagcaatggccaggataaagatatggacttgacaaagatctgcactggaaaaggggcagtgaccctgcgagcctcctcgagttaccgcgagaccccaagtagctccccggccagtccgcaggagacacggcaacacgagagcaaacctgggctcgaaccagaaccttcttcagctgacgaatggcgcctatccagcagtgcagacgccaatggcaacgctcagccaagttccctggcagccaaaggataccggagtgtgcatcctaatttaccctctgataagtctcaggattctagcccccttcttaacgaagtatcctctagtttgattggcaccgacagccaagctttcccctccgtttcaaaaccctcgagcgcctaccccagtaccacaatcgtaaatcctacaatcgttctcctgcagcataatcgtgagcagcaaaagaggttgtcctctctttcggatccggtgtccgaacgcagagttggcgaacaggattctgcccctacccaagagaaacccaccagccctggaaaggcaattgagaagagggccaaggatgacagtcgtcgagtcgttaagagtacccaggatttgtctgacgtgtccatggacgaggtgggcatcccgctgcgcaatactgagcgctccaaggattggtacaagacaatgttcaaacagatccataaactcaacagagacgatgacagtgacctctactcgcccaggtactcgttcagcgaggacacgaagagtccactctcagtccccaggagcaagtcagagatgagttatattgatggcgagaaagtggttaagaggtccgcaactctgccgcttccggccaggtcaagttcccttaagtcttccagtgagcggaatgactgggaaccacctgacaagaaggtggacacaaggaagtaccgggccgagccaaaatccatttacgagtaccaaccaggcaagtcctcagtcctgactaacgagaagatgagccgcgatatctctccggaagaaattgacttgaagaatgagccatggtacaaatttttttctgaattggaattcggcaaaccaaccaatctagacaaggatcttagcctctgccagaccgagctggaggccgatctcgaaaagatggagaccctcaacaaagcaccaagcgcgaacgtgccccagtcaagcgccatcagcccaacaccagaaattagttctgagacaccaggctacatttatagcagcaacttccatgccgtgaagcgagagtcggacggcgcaccaggtgacctcaccagccttgagaatgaaagacagatatacaaatctgtgctggagggaggcgatattcccctccaggggttaagcggcctcaagcggccaagttctagcgccagcacaaaggacagcgagtcccctcggcacttcattcctgccgattatctggagtctactgaagaattcattagacggcggcacgacgacaaggagaagctcctagccgaccagagaaggctgaagcgtgagcaggaagaagcagatatcgcggcccgacggcacaccggagtcatccccacacaccatcaatttatcacgaacgagagatttggcgatctcctgaacattgacgacactgccaagagaaagagcgggtccgagatgcggccagcaagagccaagtttgatttcaaagcccagactctgaaagaactaccgcttcagaaaggcgacatcgtgtacatctacaagcagatagaccagaactggtatgaaggagaacaccatggccgggtgggcatctttccccgtacatacattgagctgctcccacccgccgagaaggcccagcccaaaaagctcacacctgtacaggtactggagtacggggaggcaatcgcgaagttcaattttaacggggacacccaggtcgagatgtcatttcgaaaaggcgagaggattaccctgctccgccaggttgacgagaactggtatgaaggaagaattcctggtacctcccgacaggggatattccctatcacttatgtggatgttatcaaacgtccccttgtgaaaaaccctgtcgactatatggatctgccattctcatccagtccatctcgttcagccaccgcatcccctcagcagccgcaagctcaacagcgccgcgtgacgccggatcggagtcagacctctcaagatctcttctcttatcaggcactctattcttacatccctcagaatgatgatgagctcgagctgagagatggggatattgttgacgtcatggaaaagtgcgatgacggctggttcgtggggacttcaaggaggactaaacagttcggtactttccctggaaattatgttaagcctctctacctatag

SEQ ID NO: 206527 - DNA, 2055 bp, synthetic construct
  misc_feature 1..2055: note = Description of Artificial Sequence: Synthetic coding sequence
  source 1..2055: mol_type = other DNA
atgagcagcgagtgcgacggcggcagcaaggccgtgatgaacggcctcgcacctggatccaatggtcaagataaggatatggatctaactaagatttgtactgggaagggcgcagtgactctgagagcctcttctagctatcgagaaaccccttcctcaagccccgcctcaccccaggagacaaggcagcacgaaagcaaacctgacgaatggcgcctgagttctagcgcagacgctaacggcaatgcgcagccttcttctctagcggcaaaaggatatcggagcgtgcaccctaatctgcccagtgataagtcccaggacagttcccccctactgaacgaggtctcaagttccctgatcggcaccgactctcaggccttcccgagtgtatctaaacccagcagcgcgtatcctagcaccacgatagttaatcctaccatcgtcttgctgcagcacaaccgcgaacaacagaagagactgtcatcccttagcgatccggtgagcgaaagacgcgtgggcgagcaggattccgctccaacccaggagaagcctacgtcccctgggaaagctatagaaaaacgagcaaaggatgattctaggcgagtggttaaaagtacacaagatctttctgacgttagcatggatgaagtgggcattcccttacgcaacacagagaggtctaaggactggtataagactatgttcaaacagatccacaaactcaatcgggacgatgatagcgacctctattctccacggtactcattcagcgaagatacaaaatctccgctatccgttccaaggagcaagtctgagatgtcatacatcgacggggaaaaggtagtcaagcggagcgccaccttgccactgcctgcaagaagttcctcccttaaatccagcagcgaaagaaatgactgggagcctcccgataaaaaggtggatacccggaaatacagggccgagccaaaatcaatttacgagtatcaaccaggaaaatcttccgtgctgactaacgaaaaaatgagctctgccatctccccaacacctgagatttccagcgaaactccgggctatatctattcctccaactttcatgctgtcaaacgggagagcgatggcgcccccggcgacttgacttctctggagaatgaaagacaaatctacaaatctgttctggagggcggcgatatccccttacaggggctgtccggactgaagcggcctagcagctctgcatctaccaaggactcggagagtccccggcatttcattcccgccgactacctggagagtaccgaggaattcatcaggcggcgccatgatgacaaagagatgcggcctgctagagccaaattcgatttcaaggcccaaactctcaaagaactgccactgcagaagggggatattgtgtacatttataagcaaatagatcagaattggtatgagggtgaacatcatggacgtgtgggcatttttcctaggacatacattgagcttctgccccccgctgagaaggcacagccaaaaaaactgacaccagttcaggtcttggagtacggggaggctatagccaaatttaacttcaatggagatacacaagtggaaatgagctttaggaagggcgaacggatcacgcttctccgccaggttgacgagaattggtacgagggacgtatcccagggacatcacggcagggaatattccccatcacatatgtcgacgtcattaaaaggccactggttaaaaaccccgtggactacatggatctgccattctctagctccccaagccgaagcgccacagccagtccacaacagccgcaggctcagcagcgtcgcgtgactcccgatagatcccagaccagccaggatttattctcataccaggcgctgtattcttacatcccacagaacgatgacgagctagagttgcgtgatggggacattgtggatgtcatggaaaaatgcgacgatggttggtttgttggcacctctcgtagaaccaaacaattcggaacatttcccggaaactacgtgaaacctctatacttgtag

SEQ ID NO: 206528 - DNA, 2718 bp, synthetic construct
  misc_feature 1..2718: note = Description of Artificial Sequence: Synthetic coding sequence
  source 1..2718: mol_type = other DNA
atgagcagcgagtgcgacggcggcagcaaggccgtgatgaacggcttagccccaggttcaaacggtcaagataaggccacagcagatcctctgagggctcgctccatctcagcagtcaagattatacctgtgaaaaccgttaagaatgcatccgggttagtgctccctacagatatggacctgaccaagatttgcactggcaagggggctgtcacgctccgagcttcaagttcctatcgggaaactccaagcagcagcccagcatcccctcaggaaacccgccagcatgaatcaaaaccgggtctcgaacccgaacctagtagcgccgacgagtggcggttaagcagtagcgcagatgcaaacggcaatgcacagccctcttccctggccgctaagggttatcgcagcgttcatccaaatctgccttcggacaagtcgcagcggtggccgcaccattcccagcctgcccgagcctcgggtagctttgcaccaatctcgcaaacgccaccaagtttctctcctcctccccctttagtgccgccggccccagaggatctgcgacgagtgtccgagcctgatctcactggtgcagtgtcatccacagactcctctccccttctcaatgaggtctcttccagtctgatcggcacagactcccaagccttcccctcggtgtcaaaaccatcgtctgcctatcccagcaccaccattgtcaatcctacgattgtgctcctgcaacataaccgtgagcagcagaaaaggctctcgtctctgagtgacccggtgagtgagaggcgcgtcggcgaacaggactcagccccaactcaggaaaagccaacttcgcctggaaaggctatcgagaagcgggcaaaggacgacagcaggagggtcgtaaaatctacgcaggatctcagcgacgtgagcatggacgaggtcgggattcctctgaggaacacagaaaggagtaaggactggtataagaccatgttcaagcagatccataagctaaaccgggacgacgactccgacctttattctcccagatactctttctcagaggatactaaaagcccactgtccgtgcctcgaagtaagtcagagatgtcttacattgacggtgaaaaagtggtgaaaagatccgccactcttcccctaccggcccgctcttctagtcttaagtcatcgagcgagaggaacgattgggagcccccggataagaaagtggatacacgcaagtatagggctgagcctaagtctatatacgagtaccagcctggcaagtcatccgtactgacaaacgagaaaatgtctagggacataagcccagaggaaattgacctgaaaaatgagccctggtacaagttctttagtgagttggagtttggaaagccccctccaaagaagatatgggattacacgcccggtgactgttctattctgcccagggaagatcgaaagtcatcggcgataagtccaactcccgaaatcagttcagagactccaggctatatctatagctcaaatttccacgccgtcaagcgggaaagcgatggggcacccggggatctcacctccctagaaaatgagcgtcagatatacaaatccgtgctggaggggggggatatccctctccaggggctgtcgggcctcaagaggcccagcagttctgcctcgacaaaagactcagagtcaccccggcatttcatccctgcagactacctagaatctaccgaggagtttatccgacggcggcatgacgataaagaaaaactgctggcggatcagagaaggctcaaaagggaacaggaggaggccgacatcgctgcaagaaggcatactggggtgattccgacgcatcatcagttcataacaaatgaacgctttggggatttgctgaacattgacgatactgccaagcggaagagcggctccgagatgagacctgcaagagccaaattcgatttcaaggctcagaccctcaaagaacttcctctgcagaagggggacatcgtgtacatctacaaacagattgaccaaaactggtacgaaggggagcaccacggaagagtgggtatttttccccgaacctatatcgagctactgccacccgccgaaaaggcccagccgaagaaactgactccagtgcaggttcttgaatatggcgaggcaattgcgaaatttaacttcaacggcgatacccaagttgagatgagcttcagaaaaggagagaggatcaccttacttcgccaagtggatgaaaattggtacgaaggaagaatcccaggaacctctaggcaaggtatctttcccattacatatgttgatgtaattaagcggccactcgttaagaaccccgtagactacatggatttgccattcagtagtagccccagcagaagcgcgaccgcttctccgcagttgagtcatcactcgttaagagcaggtcctgacctcaccgagtcagaaaaatcctacgtgcaacctcaggcgcagcagcgccgagtgactcccgataggtcccagacaagccaagacctgtttagctaccaggcactgtactcatacatcccgcagaatgatgatgaactggagctgcgggacggtgacatcgttgatgtgatggaaaaatgtgatgatggctggtttgtgggtaccagtcggaggacgaaacagttcgggaccttcccaggtaattacgtgaaaccgttgtacctctag

SEQ ID NO: 206529 - DNA, 3456 bp, synthetic construct
  misc_feature 1..3456: note = Description of Artificial Sequence: Synthetic coding sequence
  source 1..3456: mol_type = other DNA
atgagcagcgagtgcgacggcggcagcaaggccgtgatgaacggcctggcccctgggtctaatgggcaagataaggcaactgctgacccactgcgggctcggtctatttcagctgtgaagataatccctgtcaagaccgtcaagaacgcgtctggcctggtcttgccaaccgacatggatttaaccaaaatttgcaccgggaagggagccgtgaccctgcgcgcctcttccagctacagagaaacccctagttctagtccagcatcacctcaggagacacgacagcatgagtccaagcccggactggagcccgagccatctagcgctgatgagtggcggctcagctcgtcagccgacgccaacggtaacgctcagccatcttctttggccgctaagggatatcgcagcgttcacccaaatctaccaagcgataagagtcaggacgccacaagttcatccgcggcccaacctgaagtgattgttgtgcctctgtatctggtgaacaccgatcgtggccaggagggaacagctcgccccccgacgcctttggggcctctgggctgtgtccccacgataccagccactgcctcggctgcctctcccctcactttcccgactctcgacgattttattccaccgcatctgcagagatggccccaccacagtcagccggcaagagcctccggctctttcgcccccatttcacagacaccgccctccttctcccccccccccccactagtccctcccgccccagaagatcttagacgtgtgagcgagccagacctgacaggagcagtctcaagtactgactcgagccccctgttgaatgaagtgagctcctccctgattggcaccgacagccaggcctttcccagcgtatccaaaccttcttccgcttacccatctacgaccatcgtgaatcctactatcgtcctgctccaacacaaccgggaacaacaaaagagactcagctccctgtccgaccccgtcagcgaaaggcgggttggagagcaggacagcgcccccactcaagaaaagcctacatctcctggaaaagctatagagaaaagggctaaagatgactcacgcagagtggtaaaaagtacccaagacctctctgatgtttccatggacgaggtgggtattcccctgcgtaacaccgagagaagcaaggactggtacaaaactatgttcaagcaaattcacaagctcaaccgggataccccagaggagaatccctatttccccacttacaaattcccagagctccctgagatccaacaaacatccgaagagactaagtcttgctccgtcatgtctcccagattggagtgttccggtacagttatcgcccattgcagcctcaaattattggactccagcaaccctcccacaagtgccagtcaggtcgctgggacggccgacgacgattccgacctgtattctcctcgttatagtttctcagaagatacaaagtcacccttgagtgttcctcgatctaagtcagagatgtcctatatcgatggcgagaaagtggtgaaaaggtcagcaacgctgccactgcccgccagaagcagcagtttgaaatctagcagcgagcgaaacgactgggaacctccggataagaaggttgatacgcggaagtatagggccgagcctaagtccatttatgagtatcagcccggcaagtccagtgtcttgactaatgagaaaatgtccagagatatctctcccgaggagatcgacttaaaaaacgaaccgtggtataagttttttagcgagctggaatttgggaagccaccccccaagaaaatttgggattatactcctggagactgcagcatcctcccacgggaggacaggaaaaccaacctggataaagacctttcactctgtcaaacagagctagaggctgatctcgaaaagatggaaaccctgaataaagccccctcagcgaatgtgccacagtcaagcgccatcagccctacccctgagatcagtagtgagacccccggttatatctacagctccaacttccatgccgtgaaacgagagagcgacggcgcacctggggacctgacttcactggagaacgagagacaaatctacaaaagtgtgcttgaaggcggcgatatacctctgcaggggcttagtggactgaaacgtccttctagctccgcatccaccaaggactctgagagccctaggcacttcatcccagccgattatttagagagcaccgaagaatttattaggcgccggcacgacgataaggaaaagttattggcagaccaacggcggttaaagcgggagcaggaagaagccgacatcgccgccaggcggcacaccggtgtaatcccaacccatcaccagtttataaccaacgagaggttcggtgacctgctgaacatcgacgatacagccaagcggaagagcggatctgaaatgaggcctgcgcgcgctaaattcgactttaaggcccaaacactgaaggaacttcccctgcaaaaaggggatatagtgtatatctataagcagatcgaccaaaactggtatgaaggcgaacatcacggcagagttggtattttcccccgtacctatattgaactgttacccccagcggaaaaggcccaacccaagaaactgactcctgtccaagttttagagtatggcgaagccatcgctaagtttaactttaacggagatacacaagtggagatgtccttccgcaagggggaaaggatcactctcctgcgacaggtcgacgaaaattggtacgagggccggatcccaggcacctctcggcaggggatctttcccattacctacgtggatgtcattaagcggccactggttaaaaaccctgttgactatatggatctgcccttttcgagttcgcctagtcggtccgctaccgcatcccctcagccatggcgtgaagagagcgggcagtacgagcgtaaagctgagagaggcgcgggtgagagagggcccggcggtccaaagattagtaaaaagagctgtctcaaaccatctgacgtggtccggtgtctcagtaccgagcaacggctgagcgatttaaacaccccagaagagagtagaccagggaaaccactgggatccgcgtttcctggttccgaagctgagcagacagaaagacacagggggggagagcaagctgggaggaaagccgccaggagggggggtagccagcagccacaggctcaacagcgcagagtaacccctgaccggtctcagacatcccaggacctgttttcgtatcaggccctttattcatacattcctcagaacgatgacgagctcgagctcagggacggtgatatcgtcgacgtcatggagaagtgcgatgatgggtggttcgtgggaacctctagacggactaagcagtttggtaccttccctggcaattacgtaaagccactctatttatag

SEQ ID NO: 206530 - DNA, 3879 bp, synthetic construct
  misc_feature 1..3879: note = Description of Artificial Sequence: Synthetic coding sequence
  source 1..3879: mol_type = other DNA
atgagcagcgagtgcgacggcggcagcaaggccgtgatgaacggcctcgctcccggctccaatggtcaggacaaggccactgctgacccactaagagcccggtctatatccgctgtgaaaatcataccagtgaagacggtgaagaacgcttctggactggtgctgcccactgatatggacctgacgaagatttgtacagggaagggggccgttaccctaagggcttccagctcctacagagagacgccctcaagttcacctgcatcaccccaggagacgagacagcatgaaagtaaacctggactcgaaccagagccctcctccgccgatgagtggcgattgtcttcctctgccgacgcaaacgggaacgcccagcccagctccttggcagccaaaggctatcgctctgtccaccctaacctcccatccgacaagagtcaggatgcaacttccagctcggctgctcagcctgaagtcattgtggtccctctgtaccttgttaacacagaccgaggacaggagggcaccgcaaggccacccacgccactgggacccctcggttgtgtgcctacaatcccagctacagcttctgcagcctcaccgctgactttccccacattagatgacttcatccctcctcacctgcagagatggcctcatcattcccagcctgctagggcatcgggttcctttgcacccatttctcagactccacctagcttctctcccccaccccctctcgtgccaccggcccccgaggacctgcggagggtgtctgagcctgacctgaccggggccgtgtcatctacggatagtagccctctgctgaacgaagtctcttccagtttgatcggcactgactcacaggcatttccatcagtctccaaaccgagttctgcttacccgtctaccactattgttaaccctaccatcgttctgctccagcacaacagagaacagcagaaaaggctgtcctcactgagcgacccagtttcggaaaggagggtaggcgagcaggacagcgctccaacccaggagaagccgacaagcccgggaaaagcaatcgagaagagggcaaaagatgattctaggcgagtggtgaagtcgacacaggacctgagcgacgtatccatggacgaagtgggcatcccactgcggaatacagagaggtccaaagattggtataagaccatgtttaagcagattcataagctgaatagagacactccagaggaaaacccctatttccctacctacaaatttccggaactcccagagattcagcaaacgagtgaggaggacaatccttatactccaacatatcagttccccgcaagcacgccaagtccgaaaagcgaggatgacgacagtgacctgtactcacctcggtatagctttagcgaggacaccaaatcacctctgagcgtcccaaggagcaagagtgagatgagctacattgacggggagaaagtcgttaaacgatctgccacacttcctctgcccgctcgttcgtcctctctgaaaagctccagcgagcgcaacgattgggagccgcccgacaaaaaagtggacacaagaaaatacagagccgaacccaaatctatttacgagtaccagccaggcaaaagttctgtcctgactaacgagaagatgagcagggatatcagtcctgaggagatagacctgaaaaacgagccctggtacaaattcttcagtgaactcgagttcggtaagcctccgccaaagaagatttgggactacacacctggggactgctctattctgccccgagaggataggaagaccaatcttgataaagacctgtccctatgccagaccgagctggaggctgatctagagaagatggaaaccctaaataaagccccaagcgccaacgtaccccaatcaagtgccatctcacccacccccgagataagttcagagacccccggatacatatactcctcaaacttccacgctgtaaaaagggagtctgacggagctcccggcgatctgacatcactcgaaaacgagcgccagatttacaagagcgtacttgaaggaggagacatacctcttcagggactgtctgggttaaaaaggccaagctcaagtgcttcaactaaggatagtgaaagcccccgtcatttcatccccgctgactatctggagagtactgaggaatttatacgacggcggcatgatgataaggaaaagttgctggcggaccaacgtcgcctgaaacgtgagcaggaagaagccgacattgcagcaagaaggcataccggcgtaatccctacccaccaccagtttattaccaatgagcgatttggagacctgttgaacatcgatgacacagccaaacggaagagtgggtccgagatgagaccagctcgggcaaaattcgactttaaagctcagaccttaaaagaactgccactacagaaaggtgatattgtgtacatttataagcagatcgatcagaattggtacgaaggcgagcaccacggcagggtcggaatctttccccgcacgtacatagaactgttaccgccagccgaaaaggcccagcccaaaaagttgacccctgtccaagtgttggagtacggcgaagctatcgcgaaattcaattttaatggggacacccaggtggaaatgtcgtttaggaagggcgagaggatcactttactgcgccaagtggacgagaattggtatgaagggaggattcccggcacaagtcgccaaggcatcttcccgatcacctacgtggacgtgataaagcgccccctcgtcaaaaacccagtagactatatggatctaccattctctagtagtccgtcccgtagtgcgacggcctctccacaattttcgtcccactccaaactgataacacctgctcctagctcactcccccacagtaggagggcactatctccagagatgcacgccgtcacaagcgagtggatctcactcaccgtcggtgtacccgggagaagatcgctggcactgacaccccccctgccccctcttcctgaagctagcatctacaatactgatcatcttgctttatccccacgtgcctctccttccctgtccctgtccctgcctcacttgagctggtcagatcgccctactccgagaagcgtggcatcacctcttgcccttccctccccgcacaagacctattccctggcgcctacctcgcaagccagcttgcacatgaatggtgacgggggcgttcacactccatccagcggaatccatcaggactccttcctacagttgccgttagggagttcagacagcgttatctcccagctgtccgatgccttttccagccagtcaaagcggcagccgtggcgagaggaaagtggacagtatgaacgcaaagccgagagaggtgccggggagaggggaccgggggggcctaaaatttctaaaaaatcatgtctcaagccctccgacgtcgtgagatgcctctcaacagagcagcgcctatctgatctgaacacgcccgaagagtcgagacccggaaagcccctgggatctgcctttcccggtagcgaagcagaacagaccgaaagacatcgggggggcgagcaggccgggcgtaaggctgctcgaagaggcgggtcccagcagccccaggctcagcagcgcagggttaccccggacagaagccaaacgagccaggacctcttctcatatcaggctttgtactcatacatcccccagaacgatgatgaactggagttgagagacggggacatcgttgatgtcatggagaaatgtgacgacggatggttcgttggcacgtctcggcgtacaaaacagttcggcactttcccaggaaactatgtgaagccactatacctgtag

SEQ ID NO: 206531 - DNA, 2451 bp, synthetic construct
  misc_feature 1..2451: note = Description of Artificial Sequence: Synthetic coding sequence
  source 1..2451: mol_type = other DNA
atgagcagcgagtgcgacggcggcagcaaggccgtgatgaacggcctagcccccggctcaaacggccaggataaggatatggacctgactaagatttgtacgggcaagggcgccgtgaccctaagggctagctcctcctaccgagaaaccccatcatcctcacctgctagccctcaggagacccggcagcacgagagcaaaccagggctggagcccgaaccttctagtgccgacgagtggcggctcagttctagtgctgatgccaacggaaacgcccagccttcctccctcgcggccaagggttatcggtccgtgcaccccaacctcccgagcgacaaaagtcaagacgcaaccagttcttcagccgctcagccggaagtgatcgtcgtgcctctctatctcgttaacaccgaccgaggacaagaaggtacagccaggccccctacccctcttggaccactgggatgcgtgcccacaatacctgccacagcgagcgctgcttctccccttacttttccaaccctggacgacttcattccaccccacctgcagcgttggccccaccattctcagcccgcccgtgcatctggtagctttgccccaatctcacaaactccccccagcttctctcccccccctcccctggtgcctccggcccctgaagaccttagacgcgtctccgagcccgatctcacgggtgctgtttcttctacggatagttctcctctgctcaacgaggtctcgtccagtttaattggaacagactcccaggctttcccatctgtgtccaagccctcgagcgcttatccatccactactattgtgaatcccacaatcgtgcttctccaacacaacagagaacagcagaaaagactgtcctctctctcggaccctgtctctgagaggagggtcggagaacaggacagtgcacctacacaggaaaagcctacttcgccgggcaaggccatcgagaaacgggcaaaggacgatagccgaagggtggtcaaatccactcaggacctcagcgatgtgtcaatggacgaggttggtattcctctgcgcaatacagagaggagtaaggactggtataagaccatgttcaagcagatccataagctgaatcgcgatgacgactccgacctgtactctccaaggtatagcttctcagaggatacaaaaagccctctttcagtgccacgctcaaagtctgaaatgagctacatcgatggcgagaaggtcgttaagcgctcggcaacgctccctctgcccgctcggtcatcatctctcaagtcgagtagtgaaagaaatgactgggagcctcctgataaaaaggtggacacccgaaaataccgggcagagccaaaatcgatatacgagtatcaaccaggaaagagtagtgtccttacaaacgagaagatgtcttctgccatctccccgactccagagatctcctccgaaacccctggatacatatattcttctaatttccatgctgtgaaaagagaaagtgacggagctcccggggacctcacatccctggagaacgaacgacagatttacaagagcgtgctagaagggggagacattccattacagggcttatccgggctgaaaagaccgtccagcagtgcaagtacgaaggattcagagtccccaaggcacttcatcccagccgattacctggaatccacggaggagttcatcagacgacgccatgacgacaaagaaatgagacccgccagggccaagtttgatttcaaagctcaaactttaaaagagcttcccctgcaaaaaggcgacatcgtgtacatttataagcagatagatcaaaattggtacgaaggcgagcatcacgggcgggtgggcatatttcctcggacctatatcgaactgctcccgccagctgagaaggcacaacccaagaaactcaccccagtgcaggtcctggaatatggcgaagcaattgccaagttcaacttcaatggggatacgcaggtggagatgagttttcgaaagggcgagcggataacgctgctccgtcaggtagatgaaaattggtacgaaggccgaatacccggtactagtagacaagggattttcccaatcacttacgtcgacgttattaaacgcccactcgtgaaaaacccagtggattacatggacctgcctttctcttccagtcccagcaggtcagctaccgcctctccgcagcagccccaggcacagcagcggcgggtcactcccgaccgctctcagacatctcaggacctgttctcctatcaggccctctacagctacattccacaaaacgatgacgaattggagttaagggacggggacattgtggacgttatggaaaagtgcgacgatggatggtttgtcgggaccagcagaagaaccaagcagtttggcaccttccctggaaactacgtcaaaccactttacctttag

SEQ ID NO: 206532 - DNA, 3015 bp, synthetic construct
  misc_feature 1..3015: note = Description of Artificial Sequence: Synthetic coding sequence
  source 1..3015: mol_type = other DNA
atgagcagcgagtgcgacggcggcagcaaggccgtgatgaacggcttagcaccagggagtaacggacaggataaggcgacagccgacccgttgcgggcacgtagtatctctgccgtaaaaattatcccagtcaagactgtgaaaaacgcatcagggttggtgttgccgacggatatggatttgaccaagatttgcacggggaagggcgcggtgacgctcagagcaagctcatcatacagagagactccgagttcatcaccagcctccccccaagaaacccgtcagcatgagtcgaaaccggatgagtggcgactcagttcctccgccgatgccaacggaaacgcccaaccgtcatcactagctgccaagggctaccgatcagttcaccccaacctgccgtctgacaagagccaagacgccacaagctcatccgccgcgcagccagaagttattgtggttcctctgtacctggttaatacagatcgggggcaggaggggactgcccgcccacccacacctctggggccactcgggtgcgtgcccactatcccggcaaccgcatcagcagcatctcctttaactttcccaaccctcgatgattttattccgcctcacctgcagcggtggccacaccatagccaacccgcccgagcaagcgggagctttgcccctatttctcagactccaccatctttcagcccccccccaccgcttgtgccaccggctccagaagatctgcgccgtgtgtccgaaccagacctcaccggcgccgtcagtagcactgacagctccccattgctcaatgaggtatcttcctccctcatcggcacagatagccaggcatttcccagcgtgtctaagccttcctctgcctatccgagcacaacaattgtcaatccgaccatcgtgctgctgcagcataacagagaacagcagaaaaggctttcgagcctgagtgatcccgtttcagaacgcagggttggggagcaggactccgctccaacccaggaaaagcccaccagccctggaaaagcaattgaaaagagggcaaaggacgattcccgcagggtggtgaaatcaacacaggacctgtccgacgtgtctatggacgaggtcggaataccactgcggaacacagagagatccaaggactggtataaaaccatgtttaagcagatccataagctgaaccgagatactccagaggaaaacccttattttccaacctacaaatttccagaactcccagaaattcagcagacgagcgaagacgacgactcagatctttatagtccgcgatactcattcagtgaggataccaagtcacctctttccgtgcctcgaagtaagtcagagatgtcttatatagacggtgaaaaggttgtcaaacgcagcgcaacccttcccctcccagcccgctcctcctccctgaagtctagtagtgaaagaaatgattgggagccgcccgacaaaaaagtggatacaaggaagtatcgcgcagagcccaagtcaatttacgagtatcagcccggcaaatcgagcgtccttaccaatgagaagatgtccagggatatcagccctgaggagattgatctgaagaacgagccctggtataagtttttcagcgagctggagttcggtaaacctccacctaagaaaatttgggactacacacccggagattgttctatcttgccccgcgaggatcggaaaacaaacctggacaaagatttgtccctctgccagacagagctggaggccgacctcgagaagatggaaactctgaacaaagcacctagtgccaacgtccctcaatctagcgccatctcacctaccccggaaatttcttctgaaacaccgggctacatttattcctcaaattttcatgcagtgaagagagaatctgatggcgcgcctggggatctgacgtcactcgaaaatgaaaggcaaatctataaatcagtcctcgaaggcggtgatattcccctccagggactaagtgggctgaagcgcccaagctcaagtgcgtccactaaagactctgaatcaccacgccacttcataccagccgattatcttgagagtaccgaggagttcatccgtaggcggcacgatgacaaagagaagttactagcagatcagcggagactgaagcgggagcaggaggaggctgacattgcagctagaaggcataccggcgtcatccccacacatcaccagttcataacaaacgagagattcggcgatctgctgaacattgatgataccgcaaaacggaaatctggcagtgagatgagacccgcacgcgccaagttcgattttaaggcccagactcttaaagagctgccccttcagaaaggagacattgtgtatatatacaagcagattgaccaaaattggtacgaaggagaacatcatggccgagtgggcatttttccccggacttatattgaacttcttcctccagctgagaaagcccagccaaagaaactcacacctgtccaggtcctcgagtatggcgaggccatagcaaagttcaatttcaatggagatacccaagtcgaaatgagtttccggaaaggtgagcgaattactctgctccggcaggttgacgagaactggtatgaaggtcgcatccctgggacatctaggcaaggcatattcccgataacctatgtggatgttattaaaagacctcttgtcaagaatccagttgattatatggacctgcctttttcctcctctccgtcgagaagcgcgaccgcttctccccaacagcctcaagcccagcagcggcgagtgaccccagaccgatcacagacctctcaggacttgtttagctaccaggctctgtactcatacattcctcaaaatgacgacgaattagaactgcgcgatggggatattgtcgacgtcatggagaaatgcgacgatggatggtttgtgggcacatcacggcggaccaaacaatttggcacgtttcctggtaactacgtcaagccactgtatctttag

SEQ ID NO: 206533 - DNA, 2016 bp, synthetic construct
  misc_feature 1..2016: note = Description of Artificial Sequence: Synthetic coding sequence
  source 1..2016: mol_type = other DNA
atgcagggccccccccggagcctgcgggccggcctgagcctggacgatttcatcccgggacacctgcagagtcacattgggagctcatcccgcggcactagggtccccgttatcagaaatggaggttctaacaccctcaacttccaatttcatgatcctgcaccaagaaccgtgtgtaatggaggttatacaccacgtagagatgcctctcaacatcccgatcctgcctggtaccagacatggcctggacctggttccaagcccagcgcctctacaaagatcccagcctcacagcacacgcaaaactggtcagcaacctggaccaaagatagcaagaggagagataagcgatgggttaagtacgaaggcatcggccctgtggacgaatccggtatgcccatcgccccacggtctagtgtagaccgcccaagggattggtatcgacggatgtttcagcagatccacagaaagatgcctgatctccagctcgactggaccttcgaggaacccccaagagatccccggcacctgggcgcacagcagcgacccgcccataggccgggccccgccacatcatccagtggacgcagctgggaccactccgaggagctcccgcggtccacattcaattaccgtccgggggctttctccaccgtgctacagccatccaatcaggtgctgcgaagacgcgaaaaagttgataatgtctggaccgaagaatcatggaatcagttcctgcaggaattggagaccggtcagcgcccaaaaaaaccgctggtggacgatcccggtgaaaagccatcccaacccatcgaggtgcttcttgagcgtgagttggctgagcttagcgctgagttagataaggatctgagggcaattgagacaaggctcccctctcctaagagtagccctgccccacgccgtgccccagagcagcggccacccgcgggccccgcttctgcctggtcttcttcctaccctcatgcaccatatctgggttctgccaggagcttatccccacataaaatggccgatggagggtctccctttcttggacgccgcgacttcgtctatccttcgtctacacgggacccctccgcctctaacggcggaggctcccccgcccgaagggaagaaaagaagcgcaaggcagcccgcctgaagtttgacttccaagctcagtccccgaaagaactcactctgcaaaagggcgatatcgtgtacatccacaaggaagtggataagaattggctggaaggcgaacaccacggcaggctgggcatattcccagctaactacgtggaagtcctgcccgcagacgagattcctaagcctatcaagccaccaacttaccaagttctcgagtatggggaggcagtcgcccaatacacctttaaaggggacctcgaggtagagttgagttttcggaaaggcgaacacatctgtttgattcgcaaggtcaatgaaaattggtacgagggacgcattacaggaaccggtagacaagggatctttcccgcatcttacgtacaggtgtctagagagcctcggttgcgactgtgtgacgacggcccacagctgccaacttcccctagactgacagccgctgctagaagtgctaggcacccgagtagcccttcggccctacgatctccggcagacccaattgatctcggcggccaaaccagcccccgacgaacaggcttcagcttccccacccaggaacctcgcccacaaacccaaaatctggggactccaggccctgccctatcgcatagccgagggcccagccaccctctcgaccttggaaccagcagccctaacacctcccagattcactggacaccttatagagcaatgtatcagtaccggcctcagaacgaagatgagcttgaactgagggaaggggaccgggtcgatgtcatgcagcagtgcgatgacgggtggtttgtgggagtgagccggcgaacacagaaattcggaacttttcctggcaattacgtggcaccagtatag

SEQ ID NO: 206534 - DNA, 990 bp, synthetic construct
  misc_feature 1..990: note = Description of Artificial Sequence: Synthetic coding sequence
  source 1..990: mol_type = other DNA
atggccgacggcggcagccccttcctgggccggcgggacttcgtgtatccgtcatccacacgggatcccagcgctagcaatggtggaggaagtccagccaggcgggaggagaagaagcgtaaggcagctaggctcaagttcgacttccaagcccagagccccaaggagctgacactacagaagggggacatagtctacattcataaagaggtcgataaaaattggctcgagggagagcaccacggaaggttaggcatcttcccagctaattacgtggaagtgttgccagctgacgagatacctaagccgatcaagccccctacctaccaggtcctggagtatggtgaagccgtggcccagtacaccttcaaaggcgatctagaggtcgagctgtcttttcggaagggcgagcacatctgccttatccgtaaggttaacgaaaactggtacgagggccgcatcaccgggaccggacgccagggcatttttccggcctcctacgtgcaggtgtcgagagaaccccggttgaggctttgtgatgatgggcctcagctaccaaccagccccagattgactgccgctgctcggtccgcaaggcacccttcctcccccagcgcccttcgatcccccgccgatcctatcgacctaggagggcaaacttctccccgacggaccggcttttccttccccacccaggagccaaggccacagactcagaaccttggtacccccggcccggctctctctcactcacgggggccttctcaccccctggacctggggacatcatcacctaacacctcccaaatccattggactccatacagggcgatgtatcagtaccggccccagaatgaggacgagctggagctcagggagggagaccgtgtagatgttatgcagcaatgtgacgatggttggtttgtgggcgtatcacggcggacccagaaattcgggacattccctggcaactacgttgcacctgtgtag

SEQ ID NO: 206535 - DNA, 1074 bp, synthetic construct
  misc_feature 1..1074: note = Description of Artificial Sequence: Synthetic coding sequence
  source 1..1074: mol_type = other DNA
atggccgccgccgccaagcccaacaacctgagcctggtggtgcacggaccgggggacctgcgacttgaaaactatcccatacccgaacctgggcccaatgaagtgctactgcggatgcacagcgtaggcatttgtggttctgacgtgcactactgggaatacggccgcatcgggaacttcatcgttaaaaaacccatggtgttgggccacgaagcctcagggactgttgaaaaagttggatcgtccgttaaacatctcaagcctggggatagggtggcaatcgagcccggtgctcctagagagaacgatgagttttgtaaaatggggcggtacaatctctcaccatcaatcttcttctgcgcaacaccacccgacgatggcaatctatgcagattttataaacataacgccgcgttttgctacaagttgcccgacaatgtgaccttcgaggaaggggctttgattgagccgctcagcgtagggatccatgcttgcagaagggggggagtgactttgggccacaaagtcctggtgtgtggcgctgggccaatcggaatggtgactcttctcgtggcaaaggccatgggggctgcccaggtcgttgtgactgatttgtctgcaacccgtctgagcaaggcaaaggaaattggggcagaccttgtgttgcaaatcagcaaagaatctcctcaggagatagcacggaaagtagaagggcaactggggtgcaagccagaggttacaatcgagtgtacaggggctgaagcatcaatccaggctggtatttatgctacccgctcggggggtaatctggtcctcgtcgggctgggatcagaaatgacaaccgtgccactgcttcacgccgcgatccgagaagttgatatcaaaggtgttttccgatactgcaacacctggccagtcgccatcagcatgcttgccagcaaatcggttaatgtcaaacctctggtgactcacaggtttcccctcgagaaagcgctcgaggcatttgagacctttaaaaaaggtctgggactcaagatcatgctcaaatgcgacccatctgatcaaaatccatag

SEQ ID NO: 206536 - DNA, 597 bp, synthetic construct
  misc_feature 1..597: note = Description of Artificial Sequence: Synthetic coding sequence
  source 1..597: mol_type = other DNA
atggcctaccccggccaccccggcgccggcggcggctactaccccggtggctatggcggagcgccgggaggccccgcctttcccggtcaaacgcaggaccccctttacgggtacttcgctgccgttgcaggccaagacgggcagatcgacgccgatgagcttcaacgatgccttactcagtccggcatagcaggcggttataaaccattcaatcttgagacctgcagacttatggtgagtatgttagaccgggacatgtctggcacaatggggttcaatgaattcaaagagctttgggccgttctcaatggctggcgacagcacttcatcagctttgatactgataggtctggcacagtggacccccaggaactgcagaaggcacttaccactatgggttttagattatccccacaagctgtgaatagtatcgcgaagcgttactctacaaatggtaaaatcacctttgatgactatatcgcatgttgcgtaaaactgcgcgctctcaccgatagcttcaggcggcgggatacagcccagcagggggtagtgaactttccctatgacgacttcatacagtgcgtgatgtcggtctag

SEQ ID NO: 206537 - DNA, 552 bp, synthetic construct
  misc_feature 1..552: note = Description of Artificial Sequence: Synthetic coding sequence
  source 1..552: mol_type = other DNA
atgcagtacggcggcgcccccggcggccccgccttccccggccagactcaggaccccttgtacggctatttcgctgccgttgcgggccaggatggtcagatcgacgccgatgagctccaacgctgcctgacccaatccggtattgccgggggctacaaacctttcaacctggagacatgcaggctgatggtcagcatgctagatcgtgatatgagtggaaccatgggctttaacgaatttaaagagctgtgggcagttctaaatggttggcgccaacatttcatttcctttgatacagaccggtcagggacagtcgaccctcaggaactgcaaaaggcactgaccacaatgggttttagactctccccacaagcagtgaacagcattgctaagagatacagcaccaatggaaaaattactttcgacgactacattgcgtgctgcgtcaagttgagggcactaacagacagctttcgacgccgggatacggcacagcagggcgtggtgaactttccttacgatgactttatccaatgcgtgatgagtgtctag

SEQ ID NO: 206538 - DNA, 543 bp, synthetic construct
  misc_feature 1..543: note = Description of Artificial Sequence: Synthetic coding sequence
  source 1..543: mol_type = other DNA
atgcagtacggcggcgcccccggcggccccgccttccccggccagacgcaggatccgctgtacggttacttcgctgcggtcgcgggccaagatgggcagattgacgccgacgaactgcagagatgccttacgcagagcggcatcgccggtggctataagccattcaacctcgagacttgtagattgatggtttctatgctcgatagagacatgagcggaaccatggggtttaatgagtttaaagagctgtgggctgtattaaatggttggcgacaacatttcattagcttcgatacagaccgctccggaacagtggacccacaagaactccagaaggcattaacaaccatgggatttcgcctgagtcctcaggctgtaaatagtattgcaaagcggtacagtactaatggcaaaattaccttcgatgattatatcgcgtgttgcgtgaagttaagggcattgaccgactcatttcgaaggagagataccgctcagcagggggtggttaacttcccatatgacgatgtgtctcttaggaactag

SEQ ID NO: 206539 - DNA, 6645 bp, synthetic construct
  misc_feature 1..6645: note = Description of Artificial Sequence: Synthetic coding sequence
  source 1..6645: mol_type = other DNA
atggccacccggagcagccggcgggagagccggctgcccttcctgttcaccctcgtggctctcctgccacctggcgccctttgtgaagtgtggacacagcgtctgcacgggggctcagcaccactgcctcaggacagaggattccttgttgttcagggcgaccctcgagagctgcgactctgggctaggggtgatgctagaggtgcctctagggcagatgaaaaaccactgcgtagaaagcgcagcgcagccttacagcccgagcccatcaaagtgtacggccaagtgagtctgaacgatagccacaatcaaatggtggtccattgggccggcgaaaaatcgaatgtgattgttgctttagcaagggactctctggccctggcgcggccaaagagttcagacgtgtatgtgtcgtacgattacggaaaaagctttaaaaagatctctgacaagcttaacttcgggcttggtaatagatcagaggccgttatcgcccagttctaccacagccccgcggataacaagaggtacatctttgctgacgcatatgcacagtacctatggataaccttcgatttctgtaacacacttcaggggttcagcatcccatttcgggccgcggacctgctgctccatagcaaagcgagtaatctgctgctcggattcgatcgaagccatccaaacaaacagctatggaagagcgacgacttcgggcagacatggattatgatccaggagcatgtaaagagctttagctggggcattgacccctacgacaaacctaataccatctatattgaacgccacgagccatcaggttactcaaccgttttcagaagtacggacttcttccaatccagggagaatcaggaggtcatcctcgaggaagtgcgcgatttccagctgcgggacaaatatatgttcgcgacaaaagtggtgcaccttcttggaagtgagcagcagtccagtgtccagttgtgggtaagttttggccggaagccgatgcgtgccgctcagttcgttacaaggcatcccatcaatgagtactacatcgccgatgcttccgaagaccaggttttcgtctgcgttagtcactccaataatcgtactaatctgtatatctcagaggctgaagggctgaagttttccctctccctggagaatgtcctgtactattcgcctggaggcgcagggtcggatacgcttgtccgctatttcgccaatgagccttttgctgacttccatagggtcgaagggctgcaaggcgtgtacatcgctacactgatcaacggatcgatgaacgaggagaacatgcggtctgttattacctttgacaagggtgggacttgggaattcttacaggccccagcgttcactggttatggggaaaaaataaattgtgaactgagccagggatgctcgctccatcttgcccaaaggctgagtcaacttcttaatctgcaattgaggcgtatgcccattctgtccaaagaatccgcccctgggctgatcattgctacagggtcagtcgggaagaatctggcatccaagaccaacgtttacatcagctcttcagccggggcacgctggcgggaagcccttcctggtccacattactatacctggggggatcatggaggaataattaccgcgatcgcccaaggcatggaaacgaacgagctcaagtattccactaatgaaggggagacttggaaaacatttattttcagcgaaaaacctgtatttgtatatggccttcttaccgagcccggagagaagtctaccgtgttcactattttcggaagtaataaggagaatgtgcactcttggttgattctccaggtaaatgcaacggacgctctaggagtcccctgcacggaaaatgactataagttgtggtcaccgtccgatgagcgcgggaatgagtgtctactcggccacaaaacagtattcaagaggagaacccctcatgccacgtgctttaatggggaggacttcgatagacccgtggttgtgagcaactgttcctgcaccagggaggactatgagtgcgacttcggtttcaagatgtctgaggatctcagcctggaagtgtgcgtaccggaccccgagtttagcggcaagtcctattcccctcccgtgccttgccctgttggatctacttatcggcggaccagaggttacaggaagatttccggcgatacatgttccggaggcgacgtggaagctagacttgagggtgagttggtcccttgccccttggccgaggaaaacgagttcatactgtatgctgtccgcaagagcatatatagatatgacctggcttcaggtgcgactgaacagctcccactgaccgggctccgcgccgccgtggctctggatttcgactatgaacataactgtctatattggagcgatcttgctcttgatgtcattcaaagattatgccttaatgggtccactggacaagaggtcattatcaactccgggcttgagacagtggaggcgttggcctttgagccgctgtctcaactattgtattgggtggatgctggcttcaagaagattgaagttgccaacccagatggggactttcgactgaccatcgtcaacagtagcgttctggataggccacgggcgctggttctggtacctcaagaaggagttatgttctggacggactggggcgatctcaagcccggcatttatagatccaacatggacggttccgcagcataccatctggtcagcgaggatgtgaaatggccaaacgggattagcgtggatgatcagtggatttactggaccgatgcgtatttggagtgtatcgagagaatcacgttctctggccagcagagatctgtgatcttggataaccttccccacccatatgctattgcagtatttaagaacgagatctattgggatgactggtctcagttgtccattttcagggcaagcaagtacagtggctcccagatggagatcctggcaaaccaacttaccggcctgatggatatgaagattttctataaaggcaaaaataccggtagcaatgcttgtgtgccgcgcccctgctctctgctgtgtttgcctaaggccaataactcacgtagctgccgttgtccagaggacgtgtcatcaagtgtacttcctagcggcgacctgatgtgcgactgccctcaaggatatcaactaaagaacaatacatgtgttaaacaagagaacacgtgtttgaggaaccagtatcgatgtagcaacggcaactgcatcaactctatctggtggtgtgacttcgacaatgattgtggggatatgtctgatgaacgtaactgtccaaccaccatctgcgatctcgacacccagttccggtgtcaggagagcggcacctgtataccactgtcttataagtgtgatctcgaggacgattgcggtgacaactccgacgagtctcactgtgaaatgcaccagtgtaggagcgacgagtataattgctcctcgggcatgtgtattagatcatcatgggtgtgcgatggggacaatgactgtcgagactggagcgatgaagcaaactgtacagccatataccatacctgtgaagcgtcgaactttcaatgtagaaacgggcactgcatcccccagcgctgggcctgcgacggggataccgattgccaggatggctcagatgaggaccccgtgaattgcgagaaaaagtgcaatggctttaggtgccctaatggcacatgtatcccatcatcaaagcactgtgatggccttcgagactgtagcgacggtagcgacgagcagcactgcgagcccctgtgcacccacttcatggacttcgtctgcaaaaatagacagcagtgcctgttccattctatggtttgtgacggcatcattcagtgcagggacgggagcgatgaggacgcagcattcgccgggtgttcacaagatcccgagttccataaggtttgtgacgaatttggattccagtgccagaacggggtctgtataagtctcatctggaagtgtgacggtatggacgactgtggcgattacagcgatgaggccaactgtgagaaccccacggaggcaccgaattgttccagatacttccagtttcgctgtgagaacggccattgcattccaaatagatggaagtgcgatcgtgaaaacgattgtggggactggtccgatgagaaggactgcggcgactcacatatccttcctttctcaaccccgggaccgagcacttgccttcccaactattatcggtgctcctctggcacctgcgttatggatacttgggtatgcgatggatatagggattgcgccgacggtagcgacgaggaagcatgccctctgctcgcgaacgttacggccgcctccactcctacccagttgggacgatgtgataggtttgagttcgagtgccaccagccaaagacctgtattccgaactggaagaggtgtgacgggcatcaagactgccaagacggaagggatgaggcaaattgtcccactcactctacactgacatgtatgtcgcgcgagttccagtgcgaggacggtgaagcctgcatagtcctaagcgagagatgtgatggcttcctggattgctctgacgagagcgacgaaaaggcttgcagcgatgagctgactgtgtataaggtacagaacctccagtggactgccgactttagcggggatgttactcttacctggatgcggccaaaaaagatgcccagtgcgtcctgtgtatataacgtttactatcgggtggtgggagaatctatatggaaaaccctcgagactcattccaataagaccaacacagtactgaaggtgctgaagcctgacactacataccaggtgaaagtccaggtccagtgtctgtccaaagctcacaataccaacgactttgttacactccggaccccggaaggcttgccagatgccccaaggaacctgcagttaagtctccctcgcgaagcagagggggtcattgttggccattgggcgcctcctatccatacccatggcctgatcagggagtatatagtcgaatatagtagatcgggttctaagatgtgggcatcacagagagccgcctctaacttcacagaaattaaaaacctcttagtaaacaccctttacacagttagagtcgcagccgtgacctcccgcggcatcgggaattggagtgatagcaaaagcattactactattaaaggaaaagtaatccccccgcccgatatccacatagatagttacggagagaattatttgagtttcactctcacaatggagagcgacatcaaggtaaacggctacgtggtcaatctattttgggccttcgacactcacaagcaagagagacgcacgctcaactttaggggttcgatcctgtctcataaggtaggaaatcttaccgcccacacctcatacgagatctccgcctgggctaagactgatctcggcgattcgccccttgctttcgagcatgtcatgacaaggggcgtgcggccacccgctccgagtctgaaggccaaggctatcaatcagaccgccgtggaatgtacctggacagggccaaggaatgtggtctatggaatcttttacgcgaccagctttctggacctgtacagaaatcccaagtccctgactacatcactgcacaacaaaaccgtcatcgtttcaaaggatgagcagtacctcttcctggtgagagtcgtggtcccctaccagggcccctcctcggactatgtagtggtcaagatgataccagatagtcgattaccgccaagacacttgcatgtggtgcatacaggcaagacaagtgtggtgatcaaatgggaatcaccttacgattccccagaccaggacttgctttacgcggtcgcagtaaaggatctcattaggaagacggatagatcttataaagtcaaatcaagaaatagcaccgtggagtacaccttaaacaagcttgaaccaggcggcaagtaccatattattgtgcagctgggtaacatgtcaaaagactcttccatcaaaataacaacggtgagtctgagtgccccagacgctctgaaaatcatcactgaaaacgatcacgtactgttgttttggaagagtctggcgcttaaggagaagcattttaacgaaagccgggggtacgaaatccatatgttcgactcagctatgaatataacagcgtacttggggaacactacagacaatttctttaagataagtaatttaaaaatggggcacaactatacgtttaccgtgcaggcacggtgcctgttcggcaaccaaatctgtggcgaaccagccatcctcctgtacgatgagctcggaagcggtgctgatgcgagtgctacacaggccgccagatcaaccgatgtcgccgccgtggtggtgccaatcctgttcctgatactgctaagtctgggggtgggctttgctatcctatacactaaacataggaggcttcagagctcatttacggcctttgctaattcccattactcctctcgtctaggcagcgccatttttagttcaggggacgatctgggtgaagacgatgaagacgcacctatgatcactggcttttcagatgacgtgcctatggttattgcttag

SEQ ID NO: 206540 - DNA, 3507 bp, synthetic construct
  misc_feature 1..3507: note = Description of Artificial Sequence: Synthetic coding sequence
  source 1..3507: mol_type = other DNA
atgggcaaggtgggcgccggcggcggcagccaggcccggctgagcgcgctgttggcaggggctgggctgctgatcctgtgtgctccgggcgtgtgcggaggcggatcatgctgtccctctcctcacccttcttcagctcctaggtccgcctcaactccccgcggattcagtcatcagggcagacccggccgtgcacccgccacccctcttcctctggtggtgaggcctctgttttcagtcgctccaggtgaccgggccctgtccctggagagagcgcgggggacaggagcctcaatggctgtggccgcgagaagtggcagaaggcgtcgtagcggagctgatcaggagaaggctgaacggggggagggtgcttcacggagccccaggggcgtgctcagagatggtgggcagcaggagccaggaacgcgcgagcgggatcctgacaaagctacacggtttcgtatggaggagttacgactaacctctacgacgtttgctctgaccggagacagtgctcacaatcaagccatggttcattggtcgggacataactcttctgtgattctgatactcacaaagctgtatgactataacctggggagcatcaccgaaagcagtctctggcgaagtaccgattacggtaccacttatgaaaaactgaatgataaggtcggcttaaaaactattctgtcttacctttacgtgtgccctaccaacaagcgcaagatcatgctgctcaccgatcccgaaattgagagctcactattaatttcgagtgatgagggtgccacataccagaagtatcggctcaatttttatatacagtcactgctcttccatcctaaacaggaggattggattctggcctacagccaggatcagaagctgtattcttccgcagagtttggtcggcggtggcaactcatacaagagggggttgtgcctaatcgtttctattggagcgtgatggggagcaacaaggagccggatctggtccatctcgaagcaaggaccgtagatggccatagccattacttgacatgtaggatgcaaaattgtaccgaggcaaatcggaaccagccattcccgggctatattgatcctgatagtctcatcgtgcaggaccattacgtgtttgttcaacttacatccggagggagaccccactactatgtttcctacagacgaaacgcttttgcccagatgaagcttccaaagtacgccttgcctaaggatatgcacgtcataagtaccgatgagaatcaagtgtttgccgcagttcaagaatggaatcagaatgatacctacaacctctatatatcagacacacgaggcgtttactttacgctcgcactcgaaaacgttcagtcttctcgcggaccagaaggaaatattatgattgatctttatgaggttgctgggattaagggcatgtttctcgcaaacaagaaaattgataatcaggtcaaaacattcatcacttacaacaagggccgggactggcggttactgcaggccccggacacagacctgcgcggagatccagtgcactgtctgctcccttactgcagtttgcacttgcatcttaaagtctcggaaaatccctacacgtcaggtattattgcaagcaaggatactgccccttccatcatcgtagcctccgggaatatcggaagtgagctctccgataccgacatctcaatgtttgtcagtagtgacgctggaaatacctggaggcaaatatttgaggaggagcactccgtactgtatttggaccagggcggagtgcttgtggccatgaagcatacctcccttccgatcaggcatctctggctctctttcgatgagggcaggtcatggtcgaagtactcgttcacttccattccgctgtttgtggatggtgttttgggcgagccaggcgaggaaacactgataatgactgtgtttgggcacttttctcatcggagtgagtggcagttggtgaaagtggattataagtccatatttgaccgcagatgcgcagaggaggactaccgaccttggcagttgcactctcaaggtgaagcatgcattatgggcgcaaagcggatttataagaagagaaagtctgaaagaaagtgtatgcaaggaaaatatgccggtgctatggagtccgaaccgtgtgtgtgtacagaagccgacttcgattgtgactacggatatgagcgacacagtaacggccaatgtctgccggcgttctggttcaacccatcttccctatcgaaggactgctccctgggtcagtcatatctgaacagcactgggtatagaaaggttgtgtctaacaactgcaccgacggggtgagagagcagtacactgccaagccgcaaaaatgtcccggtaaagcgccccgagggttgcggatcgttacagccgacggcaaactgacagcggagcaaggccacaacgtcactctgatggtgcagttggaggaaggcgacgtccagagaacattaatccaggtggacttcggagatggcatcgccgtgtcttatgtcaacctgagtagtatggaggacggaattaaacatgtgtatcagaacgttggcattttccgagtgaccgtgcaagtagacaattccctgggaagcgacagcgccgtcctatatttgcacgtcacttgccccctagagcatgtacacctgagtctgccattcgtaaccactaagaataaagaagtgaatgcgactgccgtgctgtggccctctcaagtcggaactttgacttacgtctggtggtacggtaacaacaccgaacccttgatcaccctcgagggatccatcagcttcaggttcacatccgaaggtatgaacacaatcaccgtgcaggtgtcagccggtaacgctattttgcaggacacaaaaaccatcgccgtctatgaagagtttcgatcacttcgcctgagcttctcccccaatcttgatgactacaacccggatataccggaatggcgcagggacattgggcgtgttatcaagaaatctctcgtcgaggccaccggtgttcccggccagcacattctggtggccgtgctacccggactcccaaccacagcggaacttttcgtcctgccttaccaggaccccgctggagagaacaagcgaagcaccgatgacctggagcagatctccgaactccttattcatacgctgaaccagaattcagtccactttgagctcaaacctggggtacgggtccttgtgcacgctgctcacctcacagccgcccccttggtagacctgaccccaacacactccgggagcgctatgctaatgctcctgtctgttgtctttgtcgggctcgcagtgtttgtcatatataaatttaaacggagagtcgctctcccatcgccaccttccccctcaacacagccgggagatagtagtctgcggctccagcgggccaggcatgcaacccccccatccaccccaaagcgcggatcagctggggcacaatacgcaatctag

SEQ ID NO: 206541 - DNA, 3597 bp, synthetic construct
  misc_feature 1..3597: note = Description of Artificial Sequence: Synthetic coding sequence
  source 1..3597: mol_type = other DNA
atgggcaaggtgggcgccggcggcggcagccaggcccggctgagcgccttactggccggagcgggcctgcttatattatgcgcccccggagtgtgcggcggggggagttgttgcccttctcctcaccctagctctgcccctcggagcgcctcaacaccgcgtgggttcagccatcagggacgaccaggaagagcacctgccactcccctccctttggttgttcggccactttttagcgtggccccaggggacagagcgctgtcgctagaacgggccaggggtacaggggcgtcaatggccgtggccgcccgcagcggcaggcgcaggcgcagcggggccgaccaggaaaaggcagaaagaggggagggcgcttcaagatcaccaagaggagtactccgggatggggggcagcaggagcccggcacccgggagagggatccagataaggccactcgcttcagaatggaggaactgcggctgacctcaacaacatttgcccttactggagactcggcccataatcaggccatggttcactggagtggccataatagctcagtaatcctgattttgaccaagctctatgattacaatcttggctcaatcaccgagagcagtctctggcgaagcaccgactatggcacaacttacgaaaagctcaatgacaaagtggggctgaaaactatcctgtcctacctctacgtgtgtcccactaataagagaaaaatcatgctgttgactgatcctgagatcgagagttctctgctaatttcaagcgatgagggagcgacctaccagaaataccgcttgaacttctacatccagtctttgctattccatcctaagcaggaagattggatcctagcttacagccaggatcagaaactctatagctcagctgagttcggccggcgctggcagctgatccaggagggcgttgtgccaaaccgattctactggagcgttatgggctcaaacaaagaacctgacctcgtccacctggaagccagaaccgtggacggtcacagccattacttaacatgccggatgcagaactgtactgaggctaaccgtaatcagccctttcctggatatatagacccggactcactgattgtgcaggatcattatgtgttcgtacaattgacgagcggcggccgcccacattactatgtctcttacaggcggaatgctttcgcccagatgaaattgcctaaatatgcacttcctaaggacatgcatgtcatttcaaccgacgagaaccaagtgtttgctgctgttcaagagtggaatcagaacgacacatacaacctttacatcagcgatacacggggagtgtatttcaccttggcactcgagaatgtccagagttctcgcggacctgaaggcaatatcatgatagatctatacgaagtagcaggcatcaaggggatgtttttagctaataaaaagatcgataaccaggtaaagacttttataacctataataaaggcagggattggaggctgctgcaggcccctgacactgacctgcgcggagaccccgtacattgtcttcttccctactgcagccttcacctgcatctgaaggtttccgagaacccctatacatctggaatcattgcatcgaaggacactgcaccatcgataatagtggcttcaggtaatatcggttctgagctgagcgacaccgatatttcaatgttcgtgtcatctgatgccgggaacacctggagacagattttcgaggaggaacactccgtcttgtacctggaccagggcggcgtccttgttgcaatgaagcatacatccttaccaattaggcatctgtggctctcgtttgatgagggacgaagctggagtaaatattctttcacaagtatccccctcttcgtggacggcgttctcggcgagccaggagaggagacccttattatgaccgtatttggtcatttcagtcaccgctctgaatggcaattggtaaaggtggactataaaagcatcttcgatcggcgctgcgctgaagaagactaccgaccatggcagttacacagtcagggagaagcctgcataatgggcgccaagaggatctataaaaaacggaagagcgaaaggaaatgtatgcagggcaaatacgccggagctatggaatctgagccatgtgtctgtacagaggctgactttgactgcgattacggctatgaaaggcactctaacgggcagtgcctccctgccttctggttcaatccttcttccctttccaaggattgcagcctgggccaatcttacctgaactcaacaggataccgcaaggtcgtgtccaataactgcacagatggggtcagagaacagtataccgctaagcctcagaagtgtccaggcaaggctcctcggggccttaggattgtgaccgctgacggtaaattaaccgctgaacagggccacaatgtcactctcatggtacagcttgaagaaggcgacgtgcagcgcacccttattcaggtggactttggcgatggcattgcggtttcctatgtgaacctgtctagcatggaggatggtatcaagcatgtctaccaaaacgtgggcatctttcgggtgactgtgcaggtagataattctctggggtcagacagtgccgtattgtacttgcacgtaacatgccctctcgaacacgtgcatctcagcctgccttttgtgaccacaaagaacaaagaagtgaacgctacggcagtactctggccaagccaggtaggcaccctcacatacgtctggtggtacggtaacaacaccgagcccttgatcactttagagggtagcattagctttcggtttacttctgagggcatgaacaccattacagtgcaggtatccgccggtaacgctattctgcaggacacaaaaaccattgcagtgtacgaggaatttagatctcttaggcttagtttttcgccaaatttagacgattataacccagacatcccagaatggcgacgcgatattggacgtgtaatcaaaaaaagcctcgttgaggcaactggcgtgccaggacagcacatcctggttgccgtgcttcccggcctgcctacgaccgcagagcttttcgtgctgccgtaccaagatcctgccggcgaaaacaagagaagtactgacgacctggaacagatcagtgagcttctaattcacaccttgaatcagaactccgttcactttgaactgaagccaggcgttagagttctggtgcacgcagcccacttgacggcagccccactcgtggacctcaccccaacacactcaggcagcgctatgctcatgctgctgtccgtggtctttgttggcctggctgtgttcgtgatctacaagttcaaaagaaagatcccagggatcaacgtgtacgctcaaatgcagaatgagaaggagcaagagatgattagcccagtaagccactccgaatcacgccccaacgtgcctcagacagaactccggcgaccaggacagctgatcgacgaaaaagttgagagtcagctgattggtagcatcagcattgtggccgaaaaccagtctacgaaggagatacctacatacgtcaacgtgtag

SEQ ID NO: 206542 - DNA, 2145 bp, synthetic construct
  misc_feature 1..2145: note = Description of Artificial Sequence: Synthetic coding sequence
  source 1..2145: mol_type = other DNA
atgatcgacctgtacgaggtggccggcatcaagggcatgttcctggcaaacaaaaagattgataaccaggttaaaacatttatcacttacaacaagggaagggactggaggctgctccaggcgcctgatactgatttgaggggggatcccgtgcactgcctgctgccatactgctccctgcatctccatctgaaagtttcagagaacccttacacgtcaggaatcatagcgtccaaagatacagccccctctattatcgtggctagtggaaatatcggatctgaattgtcggacaccgacatcagcatgttcgtgtccagtgacgcgggcaacacatggcggcagatcttcgaggaagagcatagcgtgctgtacctggatcagggtggcgttcttgtggctatgaagcatactagtctacccatcagacacctatggctgagctttgatgagggtagaagctggtctaagtatagctttacaagcatacctttgtttgtggatggcgtgcttggcgagcctggggaggagacactgataatgactgtatttggtcatttcagtcatagaagcgagtggcaattggtaaaggtcgactacaagtccatttttgaccggagatgcgcagaagaggactataggccgtggcagctccatagtcaaggggaggcctgcattatgggggctaaaaggatctataaaaagagaaaaagcgaacggaaatgcatgcaagggaagtacgccggggccatggagtctgaaccttgtgtctgcactgaggctgactttgactgcgactatggttatgagcggcacagcaacggtcagtgcctgccagcattttggttcaatccatcctcactgagcaaggactgctccctcggacaatcatatctgaacagcacggggtaccgcaaggtggtctccaataactgcaccgacggcgttagggagcagtacactgctaaaccacagaagtgtccagggaaggcacctaggggactgcggatcgtgacagcagatgggaaactcacggccgagcaaggtcataacgtgactctaatggttcagttagaggagggagacgtgcagcgaacactaatacaggtggacttcggggatggtattgctgtgtcgtacgtgaacctcagctccatggaggacgggatcaagcacgtttaccagaatgtaggcatcttcagagttaccgttcaggtggacaacagtttgggtagtgactccgctgtgctgtatctccacgttacctgccctctagaacacgttcacctctccttgccatttgtgacaactaagaataaagaagttaacgcaaccgcagttttatggccgtctcaggtgggcactctcacctacgtgtggtggtatggcaataacacagagcccctgatcactcttgagggcagcatctcgttcagatttacatcggagggcatgaacactattacagtccaggtcagtgctggcaacgcaatcctgcaggatacgaaaaccattgctgtctatgaggaattcaggtcactgcggttatctttctcaccaaatctggacgactacaaccctgatatcccagagtggagacgcgatatcggcagagtcatcaagaagagtctcgttgaggccaccggggtcccaggtcagcacatcttggtggccgttctcccaggactcccaactacagctgaattgttcgtgctaccataccaagaccctgccggcgagaacaaacggtctaccgatgacctggaacagatatctgagctgctgatccacaccttgaatcagaacagtgtgcacttcgagctgaaacccggcgtgcgagtgctggtgcacgccgcccatctaacagctgctccacttgttgatcttacaccaactcattccggctcagctatgttaatgcttctaagcgtggtttttgtcggtttagccgttttcgtgatttacaagttcaaacgcaaaattcctggtatcaatgtgtacgctcagatgcagaatgagaaggaacaggagatgatctctcccgtatcccactctgagtcccggcccaacgtgccacaaactgaactgcgccgccctggccaactgatagatgagaaggtggagtcacagctcatcggcgagtag

SEQ ID NO: 206543 - DNA, 642 bp, synthetic construct
  misc_feature 1..642: note = Description of Artificial Sequence: Synthetic coding sequence
  source 1..642: mol_type = other DNA
tgactggacgactacaaccccgacatccccgagtggcggcgggacattggccgcgtcatcaagaagtccttagtggaggcaaccggagtgcctggacaacatatcctagtcgccgtgcttcctgggctgcccactacagcggagctgttcgtcctaccataccaggacccagccggtgagaacaaaagatctaccgacgatcttgagcaaatctctgagctgctaattcatacattaaatcagaatagcgtccatttcgagttgaaacccggcgtgcgagtgctagtgcatgcggctcacctaacagctgctcccttggtggatttgacaccaacacactccggatcagctatgttaatgctgctctccgtcgtgtttgtgggactggccgtatttgtgatatataagttcaagaggaaaatccccgggatcaatgtgtacgcacagatgcagaatgaaaaggaacaggagatgatttcacctgtgagccactccgaatccaggccaaacgtgccacagacagaattacgtcgccctggccagctgatcgacgagaaggttgagtcacagctcattggcagcatctccattgtggccgagaatcagagcactaaggaaatccctacttatgtcaatgtgtag

SEQ ID NO: 206544 - DNA, 3009 bp, synthetic construct
  misc_feature 1..3009: note = Description of Artificial Sequence: Synthetic coding sequence
  source 1..3009: mol_type = other DNA
atgggcaaggtgctggagagcagcctgtggcggagcagcgacttcggaacaagctatacaaaacttacactccagcccggcgtgaccacggtcattgataatttctacatctgcccaacgaacaaaagaaaagtaattctggtcagctcatccctgagcgatcgcgatcagtcactgttcctgtccgcagacgagggggctacctttcaaaagcaaccaattccattcttcgtcgagacattaattttccatcccaaggaagaggacaaggtgctcgcatacacgaaagaaagtaagctgtacgtttcgagcgatttgggaaagaaatggacattgctccaggagcgcgtgacgaaagatcatgtgttttggtccgtctccggcgtggatgcagaccctgatttggtccacgtcgaagcccaggatcttgggggtgatttccgatatgtgacttgcgcaatacataattgctcagagaaaatgttaacagccccattcgccggtcccattgaccacgggtccctcacagtgcaggatgactatatattcttcaaggccacttccgcaaatcaaaccaaatattacgtttcataccggcgtaatgaattcgtgctgatgaaactccctaagtacgccttacccaaggacctgcagatcatcagtaccgacgagtctcaggtgttcgtggcagtacaggaatggtatcagatggacacctataatttgtaccaatctgatccaaggggcgtgcgatatgcacttgtcctgcaggatgtgagaagctcccgccaggcggaagagagtgttctgatagatatactggaggtccgcggcgtgaagggtgtgtttctcgctaaccagaaaatcgatggtaaagtaatgactttgataacttataataaagggcgagactgggactatctacgtcccccttcgatggatatgaacgggaaaccgactaattgtaagccacccgactgccatttacacctgcatttacgctgggccgataatccctacgtgtccgggacggtgcacaccaaggataccgcacccggcctgatcatgggtgctgggaacttaggcagccaactggttgagtacaaagaagagatgtatattacaagtgattgtggacacacctggagacaagttttcgaagaggaacatcacatcctctacttggatcacggtggcgtcatcgttgccattaaggacacatcaataccactcaaaatcctgaagtttagcgtcgacgaaggcttgacctggtctacgcataacttcacttcaacgtctgtgtttgtagatggtctgttatccgaacctggcgacgaaactctggttatgacagtgttcggccacatcagctttagaagtgattgggaattagtgaaagtggactttagaccaagcttttctcggcaatgcggtgaggaagactactcttcatgggagctatctaacttgcaaggagaccgctgcataatggggcaacaacggtccttccgcaaacgcaagtccacgagctggtgtattaaaggtaggtccttcacatccgctctaaccagtcgggtttgtgaatgcagggatagcgatttcttgtgcgactacggcttcgagcgctctagctcgagcgagtcttccacaaacaaatgcagtgcaaacttctggttcaatcctctgtctccgcctgacgattgcgcccttggccagacctatacgagcagcctggggtatcgaaaagtggtatccaatgtgtgtgagggcggcgtcgacatgcagcaatctcaggtgcagctccagtgccccctgaccccacctcgtggactgcaagtgtccattcagggcgaggccgtggctgtgcgtcctggggaggacgtactgtttgtggtcaggcaagagcaaggagacgtgcttaccaccaagtaccaagttgatctgggtgacgggttcaaagccatgtacgttaacttgacattgaccggcgagccaatacggcatcgatacgagtcacccggcatttatagggtgtcagtacgagcagaaaatactgctggccatgatgaggccgtcctctttgtgcaggtcaactcacccctacaggctctctaccttgaagtggtgccagtaattggcttgaaccaggaggtgaacttgacagccgtgcttctgccgctaaatccaaatctaaccgtgttttactggtggataggccactcactgcagccactccttagcttggacaacagcgtcacaacccgcttcagcgataccggtgatgtgagggtgactgtccaggcggcgtgcgggaactcagtcttgcaggattcacgggtgctacgggtactggaccagtttcaggtgatgcctctgcagttctcaaaggagctggatgcttacaatcccaataccccagagtggcgcgaggatgtcggcctcgtcgtcacaaggttgctttctaaggagacctcagtcccgcaggagctcttggtcacagtggtgaagcccgggcttccaactctggcagacctctatgtcctcttgccacccccccgcccaacgcgaaagcggagcctgtcgagcgacaaaagattggccgcgattcagcaggtcttgaacgcccaaaagattagtttcttactccgcggcggcgtgagagtactggtcgccctgcgagatactggcaccggggcagagcagctgggggggggtggcggctactgggcagtcgtggtgttattcgtcatcgggctcttcgccgcaggtgccttcattctctacaaattcaagtcccggaagcgcccaggccgcacagtgtatgctcagatgcacaatgagaaggagcaggagatgacgagccccgtgtcccactccgaagacgtccagggcgccgttcagggagaagagtttattgatgatgacctggactctcagaccctggggaaccactccggggtggtgctcagtatcaacagcagagaaatgcactcatacctcgtatcgtag

SEQ ID NO: 206545 - DNA, 3480 bp, synthetic construct
  misc_feature 1..3480: note = Description of Artificial Sequence: Synthetic coding sequence
  source 1..3480: mol_type = other DNA
atggcccaccggggccccagccgggccagcaagggccccggccccaccgctcgggctccgagtcctggagcccctccaccccctcggagtcccaggtcacggccgctgctcctgctgctgctcttgctgggggcttgtggagccgctggtaggtcccctgagcccggacggttagggcctcacgcccagttgactagagtccctagaagtcctcccgccggcagggccgagcctggaggcggggaggaccgccaagcccgaggtacagagcccggtgctccaggccccagtcctggacccgcgccaggaccaggagaggacggcgcccccgccgccggttacaggaggtgggaacgagccgcccccttggccggtgtggcctccagagcccaggttagtcttatctcaacaagctttgtgcttaagggcgacgccactcacaatcaagccatggtgcactggactggcgaaaacagctctgtgatccttatcctgactaaatattaccatgccgacatgggcaaggtgctcgaatcttccttgtggagatctagcgatttcggcactagctacacaaagcttaccctgcagcccggcgtgacaacagtcatagacaatttttacatttgtccgacaaataagagaaaggtgattctcgtctcaagctcgctctctgatagagatcagtcgctgttcctcagtgccgacgagggcgcaacttttcagaaacagccaatcccgttctttgtggagactctcatattccatccgaaggaggaagacaaggtattagcctataccaaggaatctaagctgtatgtgtcgtcggacctggggaagaagtggacgctgctgcaagagcgtgtaacaaaagaccacgtcttctggagtgtctccggcgttgacgcagatcccgatctggtccatgtggaagctcaagatctggggggcgattttagatacgtgacctgcgcgattcacaattgttcagagaaaatgctgaccgcccctttcgctgggcctatcgaccatggtagcctgacggtccaggacgactatatcttctttaaggcaacatctgccaatcagactaagtattatgttagttatcgcaggaatgaattcgttttaatgaagctaccaaagtatgcccttcctaaggacctgcaaatcataagtaccgacgagtctcaggtgttcgttgccgtgcaagagtggtaccagatggatacatacaatctgtatcagagcgatcctagaggggtgaggtatgcgctggtgctccaggacgtccggagcagcaggcaggccgaggaatctgtgctgattgacatcttagaggtccgtggagtgaagggagtctttctcgcaaatcagaagattgacggtaaagtgatgacattgataacctataacaaagggagagactgggattacctgcgcccgcctagcatggacatgaacggtaaaccaactaattgtaaaccacccgattgccatttgcacctgcatcttagatgggcagataacccctacgtgtctgggaccgtccacacaaaagataccgccccaggcctcatcatgggggccggaaatttaggcagccagttggtggagtataaggaggagatgtacataacttctgactgtgggcacacctggcggcaggtgtttgaggaggagcaccacatcctttatctggatcacggcggcgtcattgtggccattaaggatacctctatcccgctgaagatcttgaagttttctgtcgatgagggattaacgtggtccacgcacaactttactagcacaagcgttttcgtggacgggctgctgagcgagcccggcgacgagacgctggtgatgacagtgttcgggcacatctctttccgttcagattgggagttggttaaggtggatttccggccttcgttctcccgacagtgtggcgaggaagactattcgtcttgggagctcagcaatctccagggggaccgctgcatcatgggccagcagagatctttcagaaagcgcaagtcaacttcatggtgcatcaagggccgctcattcacatctgcactgacctctcgagtgtgcgagtgccgcgattccgacttcctatgtgattatggcttcgaaagatcctcctctagcgaatcctctacgaataaatgctctgcaaacttctggttcaacccactgagcccccccgatgattgcgctctcggacagacatacacatccagcttgggctaccggaaggtcgtgtcaaatgtgtgcgagggcggcgtggacatgcagcaatcccaggtgcagctacagtgccctctcaccccacctcgcggcctgcaggtgagtattcagggcgaagcagtggctgtacgaccaggggaggatgtcctcttcgttgtgcgacaagaacagggcgacgtcctaaccacaaagtaccaggttgacctgggagacgggtttaaggcaatgtatgtaaaccttaccctgaccggcgaacccattcgtcaccgatatgagagtcctggcatttatagagtcagcgtgcgggccgagaacactgccggccacgacgaggccgtgctgttcgtgcaggtgaactccccgctccaggcattgtatctcgaggttgtcccagtgattggacttaatcaggaggttaaccttactgcggtgctgctccctttaaacccaaatctgacagtcttctattggtggattggccactctctgcagccattgctctccctggataattccgtgacaacaagatttagcgatacaggtgatgttagggtcaccgtccaggcagcctgtggaaattccgttctgcaggactcgagagtgctgagggtgctcgaccagtttcaggtaatgccactccagttcagtaaggaacttgatgcatacaacccgaacactcccgaatggagggaagacgtgggcctggtggtcacccggcttctaagtaaggaaacaagtgttccacaagagctgctcgtcaccgtcgtcaaacctggtctgcctacattggccgacctgtacgtgctcctgccacccccgaggccaacgcggaaacgcagcctgtcatcagataagagactggctgccatccaacaggtgctgaacgcccaaaaaatctcctttttactgaggggcggcgtaagggttttggtggccctgcgtgatactggcactggagcagagcagttagggggaggcggaggttactgggctgtcgtggttctgttcgtaattggattattcgcggcgggcgcattcattctgtacaagtttaaaagaaaaagaccaggacggaccgtgtacgcccagatgcacaacgaaaaagagcaggaaatgacatctcctgtgtctcattcagaggacgtccagggcgcggtgcagggaaaccattcaggagtggtgctgtcaatcaatagccgggagatgcactcctatcttgtctcgtag

SEQ ID NO: 206546 - DNA, 594 bp, synthetic construct
  misc_feature 1..594: note = Description of Artificial Sequence: Synthetic coding sequence
  source 1..594: mol_type = other DNA
atgggcgagcggaagatcttcaagaagcggaagcccggcgcccagtgcgctctcgggagggaccatagcggaagtgtggtttcagagccatgcgtgtgcgctaattgggactttgaatgcgactacggctatgaacggcacggagaaagtcagtgtgtgcctgccttctggtacaaccccgcgtcgcctagtaaggactgtagcctcgggcagtcatacttaaattccacgggctatcgcagaatcgtgagcaataattgcaccgacggcctcagagaaaagtacactgccaaagcccaaatgtgccccgggaaggcacctcggggtcttcacgtggtaacaacagatgggagactggtggcagagcagggacataacgcaacatttattatcttgatggaggagggtgacctgcaacggactaacatacagctcgatttcggcgacggaattgccgttagctatgctaacttttcacccatcgaggacggaatcaagcatgtctacaagagtgccgggatttttcaggtcactgcctatgccgaaaacaatttaggaagcgacactgccgttttattcttgcacgttgtttag

SEQ ID NO: 206547 - DNA, 3669 bp, synthetic construct
  misc_feature 1..3669: note = Description of Artificial Sequence: Synthetic coding sequence
  source 1..3669: mol_type = other DNA
atggaggccgcccggaccgagcggcccgccggccggcccggcgcccccctagtccggactggactactgctcctttcaacgtgggttctggctggagccgagatcacttgggatgcgacaggcggaccgggcagacccgctgccccagcttcccgacctcccgcactgtccccactgtcaccgcgcgccgtcgcctcgcaatggcctgaggaattagcgtctgcacgtcgcgctgccgtgctggggcgcagggcaggacccgaactgctgccccaacaaggaggtggcagggggggtgaaatgcaggtcgaagctggcggcactagcccagctggcgaacgacgaggaaggggcatcccggcacccgcaaagctcgggggcgccaggcggtcccggagagcccagccgcctattacccaggaaaggggggacgcgtgggccaccgcacccgcagatgggtcccgtggctcccgcccactagccaagggaagcagagaagaggtgaaggctcccagggcggggggctcagccgcagaagatttaaggctgccctccacctcttttgccttgacaggggattcggcgcataaccaagccatggtccattggagtggacacaattcttctgttatactgattcttactaaactatatgattttaatctaggatccgtaacagaatcctcgctgtggcggtcaactgattatggaaccacttatgagaagctaaacgacaaagtgggcctgaaaacggtgctgagttacctgtatgtgaacccaacaaacaaaaggaagatcatgctgctgtccgatccggaaatggagtcttctattttgatttccagcgacgaaggagccacgtaccagaaataccgtctcacattctacattcagtcactcctgttccatcccaaacaggaggattgggtgctggcctactccctggatcagaagttgtactcttcaatggatttcggcagacgctggcagttgatgcacgagcggatcacccctaacaggttttactggtccgtcgcaggtctggataaagaggctgatcttgtacatatggaagtgagaaccactgacggatacgcacactacctgacgtgccgcatccaggaatgcgccgagactacgcgctcagggccattcgcgcgctcgatcgacatctcttcgctcgttgtgcaggatgaatacatcttcatccaggtcacaacatccggtcgcgcgagttactatgtcagttacagacgagaggcttttgcacagatcaaattgcccaagtactcgctgcctaaagacatgcacatcatatccaccgacgaaaaccaggtgttcgccgccgtgcaggaatggaaccagaatgatacatacaatctttacattagcgacacgcgcggaatttattttacactggcaatggaaaatataaagtccagccgcggcctcatggggaatataatcatcgagctgtacgaagtcgctggtatcaaggggatattcctggctaacaagaaggtggacgaccaggtgaaaacatatatcacttacaacaaaggacgcgattggcgcctcctgcaagcgcccgacgtagacctgcggggttcacccgtacactgccttttgccattctgtagcctccacctgcacctgcagctgtccgagaacccgtattcgagtggaaggattagcagtaaggagactgcccctgggctggtggtagctacgggtaatatcggcccagaactgtcatacacagacataggagtgttcatttcctcagacgggggtaacacttggcgccaaatctttgacgaagaatataatgtttggtttctggactggggaggcgctctcgttgccatgaaacacactcctcttcccgttcgacacttgtgggtctcttttgacgagggacatagctgggataaatatggtttcacttctgtgcctctttttgtagatggcgccctagtagaagcaggcatggagacacacattatgacagtttttggccatttctccctacgctccgaatggcagctcgtcaaagtggactacaagtccatcttctccagacactgcacaaaagaggattaccaaacgtggcacttgctcaaccagggggaaccctgcgtcatgggggagcgcaaaatctttaaaaaaaggaaacccggcgcccagtgtgcattgggccgggaccattctggctcagtcgtcagcgagccgtgcgtctgtgcgaactgggatttcgaatgcgactacggctatgagcggcacggggagtctcagtgcgtgcccgccttctggtacaacccagccagccccagcaaggattgcagcttggggcaaagctatctgaatagcaccggatatagacggatcgtctcgaacaattgtaccgacggcctcagggaaaagtataccgccaaggcacagatgtgcccaggtaaggctccccggggcctgcacgtcgtgacgactgacgggcgcctggtagccgagcaggggcataacgccacctttataattctgatggaagagggcgatctacagcggaccaatattcagctggattttggggatgggatcgccgtctcatacgctaatttctctccaattgaggacgggatcaaacacgtctacaagtctgccggcatcttccaggtgactgcctacgcggaaaataatctgggctccgacactgcagtactcttccttcacgtggtgtgtcctgtcgagcatgtacacttacgggtcccttttgtggccataagaaacaaggaggtcaacatttccgctgtggtctggcccagccagttggggacacttacatacttctggtggttcggcaacagcaccaagcccttgattaccctagattcctctatctcctttactttcttggcggaaggcaccgacactatcacagttcaggtcgctgctggaaacgccctgatccaggataccaaggaaatcgcagtgcatgagtattttcagagccagctgttaagtttctcacctaatttggactaccacaacccggatattcctgaatggagaaaagacattgggaatgtcataaaacgcgcgcttgtgaaggtgacatcagtgccggaggaccagatcttgatagccgtgtttcccggactcccaacttccgcagaactgttcatcctgcctcccaagaatcttactgaacgccggaaaggaaatgagggcgacctggagcagattgtggaaaccctgtttaatgccttgaatcagaacctggttcagttcgagctcaagccaggcgtgcaagttatcgtgtatgtcacccagctaactctggcacctctcgtggatagtagcgccgggcattcttcatctgccatgctgatgctcctaagcgtggtgttcgtggggctcgcagtctttctaatctacaagtttaaacgaaagatcccgtggatcaacatttacgcgcaagtccagcatgataaggaacaggaaatgattgggagtgtgagccaaagcgaaaacgccccaaagattacactttccgatttcaccgagcctgaagagctgctggacaaggaacttgacaccagggtgatcggtgggattgccacaatcgccaattcggagagcacaaaagagatccctaattgcacctctgtttag

SEQ ID NO: 206548 - DNA, 462 bp, synthetic construct
  misc_feature 1..462: note = Description of Artificial Sequence: Synthetic coding sequence
  source 1..462: mol_type = other DNA
gagaacccctacagcagcggccggatcagcagcaaggagaccgcccctggactcgtggttgcaacagggaacatcgggcccgagttgagctacacagacataggtgtattcattagcagtgacggaggaaacacgtggcgacagatattcgatgaagagtataatgtgtggtttctcgattggggcggcgccttggtggctatgaagcatacaccgctgcccgtgcggcacctgtgggtgtctttcgacgagggccattcttgggataaatacggcttcaccagcgtgcctttgtttgtggacggagcactggtggaagccggaatggagacacatattatgactgactatggttacgaacggcacggggaaagtcagtgcgtgcctgcattctggtataatccagcttcaccaagcaaggactgcagcctgggacaaagctacctgaactcaaccggttag

SEQ ID NO: 206549 - DNA, 1410 bp, synthetic construct
  misc_feature 1..1410: note = Description of Artificial Sequence: Synthetic coding sequence
  source 1..1410: mol_type = other DNA
atgggcaccgtgcacgcccggagcctggagcccctgcccagcagcggaccggactttggaggcctgggagaggaggccgagttcgtcgaagtcgaaccagaagccaagcaggagatacttgagaacaaagatgtggtcgtccagcatgtgcactttgacggcctgggtcgcacgaaggatgacatcatcatttgtgagatcggcgacgtctttaaagccaagaatctgattgaggtgatgaggaagagccacgaggcaagagagaagttgctgcggctggggattttccggcaggttgacgtcctgatcgatacctgccaaggcgatgacgccctgcctaatggactggacgtcacctttgaggttaccgagctccggaggctgacaggttcatataatactatggttggcaacaacgagggttccatggtgttaggcctcaaactgcctaatctgctgggaagagctgagaaggtcactttccaattctcatatggcaccaaggagactagctacggtctctcttttttcaagcctcggccaggcaattttgagcgaaacttttcggtcaacctttacaaagttaccggacagtttccatggagctcgctgagggaaactgatcgaggaatgtcagccgaatatagttttcccatctggaaaacatctcacaccgttaagtgggaaggagtatggagggaactcgggtgtcttagccggactgcgtcatttgccgttcggaaggagagcggacacagcctgaaatctagcttgtcacacgcaatggtgattgactcccggaactcctccattctgccgcgacggggagctctcttgaaagttaaccaggagcttgcagggtacaccgggggagacgtctcatttatcaaagaggattttgagctgcagttaaacaagcagctgatatttgatagcgtgtttagcgcatctttttggggcggtatgctcgtgccgatcggtgataagcctagcagtattgcagacaggttttacctcggcggcccaacaagcattcggggattcagcatgcattcaattggtccacagtctgagggtgactacctgggcggggaggcctattgggccggcggcctgcacctatacacccccctacccttccgtcccgggcagggcggattcggggaactcttccgaactcacttttttttgaacgcagggaatctttgcaaccttaattacggcgaaggaccaaaagcacatatacgtaaacttgctgagtgcattaggtggagctacggggcagggatcgttcttaggttagggaatattgctcgcttggagttgaactattgtgtccctatgggtgtgcagactggtgacagaatttgcgatggggtgcagttcggtgccggaatacggttcttgtag

SEQ ID NO: 206550 - DNA, 780 bp, synthetic construct
  misc_feature 1..780: note = Description of Artificial Sequence: Synthetic coding sequence
  source 1..780: mol_type = other DNA
atgagcgccgagtacagcttccccatctggaagaccagccacaccgtgaaatgggaaggggtgtggagagaactcggatgtctgagtcgcacagccagcttcgctgtacggaaggaatccggtcacagtttaaaatcatccttgtcccacgctatggtgattgatagtaggaattctagcattctgccccgcaggggagcacttctgaaggtcaatcaggagttggcaggttacacggggggtgacgtgtcttttattaaggaggacttcgaactgcagctcaataagcaattaattttcgatagcgtgttttcagctagtttttgggggggcatgctcgtccctattggagataaacccagcagcatagcagatcgcttctatctgggcggaccaacctccattaggggcttcagcatgcattccatcggcccacagagtgaaggagactatcttggaggagaagcttattgggcgggggggctccatctgtataccccactaccgtttcgaccaggccagggaggctttggggaattgtttagaacacacttctttctcaatgccgggaatctttgtaatctgaattacggggaaggcccgaaggcccacattcggaaactggctgagtgcattcgctggagctacggtgctggtattgttctgcggctcggcaatatcgccagactggagttgaattactgtgtgcccatgggtgtacaaaccggcgaccgaatctgcgatggggttcaatttggtgcgggaattaggttcctatag

SEQ ID NO: 206551 - DNA, 1425 bp, synthetic construct
  misc_feature 1..1425: note = Description of Artificial Sequence: Synthetic coding sequence
  source 1..1425: mol_type = other DNA
atggccagcggcggcggcggctgcagcgccagcgagcggctgccccccccctttccgggtctggagccagaatcagaaggcgctgctgggggcagtgaacccgaggcaggggatagcgacaccgaaggtgaggacattttcactggagctgcagtcgttagcaagcatcagtcccccaagatcacaacgtctttattacctatcaacaatggcagtaaggagaacggaatacacgaggagcaagatcaggagcctcaggatcttttcgctgacgcgaccgtggaactgagtctggacagtacccagaacaaccaaaaaaaagtcctggcaaaaacccttatcagcctcccaccacaagaagcgaccaactcttcaaagccacagcctacctacgaagagctggaagaagaggaacaggaagatcagtttgacctgactgtggggatcaccgatcctgagaagatcggggacggaatgaatgcctacgtggcctacaaagtgaccacacagacttctctgcccttattccggtcgaaacagtttgccgttaaacggcggttttccgacttcctgggcctgtatgagaaactctctgagaaacattctcagaatgggtttatcgtccctcccccgcccgagaagagcttgatcggaatgaccaaagtgaaggtcgggaaggaagatagtagctcagccgaattcctagaaaagcgaagggcagctctagaaagatacctccagcgcattgttaaccatcctaccatgctgcaggaccccgacgtgcgcgagttcctggaaaaggaagagctcccccgcgccgtgggtacccagactctgtcgggagctggcttgctgaagatgttcaacaaggcaactgatgctgtctccaagatgaccattaaaatgaatgagtcggatatatggtttgaggagaagctgcaggaggtcgaatgtgaagagcagcgcctgagaaagcttcacgccgtggtggaaacgctggtgaatcatcgcaaagaattggctctgaataccgctcagttcgctaaatcactggccatgcttggaagtagcgaagacaatacagcactttcacgtgccctcagccaactggccgaagtcgaggaaaaaatcgaacagctgcatcaggaacaggcaaacaatgacttcttccttctcgctgagctgttgtcagactacatccgtctccttgccattgtgaggtgggagagtagagtgacacagtatgagagagactttgaaaggatttcaaccgtggttcgcaaagaagtaatccgattcgagaaggagaagagcaaggacttcaagaatcacgtgatcaaatacctggagacactcctctattcacaacagcagttggctaaatattgggaggctttccttcccgaagcaaaagccatttcctag

SEQ ID NO: 206552 - DNA, 1569 bp, synthetic construct
  misc_feature 1..1569: note = Description of Artificial Sequence: Synthetic coding sequence
  source 1..1569: mol_type = other DNA
atggccagcggcggcggcggctgcagcgccagcgagcggctgccccccccctttcctggcctggaacccgagtccgaaggagccgcaggcgggagcgagccagaggcgggggatagcgacacagaaggcgaggacattttcacgggggcagcggtcgtgtctaagcaccagagccccaaaataacaacatccctgctcccaatcaataacggttcaaaggaaaacggcatccatgaggagcaggatcaggaaccacaagatttatttgcggacgccaccgtagaactctctctggacagcacacagaacaaccagaagaaagttctcgcaaaaacccttatcagtctccccccgcaggaagccactaattcttcaaaaccccagcccacgtacgaggaacttgaagaagaagagcaggaggatcagttcgatcttacagtgggaattacggatcctgaaaagattggtgatgggatgaatgcatacgtggcatacaaggttaccactcagacctcattgcccctattccgatctaaacagttcgctgtcaagcgcagattctctgattttttgggcctgtacgagaaactttcggagaagcactcccagaatggctttattgtccccccccctccagaaaaatccttgatcgggatgaccaaggttaaggttgggaaagaggactctagttcagcggagtttttggagaagagacgcgctgcactagagaggtacctgcagcgcatagtcaatcatcctactatgctgcaggaccctgacgtccgcgagtttctggagaaggaggaactacccagagccgtaggaacccaaaccctttcaggagccggtttgctgaagatgttcaacaaggcaacagacgccgtttccaaaatgactattaaaatgaatgagtccgacatctggtttgaggaaaagctccaggaggtagagtgcgaggagcagagactgcgaaaacttcatgcagttgtggaaaccctggttaatcatcggaaagaactcgccctgaacacggctcagtttgcaaaaagcctggcgatgctggggtcatcagaagacaataccgcactcagccgcgccctgtcccaactcgccgaggttgaggagaagatcgagcaacttcatcaggaacaagccaacaacgacttcttcctgttagcagagctgttgtctgattacatccgcctgctggcaattgtgcgagcagcttttgaccagcggatgaagacctggcagcgctggcaggacgcccaggccacactgcagaaaaaaagggaagcggaggctcgcctcttgtgggccaataaaccagataaattgcagcaggctaaggatgagatcctcgaatgggaatctcgcgtaacacaatacgagcgcgactttgagagaattagcaccgtggttcgtaaggaggttatacggttcgagaaagaaaagtccaaggatttcaagaaccacgtcatcaaatatctggagacattactctactcacaacagcagctggctaagtattgggaagcatttctgcctgaggcaaaggccatttcctag

SEQ ID NO: 206553 - DNA, 1374 bp, synthetic construct
  misc_feature 1..1374: note = Description of Artificial Sequence: Synthetic coding sequence
  source 1..1374: mol_type = other DNA
atggccagcggcggcggcggctgcagcgccagcgagcggctgccccctccattccctggtctggaaccagagtcagagggcgctgctggtggctccgagccagaggccggagacagcgataccgagggggaggatattttcaccggggctgcggtggtatccaagcaccagtcgcccaagattaccacttcactgttgcccattaacaacggctctaaagagaacggcattcacgaggagcaggatcaagaacctcaagatctgttcgcgggtgatgggatgaacgcttatgtggcttataaggtaaccactcagacctcactgccactgtttcgcagcaagcagtttgcggtgaaaagaaggttctctgatttcctgggactgtacgagaaactgagtgagaagcattcgcagaatgggtttatcgtgccaccaccccctgagaaatctctgatagggatgacaaaagtcaaagtcggcaaggaagacagcagtagcgccgagttcctcgagaagagacgggccgccctcgaacgctacctgcagaggatcgtaaaccaccccacaatgctgcaagatccagatgtgagagagttcttagagaaagaagagctccctcgcgcagtagggactcagactctctcaggggcaggactgcttaagatgttcaacaaagccacagatgcggtctcaaagatgacgatcaagatgaacgaatcggatatatggttcgaagaaaagctgcaagaggttgagtgcgaggagcagagacttcgtaagctacatgccgtggtggaaacactggtcaatcacaggaaggagctggccctgaacaccgcacaatttgcaaaatccctggcgatgctggggtcctccgaggataataccgcactatctcgagccttgagccagcttgctgaggtggaggaaaaaattgagcaactgcaccaggagcaggccaataatgacttctttcttctggctgagctgttaagcgactatatcaggttgctcgccatcgtcagggccgctttcgatcagcgaatgaaaacatggcaacgatggcaggacgcccaggctaccctgcagaagaaacgagaagctgaggcccgactcctgtgggctaacaaacccgataaactgcagcaggcaaaagacgagatcctggagtgggagagccgagtcacacagtacgagagggacttcgagcggattagcacggttgttcggaaagaggtcatcaggtttgagaaagaaaaaagcaaggatttcaagaatcacgtcatcaagtaccttgagaccctgctctactcacagcagcagctggcaaaatactgggaggcgttcctcccggaggcaaaagcaatctcctag

SEQ ID NO: 206554 - DNA, 1374 bp, synthetic construct
  misc_feature 1..1374: note = Description of Artificial Sequence: Synthetic coding sequence
  source 1..1374: mol_type = other DNA
atggccagcggcggcggcggctgcagcgccagcgagcggctgccccccccttttcccggactggaaccagaatccgagggggctgccggcggctcagaaccggaggccggagactccgacacagaaggcgaggatatctttaccggtgccgccgtggttagcaagcaccagtctcctaagatcacgacctcacttctgcctataaataatggcagtaaggaaaacgggatacatgaagagcaagatcaggaaccccaggacctgttcgcaggggacggtatgaatgcctatgttgcctataaagttacaacacagacctccctgccactgttcagatctaaacagttcgccgtgaagcggcgtttttctgacttcctggggttatacgagaagttatccgaaaagcacagccagaatgggtttatagtgccccctcctccggaaaaatccctcataggcatgacaaaggtgaaagtcggaaaggaggattcctctagcgccgagtttctggaaaagaggagggccgcattggagcggtacctgcagcgtatcgtgaaccatcctaccatgctccaggaccccgacgtgagagagttcctggagaaagaagagttgccccgcgctgtaggtacacagaccctgagcggagccggcctgctgaaaatgttcaacaaagccactgacgcggtgagtaaaatgactattaaaatgaatgagtccgacatatggttcgaggaaaagctccaagaggtagaatgcgaagagcagcgcctcagaaagctgcacgctgtggtcgagaccctcgtgaatcaccgaaaggaactggcactgaacacagcccagtttgctaagagcttggctatgttgggaagctcggaggacaataccgccctgagtcgggcccttagtcagctcgccgaagtcgaggaaaagattgagcagctgcatcaggaacaagccaataacgatttctttctactggctgagctgctgtccgattacatcaggctgctggccattgttagggctgcgtttgaccaaagaatgaagacctggcagaggtggcaagacgcgcaagcgactctgcagaaaaaacgggaggccgaggcccggctcttatgggccaataaacccgataagctacagcaggcaaaagacgaaattttggagtgggagagtagggtgactcagtatgagcgcgattttgagcggataagcaccgtagtgaggaaggaagtcatccgatttgaaaaagagaaaagtaaggattttaagaaccacgtcataaagtacttggagacactactatattctcagcagcagctggcaaaatactgggaagccttcctcccagaagctaaagccatttcttag

SEQ ID NO: 206555 - DNA, 3018 bp, synthetic construct
  misc_feature 1..3018: note = Description of Artificial Sequence: Synthetic coding sequence
  source 1..3018: mol_type = other DNA
atggccgcccggcccagccgggccaccggcccccggggcggccagcgttctagagttaaaccccctccaggccggcggcttaaggaacagcttccacccttggccgctgctagggccgtctttgcagctgctactgcagttatcatgctgacagaggccagtctgagtatttggggctgggggagtctgggcatagttttgtttctaatcactttcggccctttcgtgatcttttacttgacattttatatactatgttttgtcggcggagggctggtggtcactttgctcttcggcaaaactaattccgagaaatacctggagcagtgcgagcactccttcctgccacctacctccccaggcgtgccgaagtgcctcgaagaaatgaagagagaagcgaggaccatcaaaatcgaccgccgcttgacaggtgctaatatcatcgatgagccactgcaacaggtgatccagttcagcttgagggattatgttcagtactggtactacacattgagtgacgatgagtcctttctcttggaaataaggcagactctgcaaaacgcgctgatacagtttgccacgcgcagcaaggagatcgattggcagccctatttcactacaagaatagtagacgactttggaacacacttgagagtgttccgcaaagctcagcagaagattacggagaaggatgaccaggtgaaagggaccgcagaagacctggtcgatacgttctttgaggtggaggtggagatggaaaaagaggtgtgtagagacctcgtatgtacctctccaaaagacgaagagggattcctaagggatttatgcgaggtcctcttatacttgctcctgcctccaggcgactttcagaacaagattatgaggtacttcgtgcgtgagatcctggccaggggtatcctgctccctctgattaaccagctgtcggaccctgactatattaaccagtacgtgatctggatgatacgtgattcaaactgtaactatgaggcattcatgaacataatcaaactgtctgataatattggggaactggaagctgtgcgggacaaggccgcagaagaactgcaatacttgaggtctctggatacagccggcgacgatattaatacaattaagaatcagattaattctctgctttttgttaagaaagtatgcgattctcggatccagcgtctgcagtcaggcaaagagattaataccgttaagctggctgcgaattttgggaagctctgcaccgtgcccttggacagcatcctcgtggacaatgtggcactgcagttttttatggactatatgcaacagactggaggccaggcccacctttttttttggatgaccgtggaggggtaccgcgtcacagctcagcaacagctcgaagttctcttgagccgtcagagggatggaaagcaccagacaaaccagacgaaaggtctgttgagagccgcagctgtaggtatttacgaacagtacctgagtgagaaggcaagtccaagggtgacagtggacgattaccttgtcgcgaagttggccgacactctaaatcacgaagacccaacgcccgagatcttcgacgacattcagcgcaaggtgtacgagctcatgctccgtgatgagcgtttctatccctcttttcgccagaacgctctatacgtccgcatgctggccgaactggacatgctgaaagatccttcatttagggggtccgacgacggggatggagaatcattcaatggttcaccaaccggaagcattaacctcagcttggatgatctctctaatgtgtcttccgacgacagtgtgcaactacacgcctacattagtgataccggcgtctgtaacgaccacggcaagacctacgccctgtatgcaatcaccgtgcaccgccgtaacctgaatagtgaagaaatgtggaagacttatcggcgatatagcgacttccatgactttcatatgcgtatcacagagcagttcgagagtctttcctctatcctcaagttgccaggtaaaaagacgttcaacaatatggaccgcgatttcttggagaaacgcaaaaaagatcttaatgcctatctacagctactgctggcgccagagatgatgaaggcaagtcctgccctggcacactacgtatatgatttccttgagaataaagcgtattctaaggggaaaggcgatttcgcccgaaaaatggatactttcgttaatcccttacgcaattccatgagaaatgtgagtaatgccgtaaagtccttgcccgactctctagctgagggaatgaccaaaatgtcagacaacatgggaaaaatgtccgaacgacttggccaggacattaaacaatctttttttaaagtgcccccgctgataccgaaaaccgattccgaccccgagcaccgtagagtcagcgctcaactggatgataacgtcgacgacaatatacctttgcgcgtgatgctgttacttatggatgaggtttttgatctcaaggaacgcaatcagtggctgaggcgaaatataaaaaatctgctccagcaactcatccgagccacgtacggcgatacaattaaccggaaaatcgtcgatcacgtggactggatgacaagcccggaacaggtggcagattccgtgaagcggttccgggacgcattctggccaaatggcatcctcgcagaagccgtgccgtgcagagataagagtattaggatgcgtacgcgcgtagctggcaaaaccaagcttctggccatcatgcctgatgagttaaagcatattatcggcgccgagaccaccagaaaagggattcttcgggtgttcgagatgttccagcacaatcagctgaaccgcagaatggtctacgtattcctcgaaggcttcctggaaacactgtttccacagtataaattccgtgagctcttcaataaattgcactccaggagcaaacagatgcagaagtacaagcagaagctgcagaccacccaggcgccgagcctgcagaagcgatag

SEQ ID NO: 206556 - DNA, 2874 bp, synthetic construct
  misc_feature 1..2874: note = Description of Artificial Sequence: Synthetic coding sequence
  source 1..2874: mol_type = other DNA
atgctgaccgaggccagcctgagcatctggggctggggcagcctgggtatcgttctgtttctaattacattcgggccattcgtgattttttatctgactttttatatcctgtgtttcgttggcggagggcttgtggtgaccctgctgttcggaaagaccaactccgaaaaatatctcgagcagtgcgagcactcctttctgccacctacctcacccggggtaccaaaatgtctggaagaaatgaaaagagaagctcgcacaataaaaatagacaggcgcttgaccggagccaatatcatcgatgaaccattgcagcaggttatacaattcagtctgagggattacgtccagtactggtactacacattaagcgacgacgaatctttccttctggagattcgacagacattgcagaatgcattgatacagtttgccactcgtagcaaggagattgactggcaaccatactttactactcggatcgtggatgatttcggaacacacttgcgggttttccgcaaggcccagcagaagatcaccgagaaagacgaccaggttaaaggaacagccgaggatctcgtggacacctttttcgaggtggaggtagagatggaaaaggaggtatgtcgcgatctggtgtgcacctcccccaaggatgaggaaggcttccttagagatctgtgcgaagtcctcctgtatctgctgttgccccctggggactttcaaaacaaaataatgagatacttcgtgcgggaaatacttgcccgaggtattctcctcccactgatcaatcagttgtcggatcctgattatatcaaccagtacgtgatatggatgatccgggactctaactgtaactatgaagcgttcatgaatattattaaacttagcgacaatatcggcgagctggaggcagtgcgggacaaggccgcggaagagttgcagtatttgcggagcctggacaccgcaggtgatgacatcaatactatcaaaaatcagattaactcattactgttcgtcaaaaaagtttgtgatagtaggattcaaagactgcagagtggcaaagagatcaacaccgtgaaactggcagcaaactttggcaagctgtgtactgtgcctttagattccatcctggtggataatgttgccttgcagttcttcatggactacatgcagcagactggtggacaggcccatctctttttttggatgaccgtggaggggtacagagtgactgctcagcaacagcttgaggtcttgctgagtagacagcgggacggaaagcaccagacgaaccagactaagggcctgctcagagctgcggcggtggggatctatgagcagtacctcagtgaaaaggccagtccacgtgtgaccgtggacgattatctcgtcgctaagttagcggacactctcaatcatgaggatccaactcctgaaatcttcgatgatattcaaaggaaggtgtacgagctgatgctcagagatgagcgtttctatccctcctttcgccagaatgcgttgtacgtcagaatgctagctgaactcgatatgttgaaagatcctagtttccgcggctccgacgacggagacggtgagtcattcaacggatcccctaccgggtcaatcaatctgtccctggacgatctaagcaatgtgtctagcgacgactctgtgcagctgcatgcctatattagtgacacgggcgtgtgcaatgaccacggcaagacatatgcactgtacgcaatcacagtgcataggcgcaatctgaacagtgaggaaatgtggaagacttacaggcgttacagcgacttccacgattttcacatgagaattaccgagcagttcgaatccttgtcttctattttgaaactcccaggaaaaaaaacattcaacaacatggatcgcgacttcctagaaaagaggaaaaaggatttgaatgcctacctgcagcttctgctggccccagaaatgatgaaggcctcaccagcactggctcattacgtatacgactttctggaaaacaaggcctattcaaagggaaagggagactttgcacggaaaatggacacttttgttaatcctcttcggaactcaatgagaaacgtgtctaatgccgtcaagtctctacccgacagcctggccgaaggcatgacgaagatgagcgacaatatgggcaaaatgtccgagaggctggggcaggacattaagcagagctttttcaaggtcccgccactgattccgaaaaccgatagtgaccctgagcatagacgcgtctcagctcaactggacgacaacgtggacgacaatatacctttgagagttatgttgcttctgatggatgaggtgttcgacctcaaagagcgtaatcagtggctccggcggaatataaagaacctgctgcagcagctgattcgggccacatacggcgacacaattaatagaaaaatcgtcgaccacgttgattggatgacctcccccgagcaggtggcagattccgtaaagaggtttagggacgctttctggccaaacggaatacttgcagaggctgtcccctgcagagacaagtccataagaatgcgcacacgcgtagccggaaaaacaaagctcctcgccattatgccagatgaactgaaacacataatcggcgcggaaaccacacgcaaagggatccttcgggtctttgagatgtttcagcacaaccaactaaataggcgaatggtttacgtgttcctggaaggatttttggagacactgtttccccagtataaattccgagagctcttcaataagttgcactctaggagcaaacagatgcagaaatacaaacagaaactccaaaccacccaggcaccttccttgcagaagaggtag

SEQ ID NO: 206557 - DNA, 771 bp, synthetic construct
  misc_feature 1..771: note = Description of Artificial Sequence: Synthetic coding sequence
  source 1..771: mol_type = other DNA
atgagccggcaggccaaggacgacttcctgcggcactacaccgtgtcagatccacgaacacaccccaaaggctacacagaatacaaggttaccgctcagttcatatccaagaaagatcccgaggacgttaaggaggttgtcgtctggaagaggtatagcgattttaggaagctccatggggaccttgcttacacgcacagaaatctgtttcgaaggctggaagagttcccagccttccctagagcccaggtattcggcagattcgaagccagcgttatcgaagaaaggaggaagggggctgaagatctcctgagattcactgtccacattcccgcactaaacaacagcccacaactcaaagagttttttcgaggcggtgaggtcaccaggcccctggaggtgtctcgcgatctgcacatccttccgccgcctctgatacctacacctccaccagacgacccgcggctcagtcagctgctgcccgcagagcgcagaggactggaggagctggaagtgccagtcgaccccccaccttcctcccccgcacaggaagccctcgaccttctgtttaactgcgaatccaccgaagaagcctccggcagcccggcccggggtcctctgactgaggctgagttagcactcttcgatcccttttcaaaggaaggtgatccgcttccagctcgccaggagggcgtgaaaaaaaaagccgctgagtatcttaaaagagccgaggaaatcctcaggctgcacctgtcacagttacctccttag

SEQ ID NO: 206558 - DNA, 1029 bp, synthetic construct
  misc_feature 1..1029: note = Description of Artificial Sequence: Synthetic coding sequence
  source 1..1029: mol_type = other DNA
atgagccggcaggccaaggacgacttcctgcggcactacaccgtgtcggatcctcggacccatccaaagggctacaccgagtacaaagtcacagctcagtttatcagcaaaaaagaccctgaagatgtgaaggaggtcgtcgtgtggaaacgctattccgatttccgcaagctacatggtgatttggcttatacccaccgcaatctgttcaggcggctggaggagtttccggcttttcctcgcgcacaggtatttgggcgattcgaagcctccgtgattgaggagcgcagaaagggcgcagaagatctcctgcgctttacggttcacattcctgctctgaacaattctccccaattgaaggaattctttcgaggcggggaagtgacacggcctctagaggtgtcccgcgatctgcacattttgccgcccccccttatccctacccctccccccgatgatccccggctgtctcagctgttacctgccgagcgccgtggactggaggagctagaagtcccagtggacccaccaccatcgtctcctgctcaagaggcattggacctgcttttcaactgtgaatcaactgaagaggctagcggttcccccgccagaggccctctcaccgaagccgagctggccctgttcgacccattttccaaggaagagggcgccgctccgtctcccacccacgtcgcggaactggcgacaatggaggtcgaaagcgcgcgtttggatcaggagccttgggaacctggcggtcaagaagaggaggaagatggcgaaggaggtccgacacctgcttacctgagtcaggccaccgagcttatcacacaggcactgcgtgatgagaaggctggcgcctacgctgctgcactgcaggggtacagagatggtgtgcatgttttattgcaaggcgttcctagcgatcctctgcccgctcggcaggagggcgtgaagaagaaggctgccgaatacctgaaacgggcagaagaaattttgcggctgcatctttcccagttaccaccctag

SEQ ID NO: 206559 - DNA, 1608 bp, synthetic construct
  misc_feature 1..1608: note = Description of Artificial Sequence: Synthetic coding sequence
  source 1..1608: mol_type = other DNA
atgagcgagggcgagagccagaccgtgctgagcagcggcagcgaccctaaggtggaatcctctagcagtgccccagggctgacatccgttagccctcctgtgacgtccaccacaagtgcagcttccccggaagaagaggaggagtctgaagacgagagcgagattctcgaagaatcgccatgtgggagatggcagaagcggcgcgaagaagtgaaccagcggaatgttcctggcattgactctgcgtatttagctatggatactgaagagggggtcgaagtggtgtggaacgaagtccagttctcagaacgcaagaattacaaactccaagaagagaaggtgagagcagtgttcgacaacctgatccagctggaacatctcaacatcgtcaagttccacaagtactgggccgatattaaggagaacaaagcacgggtgatttttatcacagaatacatgagcagcggatccctcaagcagtttttaaaaaaaacaaaaaaaaatcacaagaccatgaacgaaaaggcctggaaacgctggtgcactcagatcctttccgcactatcttacttgcactcctgcgaccccccaatcatccatggtaacctcacctgtgacaccatttttatccagcacaatgggctgattaaaattggcagtgtcgcccctgacactattaacaaccacgtcaagacctgtcgcgaagagcagaaaaatctgcatttctttgcaccagaatatggcgaagtaactaatgtaactaccgcagtggatatttatagtttcggcatgtgcgctctcgaaatggcagtcctggaaatccaaggtaatggggagtcaagctatgttcctcaggaggccatttcatcggccattcagttgcttgaagacccattacagagggaattcatccaaaagtgtttgcaatcggagcctgcccggagaccaaccgctagggaacttctgtttcaccccgcacttttcgaagttccctcccttaagctgctcgccgctcattgtatcgtgggacatcaacacatgatccctgagaacgccttggaggagatcacaaaaaatatggatacttctgcggtgctggctgagatccctgctggtcccgggagagagcccgtgcaaacactttattcccaatctcccgcgcttgagttggacaagttcctcgaagatgtacggaatgggatctaccctttgactgcgtttggtctcccaagaccccagcagcctcaacaggaggaagtaacttccccggtggtccctccttctgtcaagacacccaccccagaacccgccgaggttgaaactagaaaggtcgtcctgatgcagtgcaacatcgagtccgtggaagagggcgtgaaacatcacctgacactcctcctgaagctggaggacaagttgaaccggcacttgtcgtgcgacctcatgcccaatgagaatatccctgaactcgctgctgaattggtccaattggggtttatcagcgaggccgaccagtctagacttacctcattgctggaagaaactttaaacaaattcaattttgcccgcaatagcaccttaaattccgctgccgttacagtcagtagctag

SEQ ID NO: 206560 - DNA, 1338 bp, synthetic construct
  misc_feature 1..1338: note = Description of Artificial Sequence: Synthetic coding sequence
  source 1..1338: mol_type = other DNA
atgcacttcagcatccccgagaccgagagccggagcggcgacagcggaggaagtgcttatgttctccgcaaagaatacggagccaacgtgttacccgcgttcccgccaaaaaaattattctccctgactcccgccgaagttgagcagcgaagggagcagctcgagaaatacatgcaggccgtcagacaggatccactacttggatctagcgaaacatttaacagcttcctccgtcgcgcccagcaggagacccaacaagttcccaccgaggaggttagtctggaagtgcttcttagtaacggtcaaaaagtcctcgtcaatgttctgacgagcgatcagacagaggatgtgttggaggccgtcgccgccaagctggacctgccggatgatttgatcggatacttcagcctctttctggtcagagaaaaagaggacggcgcattctctttcgtcagaaagctgcaggagtttgaattaccatacgtgtctgtgacgtctttacggtctcaggagtataagatcgtacttcgcaaatcttactgggacagcgcctacgatgacgacgtgatggaaaacagagtgggactgaacctgttatatgcccagaccgtgtccgacatagaaaggggctggattctagtaacaaaagaacagcacagacagcttaagtcactgcaggagaaggtgtctaagaaagagtttttgcggttggcgcagacattacggcattacgggtacctacggttcgatgcctgtgtggctgactttccagaaaaagactgcccagtggtcgtaagcgccggcaattcggagttgagcttgcagctgagattacccggccagcaactccgtgagggttcattcagggtgacccggatgaggtgctggcgcgtcacatctagtgtccccctgccttcaggtagcacatcctcccctgggcgaggccgcggcgaggtgcggctcgaactggcattcgagtatctaatgtccaaggatagactgcagtgggtcacaattacctctccccaggcaatcatgatgtctatatgcctccagtccatggtggacgagctaatggtgaaaaagagcggagggtctatccgtaaaatgctcaggcgccgggttggcgggactctacggaggagcgactcccagcaggcagtgaagagtccgccacttctggaaagtccggatgctaccagagaatccatggtgaaactctcgtccaaactgagtgctgtttctttacgaggaataggcagtccgtcgacagatgcctctgctagcgacgttcatggaaacttcgctttcgagggtataggggacgaagacctgtag

SEQ ID NO: 206561 - DNA, 771 bp, synthetic construct
  misc_feature 1..771: note = Description of Artificial Sequence: Synthetic coding sequence
  source 1..771: mol_type = other DNA
atggagaaccgggtgggcctgaacctgctgtacgcccagaccgtgagtgacatcgagcgggggtggatactggtgacaaaagagcagcatcggcagttgaaatcactgcaagagaaggtcagcaaaaaggagtttctccgcctcgcgcagactctgcggcactatggataccttaggttcgacgcgtgcgtggccgacttcccagaaaaagactgcccagtggtggtgagcgccggaaatagcgaactgtctttgcagctacgactacccggccaacagcttagagaggggtcatttagggtgaccagaatgaggtgctggcgggtgaccagttcagttcctctgccatcaggttcaacatcttcacctggccgagggcgcggggaggttcggttggaactggccttcgagtacctgatgagcaaagacagattacagtgggtaacaattacatctccacaggcgataatgatgagtatctgtctgcagtctatggtggacgagctgatggtgaagaaatctggcggatcaattaggaagatgttaaggagacgagtcggggggactcttaggagatccgacagccaacaggcggtgaaaagtcctccacttcttgaatctcccgacgccacacgagaatccatggtcaagctctccagcaaattatcagcagtcagtctgagaggtattgggagcccctccacagatgcaagtgctagtgatgttcacggaaattttgcatttgaggggatcggggacgaggacttgtag

SEQ ID NO: 206562 - DNA, 771 bp, synthetic construct
  misc_feature 1..771: note = Description of Artificial Sequence: Synthetic coding sequence
  source 1..771: mol_type = other DNA
atggagaaccgggtgggcctgaacctgctgtacgcccagaccgtgagtgacattgaaaggggctggatccttgtcacaaaggaacagcaccgacagttgaagtccttgcaagagaaagtttccaagaaggagttccttcgattagcacagaccctgagacactatggctacttacgcttcgacgcctgtgtggccgatttcccagagaaagactgccctgtcgtagtgtctgctggcaatagcgagctcagtctccaattaagactgcccgggcaacaactgcgcgagggtagtttcagggtgacaaggatgcggtgctggagggtgacatcctccgtgccgctacctagcggatcgacatcctcccctggcagaggacggggcgaagttagattggagttggctttcgaatacttgatgtccaaggatcggctgcagtgggttactatcactagcccgcaagctatcatgatgagcatatgcctccagagcatggtcgatgaactaatggtcaagaaaagcggcggcagcattcgtaaaatgctgagacggcgggtgggcggcacactaagaagaagcgactcgcaacaggcggttaagtctccaccgttgctcgaaagccccgacgcaacccgcgaatctatggtgaaactcagttcaaaactgtccgcggtgagcctgcgggggatagggagcccctcaactgacgcaagcgcttcggacgtccatggaaattttgctttcgagggaattggcgatgaggacctttag

SEQ ID NO: 206563 - DNA, 1560 bp, synthetic construct
  misc_feature 1..1560: note = Description of Artificial Sequence: Synthetic coding sequence
  source 1..1560: mol_type = other DNA
atggccgccgagcgggagcccccccccctgggcgacggcaagcccaccgacttcgaggatctggaagacggagaagacctgtttacgagcacggtttcaactctggagagctctccctcatcccctgaacccgcctctctgccagccgaagatatttcagccaactctaatgggccaaaacccaccgaggtggttctcgacgacgatagagaggacctgttcgcagaggctaccgaggaagtgagtctggacagccctgagcgcgaacccatcctgagctccgaaccctctcccgcggtcacacccgtcacaccaacaacactgatcgcgcccagaattgaatcgaaaagcatgtcagcacctgtcatttttgacagatcccgggaagagatagaagaggaagcgaatggagatatttttgatatagaaatcggggtgtcagaccccgagaaagtcggagacggtatgaacgcctatatggcttatcgggttactaccaagacaagcttgtctatgttctcaaaatctgagtttagcgtgaaacgacggttttcagactttctgggtttacactctaaattggcctctaagtaccttcacgttggctatatagttccccctgctcctgagaagagtatcgtgggaatgacgaaggtgaaagtcggaaaggaagacagcagttccactgagtttgtagagaaacggcgggctgcactggaacggtacctgcagagaaccgtgaagcatcctacacttcttcaggacccagacctccgtcagtttttggaatcttctgagctccccagggctgtgaatactcaggccctctcaggcgcgggtattctccgcatggtgaataaggcagctgatgcagtgaacaaaatgaccataaaaatgaatgaaagcgacgcttggttcgaagaaaagcaacagcagttcgagaacctagatcagcagctcaggaagctgcatgtgagcgtggaagccctggtatgccacagaaaagagctgtctgccaacaccgctgctttcgccaaatcagccgctatgttaggcaattcagaggatcataccgcattatctcgagctctaagtcagcttgccgaggttgaagagaaaattgatcaactgcatcaggaacaggctttcgccgacttctatatgttctctgaactgctcagcgactacatcagactgatcgcggccgtgaaaggggtttttgatcacaggatgaagtgctggcagaaatgggaggatgcccaaattactcttctgaagaagcgagaggctgaggctaaaatgatggttgccaacaaacccgacaagattcagcaggcaaagaatgagattcgcgagtgggaggcgaaagtgcaacagggagaaagggactttgaacagatttcaaaaacgatcagaaaggaagtcgggcggttcgaaaaggaaagagtgaaggactttaaaactgttatcatcaagtacttggagtctctggtacagacacagcagcagcttatcaaatactgggaggcttttttgcccgaggccaaagctatcgcctag

SEQ ID NO: 206564 - DNA, 390 bp, synthetic construct
  misc_feature 1..390: note = Description of Artificial Sequence: Synthetic coding sequence
  source 1..390: mol_type = other DNA
atggccagccccgagcaccccggcagccccggctgcatgggccccataacacagtgcaccgcccgaacccaacaagaggcacccgccacgggtcctgatttacctcacccaggcccagacgggcacttggatacccatagcggcctcagctcaaattcatcaatgactactcgggaattgcagcagtactggcagaaccagaagtgccggtggaaacacgtcaagttactgttcgaaattgcatcggctaggatagaggagaggaaagtgtcaaagttcgtcatgggcaaatcccgacctggggagatgacctacccaggctctcggggagagacaggtaccgcacccgagccggacccgagatgtcctcggcagtccgatatgctgtag

SEQ ID NO: 206565 - DNA, 951 bp, synthetic construct
  misc_feature 1..951: note = Description of Artificial Sequence: Synthetic coding sequence
  source 1..951: mol_type = other DNA
atggccagccccgagcaccccggcagccccggctgcatgggccccatcacacagtgcaccgcacggacccaacaagaggctcccgccaccggtccagatctcccccatcccgggccagacggtcacctggatacccatagcggcctgtctagcaactcttctatgaccacgcgagagctgcagcaatattggcagaaccagaagtgcaggtggaaacacgtgaagttgctgtttgaaattgcgagcgcgagaatcgaggaaagaaaggtctcaaaattcgtggtctatcagataattgtaatacagacgggctcgttcgacaacaacaaggccgtgcttgagcggaggtacagcgacttcgccaagcttcagaaggcgctgttgaaaactttcagagaagaaattgaggatgtcgaattccccaggaagcatctcacggggaacttcgcagaagaaatgatatgtgaaagacgccgggccctacaagagtacctgggtctgttatacgcaatacggtgcgtcagaaggagtcgagagtttctggatttcctgacaaggcccgaactgagggaagcttttggctgcttgagggcaggccagtatccccgcgcactcgaacttttactgagagtactgcccctgcaggagaaactgacagctcactgccccgcagccgctgttccggcgctatgtgcagtcttgctgtgtcacagggacctggaccggccggctgaggcttttgcagctggtgaacgagccctgcagcgtctgcaggcccgagaagggcaccgctattacgctcctctgctggacgcaatggtacgcctggcatacgctttgggtaaggactttgtgacattgcaggaacgcctcgaggaaagtcagctgaggcggcctacgccccgtgggatcacgttgaaggaattaacagttagagagtatctacactag

SEQ ID NO: 206566 - DNA, 459 bp, synthetic construct
  misc_feature 1..459: note = Description of Artificial Sequence: Synthetic coding sequence
  source 1..459: mol_type = other DNA
atggccagccccgagcaccccggcagccccggctgcatgggccccataactcagtgtaccgccagaacacagcaggaagcaccagccacaggacctgatctgcctcatccaggaccggatggacatctcgatacccacagtgggctgtctagtaatagctctatgactaccagggagttgcagcaatattggcaaaatcagaagtgccgctggaaacacgtcaagttgctgtttgagattgcaagtgcccgcatcgaagagaggaaagtttctaagttcgtcgtctaccagatcatagttatccaaacaggcagtttcgataacaacaaggcagttctggaacgacggtacagcgacttcgtgaccctgcaagagcgcctcgaggagagccagctgaggcgaccaacccccagaggtattacgctcaaagagctcacggtccgagagtatcttcattag

SEQ ID NO: 206567 - DNA, 309 bp, synthetic construct
  misc_feature 1..309: note = Description of Artificial Sequence: Synthetic coding sequence
  source 1..309: mol_type = other DNA
atggccagccccgagcaccccggcagccccggctgcatgggccccatcacacagtgtactgcacggacacagcaggaggcgcctgctacaggcccggacctgccacatcctggcccggacggtcacctggacacccattccggcttgtcctctaattctagcatgactacccgagagctgcaacagtactggcaaaaccaaaagtgtcggtggaagcacgtgaagctgttgttcgagattgcttccgctcgaatcgaggagcgcaaggtgtccaagtttgtcgctcccgctcctgatgccactccatag

SEQ ID NO: 206568 - DNA, 807 bp, synthetic construct
  misc_feature 1..807: note = Description of Artificial Sequence: Synthetic coding sequence
  source 1..807: mol_type = other DNA
atgcagcagatccggccccccttcatccggggccccccccaccacgcttctaaccctaactctccgctgtcaaatcccatgttacccgggatcgggccacccccaggaggaccccgtaacctaggccccaccagctctccgatgcaccggcccatgctcagtcctcacatccaccccccctctacacctacaatgcctgggaatcctcctggcctgctgccgccacctccccctggcgccccgctaccaagtctgcccttccctccagtgagcatgatgccgaacgggccaatgcccgtgcctcagatgatgaacttcggcctgccctcgctggcccctcttgtgcccccgcctacactgctggttccttatcctgtgatcgtcccacttcccgttcctatcccgattcccattcctatccctcacgtcagcgattctaagccacctaaaaagctgctaagtccagaagaaccggctgttagcgaactggagtccgttaaggaaaataattgtgcctcaaactgtcacctggatggtgaagcggcgaaaaagctcatgggggaggaagcccttgccgggggagataaaagcgatcccaatctcaataatcctgctgatgaagaccatgcgtacgccctgagaatgttacccaaaacaggatgtgttatccaaccagtgccaaagcctgcggagaaagcagcaatggccccatgcatcataagctctcccatgctatcagcgggacctgaggatctggaaccaccattaaaacgcagatgtctgaggatccggaaccaaaacaagtag

SEQ ID NO: 206569 - DNA, 423 bp, synthetic construct
  misc_feature 1..423: note = Description of Artificial Sequence: Synthetic coding sequence
  source 1..423: mol_type = other DNA
atggccgagaccgtggccgacacccggcggctgatcaccaagccccagaacctaaacgatgcctacgggcctcctagtaacttcctcgaaatagataccaatctacctattttcaaactgaaggaatcgaccgtgaggagacggtactcagactttgaatggctgagaagcgagctcgaaagggagagtaaagttgtggtacctcctctcccgggaaaggctttcctcagacagctgcccttccggggggacgatggaatcttcgatgataatttcattgaggaacgaaagcagggattggagcagtttattaataaagtggcgggccaccccttggctcagaacgagcgatgcctgcatatgtttctgcaagatgagatcattgataagtcatatacccctagcaagatcaggcatgcctag

SEQ ID NO: 206570 - DNA, 342 bp, synthetic construct
  misc_feature 1..342: note = Description of Artificial Sequence: Synthetic coding sequence
  source 1..342: mol_type = other DNA
atggccgagaccgtggccgacacccggcggctgatcaccaagccccaaaatcttaatgacgcctatggacccccctcgaatttcctcgagatagatgtctccaatcctcagacagtcggggtcgggcgcggcagatttacgacttatgagattagagtcaagacaaacttgcctatttttaagctgaaagaatccacagtcagacggcggtacagtgatttcgaatggttgaggtctgaactggagcgggaaagcaagccatgcctccggatgacctctgaggcacggtctcacggcaggacttggtgcgcgcagaacgacgaaaaattgttttgcgattag

SEQ ID NO: 206571 - DNA, 393 bp, synthetic construct
  misc_feature 1..393: note = Description of Artificial Sequence: Synthetic coding sequence
  source 1..393: mol_type = other DNA
atggccgagaccgtggccgacacccggcggctgatcaccaagccccagaatcttaacgacgcctacgggcccccatccaacttcctggagattgatgtatccaatcctcagactgtgggcgtgggaagaggccggttcactacctacgaaattcgggtgaaagtggtggtcccccccctgcccggaaaggcattcctccgccagctaccctttagaggggacgatgggatttttgatgacaacttcatcgaggaaagaaagcagggtcttgagcaattcataaacaaagtcgccgggcatcctctcgcccaaaacgaacgttgtcttcacatgttcctgcaggatgagattattgataagtcatacacccctagcaaaattcgacatgcatag

SEQ ID NO: 206572 - DNA, 1353 bp, synthetic construct
  misc_feature 1..1353: note = Description of Artificial Sequence: Synthetic coding sequence
  source 1..1353: mol_type = other DNA
atggagcaggccccccccgaccccgagcggcagctgcagcccgcccccctggagcccctgggttcaccagatgccggtctgggtgccgccgtcgggaaagaagcagaaggagcgggcgaggagagttccggcgtcgatactatgactcataacaatttctggctcaagaaaatcgagatttcagtgagtgaagctgagaagcgcacaggcagaaacgctatgaatatgcaggagacttacaccgcatacctcatcgaaactcgctctgtagagcacaccgacggccagtccgtgctgactgacagcctctggcggcgatatagtgagttcgagctgcttcgtagctacctgctggtatattatccacatatcgtggtaccacccttgccagagaagagagcagagtttgtgtggcacaagttgagtgctgacaatatggaccctgacttcgtcgaaagaaggcgaatcggactggagaacttcctgctaagaatcgcatcgcacccgatcttgtgccgggataagattttttatctatttctgacgcaggaaggcaattggaaagagaccgtgaatgaaaccggctttcagctgaaagcagatagccgccttaaggctttgaatgctaccttcagagttaagaaccccgataagaggtttaccgacttgaaacactactctgacgagttgcagtccgtgatctcccacctcctgagagttagagcccgtgtcgcggatcgactgtatggtgtatataaagtgcatggcaattatggaagagtgttttccgagtggtccgctatagaaaaggagatgggggacggactgcagtccgcggggcatcacatggacgtgtacgcctcgagtattgacgacattctcgaagacgaggagcactacgctgaccagctaaaagagtatctgttttacgccgaagctctgagggctgtgtgtcggaagcacgagctcatgcagtacgacttagaaatggccgctcaggacctggcttccaagaaacagcaatgcgaagagctggtgactggcaccgtgaggacgttctccctcaagggcatgacaacgaagctgttcggtcaggagacacccgaacagagggaagccagaattaaggtgctcgaagagcagattaatgaaggagagcagcaattgaaatcaaagaatctggaagggcgcgaattcgtcaagaacgcctgggccgatattgagagatttaaggagcaaaaaaaccgggatctcaaggaggccctgatctcctatgcggtcatgcagatctctatgtgcaagaaagggatccaggtatggaccaacgcgaaagagtgttttagcaaaatgtag

SEQ ID NO: 206573 - DNA, 918 bp, synthetic construct
  misc_feature 1..918: note = Description of Artificial Sequence: Synthetic coding sequence
  source 1..918: mol_type = other DNA
atggaccccgacttcgtggagcggcggcggatcggcctggagaacttccttctgaggattgcaagtcaccctatcctgtgcagagacaagattttttatctatttctcacacaggagggaaattggaaggagaccgtcaacgaaacagggttccagttgaaggcagactctaggttgaaggccctcaatgctactttcagagtgaagaatcctgataagcgattcactgatctgaaacattactccgacgaactccaatccgttatttcccacctgctgcgcgttagggcccgggtagccgacaggctgtatggcgtctataaagttcatgggaattacggccgggtcttctccgaatggtcagcaatcgagaaggaaatgggcgatggcctgcagtccgcagggcatcatatggacgtatatgcgtccagcatagacgatatcctagaagatgaggagcactatgcggatcagcttaaggaatatttattctacgcggaagccctcagggctgtgtgtcgcaaacatgaactcatgcagtacgacctagagatggctgctcaggacttggccagcaagaaacagcagtgtgaggaattggtcactggaacagtgcgcactttctctctgaaggggatgacaaccaaattatttgggcaggagactcccgaacaaagggaggcccggattaaagtgctcgaagagcagataaacgagggcgaacaacagctcaaatccaaaaacctggaggggcgcgagttcgtgaagaatgcttgggcggacattgagcggttcaaggaacagaaaaaccgcgatctgaaggaagccctaattagctatgcggtgatgcaaatttccatgtgtaaaaaaggcatccaggtgtggacaaacgctaaggaatgcttctcaaaaatgtag

SEQ ID NO: 206574 - DNA, 1215 bp, synthetic construct
  misc_feature 1..1215: note = Description of Artificial Sequence: Synthetic coding sequence
  source 1..1215: mol_type = other DNA
atggccgccgtgcccgagctgctgcagcagcaggaggaggaccggagtaagctgcgtagcgtaagcgtagatctgaacgtggatccatccttgcagatcgacataccagacgctctcagcgagcgcgacaaggtaaaatttacggtgcacaccaagaccacgctgccaaccttccagagcccagagttctctgtaacccgccaacatgaggacttcgtatggttacacgacactctcatagaaacgactgattacgctggcttgataataccacctgctcctaccaaacctgactttgacggcccgagagaaaagatgcagaaacttggcgaaggggagggcagtatgacaaaggaagaatttgccaagatgaaacaagagttggaagctgagtacctggctgtgttcaaaaaaaccgtgagctctcatgaagtgttccttcaacggctttcaagccatccggtattgagtaaagaccgcaatttccacgtgttcttggagtatgatcaagatctgtctgtccgcaggaaaaataccaaggaaatgttcggcggcttctttaagtctgtagtcaagtctgctgacgaggtgctttttactggagtaaaagaggtggacgatttctttgagcaggagaagaactttctcattaattattataatcgtataaaggacagttgtgtgaaagcagacaagatgactcgcagccataaaaacgtagcagatgattacatccacactgccgcctgtctacactcccttgctttggaggagcccaccgtgataaaaaaatacctcttgaaggtggccgaactctttgagaagctgaggaaagtagagggccgagtttcttccgatgaagacctcaaactaaccgaactgctgagatactatatgttaaatattgaggcagccaaggatctgctgtatagaaggactaaagccctcattgactacgagaatagcaataaagctttggataaagcacgactgaagagcaaagatgtgaaactggccgaggctcatcagcaggaatgctgtcagaaatttgagcagttgagtgaatcagctaaagaggaactgatcaatttcaagagaaaacgcgtggccgcatttagaaagaacctgatcgaaatgagcgaacttgagatcaagcacgcgcggaataacgtttcccttctacagagctgcatcgacctattcaagaacaactag

SEQ ID NO: 206575 - DNA, 1215 bp, synthetic construct
  misc_feature 1..1215: note = Description of Artificial Sequence: Synthetic coding sequence
  source 1..1215: mol_type = other DNA
atggccgccgtgcccgagctgctgcagcagcaggaggaggaccggtccaaacttagatcggtgagtgttgatctcaacgtggacccttcgctccaaattgacattcctgacgctctgagtgagcgggacaaagttaagttcacagtgcacaccaaaacaaccttaccaaccttccagtcccccgagttctctgtcactagacagcacgaggatttcgtatggttacacgataccttgatcgaaactacagactatgccggacttataatcccccctgcccccactaaaccggacttcgacgggcctcgggagaaaatgcagaaactaggagaaggagaaggcagtatgactaaggaggagttcgcgaaaatgaagcaggagctcgaggcagagtatctcgctgtgtttaagaagacagtttcgagtcatgaggtgttccttcagcgcctgtcttcccaccctgtcctcagcaaggaccgcaactttcacgtgttcctggagtatgatcaagatctttcggttagacggaagaatacgaaagagatgtttggaggcttttttaaatcagtcgttaaatccgctgatgaagtgctcttcactggtgtcaaggaggtggacgacttctttgagcaggaaaaaaacttcctgatcaactattataacagaatcaaggacagctgcgtgaaggctgataagatgacgcgatcacacaagaatgtggccgacgactatattcacacggccgcctgccttcattctttggccttggaggaaccaactgttattaaaaagtacctgttgaaagttgctgagctgttcgagaagctgaggaaggtggagggccgcgtctcatccgatgaagacctgaaacttactgaactgctgcggtactatatgctaaatatcgaggccgctaaggacttgctctatcgcaggacgaaggcgttgattgactatgagaacagcaacaaagcccttgataaggcccggctgaagtctaaagacgtgaaactggcggaagcgcatcagcaggagtgttgccagaaattcgaacagctgagtgaaagtgccaaggaagagcttattaatttcaagagaaaacgggtggccgctttcagaaagaaccttattgagatgagtgaactcgagataaagcatgccaggaacaacgttagtttgctccagtcatgtattgatttgtttaaaaacaactag

SEQ ID NO: 206576 - DNA, 687 bp, synthetic construct
  misc_feature 1..687: note = Description of Artificial Sequence: Synthetic coding sequence
  source 1..687: mol_type = other DNA
atggccgccgtgcccgagctgctgcagcagcaggaggaggaccggagcaagaccactctgcccaccttccagtcccccgagttcagcgtgacgcggcagcatgaggacttcgtgtggcttcacgacaccctcattgaaactactgattacgctggtctgattataccaccggcacctactaagccagactttgatggcccacgagaaaaaatgcaaaagcttggggagggggaggggtctatgaccaaggaggaattcgccaaaatgaagcaggagctcgaagcagagtacctagccgtttttaaaaagaccgtttcttctcatgaggttttcctccagaggttatcgtcccatcccgttttatcgaaggatcgcaatttccacgtctttctggaatatgaccaggatcttagtgtccgcaggaagaataccaaagagatgttcggaggattcttcaagtctgtggttaagtcggccgatgaggtccttttcacaggcgttaaggaggttgatgacttcttcgagcaggagaaaaacttcctgatcaattactataatcgaatcaaggactcctgcgtcaaggcagacaaaatgacccgctcccataagaatgtagctgatgattatatccacaccgcagcctgcctgcactctttagctctagaagagccaacagtgatcaagtag

SEQ ID NO: 206577 - DNA, 810 bp, synthetic construct
  misc_feature 1..810: note = Description of Artificial Sequence: Synthetic coding sequence
  source 1..810: mol_type = other DNA
atggccgccgtgcccgagctgctgcagcagcaggaggaggaccggtctaaattacggtccgtgtccgtggatcttaacgttgacccatcactgcagattgacatccctgacgccctgagtgaaagagataaagttaagtttaccgtgcacactaagatcccccccgcccctacaaaaccagacttcgacggtcctagggagaagatgcagaagctgggcgagggggaggggtccatgacaaaggaggagtttgctaagatgaagcaggaactggaagctgagtacctggcggtgtttaagaagacagtcagctcacacgaggttttcctgcagcggctctcctcacatcctgtcctgagcaaggacagaaactttcacgtgttccttgaatacgatcaggacctttccgttaggcgcaagaatactaaggaaatgttcggcggtttcttcaagagcgtggtaaagagcgcagacgaggtgctatttacaggggtcaaagaagtggatgacttttttgagcaagagaaaaatttcctgattaattattacaaccggatcaaagatagttgtgtcaaggcagacaaaatgacgagatcacacaagaatgtcgccgacgactatatccatactgccgcttgccttcattctctggccttggaagaaccaactgtgatcaagaagtatctgctgaaagtagctgagttatttgaaaagttgaggaaagtggaggggcgcgtgagctccgacgaggatctgaagctcacagagctgctccggtattacatgttaaatatagaagcagctaagtag

SEQ ID NO: 206578 - DNA, 885 bp, synthetic construct
  misc_feature 1..885: note = Description of Artificial Sequence: Synthetic coding sequence
  source 1..885: mol_type = other DNA
atgaccaccctgaccgagatcaagctgctgcccagcctggtgctgctggtatgctgcgagtatctcgcgatcttcaaaaagaccgtggccatgcacgaggtgtttctatgcagggtagcagctcaccccatactgagacgagatctgaatttccacgtattcctggaatacaatcaagacttgtccgtaaggggcaagaacaagaaagaaaaactggaagacttttttaagaatatggtgaagagcgcagatggggtcattgtgagtggcgttaaggatgtggatgatttttttgagcacgaaaggacctttctccttgaataccataacagagtgaaggacgcgagtgcaaagtcagacaggatgacacggtctcacaagtccgccgctgacgactacaaccggatcggcagttccctctacgccctcggtactcaggactccacagacatctgcaagttctttctgaaggtttctgaactgtttgacaaaacacgtaaaatcgaggctagggttagtgcagatgaagacctgaagctgtcagacctcctcaagtactatttgagggaatcacaggccgccaaggaccttctctaccgccggagccgctctctggtcgattatgagaacgcaaacaaggccctagataaggccagagcaaaaaataaggacgtgctgcaggccgagacttctcagcagctgtgctgtcagaagtttgaaaaaatttctgagtctgccaaacaggagctgatcgatttcaaaacacggcgggtggctgcctttcggaagaacctggttgaactggctgagttggagttgaaacatgccaaagggaatctgcagctgctgcaaaactgtttagctgtgcttaatggagatacctag

SEQ ID NO: 206579 - DNA, 1257 bp, synthetic construct
  misc_feature 1..1257: note = Description of Artificial Sequence: Synthetic coding sequence
  source 1..1257: mol_type = other DNA
atgcgggcctgcgccggcccccggctgggcgccgccatgatggagggtctggacgacggcccagacttcctcagtgaagaagacaggggactgaaagcaattaatgttgacctgcagtcagacgcggccttacaggtggatatttcggacgccctcagcgagcgcgataaggtgaagttcacagtccacaccaagtcaagtcttcccaactttaagcagaacgagttttccgtcgttcggcaacacgaagaattcatctggctgcacgactcctttgtggagaatgaagattacgctggttatatcatccctccagctcctccacggcccgacttcgatgctagtcgggagaaactccagaagctgggggaaggggagggttcaatgaccaaagaggagtttactaaaatgaagcaggaactggaagctgagtatttggccatctttaagaaaaccgttgccatgcacgaggtttttttgtgcagggtcgctgcccacccaatcttaaggcgcgatctgaacttccacgtgtttcttgaatataaccaggatcttagcgtcagaggcaaaaataagaaagaaaagctggaggattttttcaaaaacatggtgaaaagcgctgacggggtgatcgttagtggcgtgaaagatgtggatgatttctttgagcatgaaaggaccttcttgcttgagtatcacaaccgcgtcaaggatgctagtgcaaagtctgatcgtatgacacgttcccacaagagcgccgccgatgactataataggattggctctagcttatatgcactcgggacccaggattccactgatatatgcaagttttttctcaaggtgtccgagctgtttgataagacccgtaaaatcgaagcccgcgtgtctgctgacgaagacctgaagctctccgacctgctgaagtattacctgcgggagtcccaggccgcgaaagatcttctttataggcgaagccggtctttagtcgattatgagaacgccaacaaggctcttgataaagcccgcgcaaaaaataaggatgttttgcaggcagagactagccagcaactgtgctgtcaaaagtttgagaagatcagtgagtctgccaaacaagagttaatcgatttcaaaacccgtcgcgtggcggcctttcggaaaaacctggtcgaacttgctgagctagaacttaagcatgccaaggggaaccttcagttgctgcagaactgtctggcagttctcaacggggacacttag

SEQ ID NO: 206580 - DNA, 873 bp, synthetic construct
  misc_feature 1..873: note = Description of Artificial Sequence: Synthetic coding sequence
  source 1..873: mol_type = other DNA
atgaccaaggaggagttcaccaagatgaagcaggagctggaggccgaatatcttgcaatcttcaaaaagactgtcgccatgcatgaagttttcctatgtagagtcgccgctcaccccatcctcagacgtgacctcaacttccatgtattcttggaatacaatcaggacctgagcgtcaggggcaaaaacaaaaaagaaaagctggaagactttttcaaaaacatggtcaaatcagctgatggtgtgatagtaagcggagttaaagacgtagacgacttcttcgagcacgaacggacctttctcctagagtaccataatcgcgtgaaagacgcctccgccaagagcgatagaatgactcggagccataagtccgctgcagatgactataaccgaatagggagttcactctatgcgttaggcacccaggactctacagatatctgtaaattcttcctgaaggtcagtgagctgttcgacaaaaccaggaagattgaggcacgagtgagcgccgatgaagaccttaagttatcagacctccttaaatactacctccgggagtcacaggcggcaaaggacctcctgtataggcggtcccgcagtttggtggactatgaaaacgccaacaaagcactcgataaagctcgcgccaagaacaaggacgtgctgcaggccgagaccagccagcagctatgctgccaaaagtttgaaaagatttcagagtcagctaaacaggagttaattgacttcaagactcgcagggtcgctgcgttccgtaagaatctagtggaattggccgagctggagctgaagcacgccaagggaaatctgcagctgcttcagaattgtcttgccgtgctgaacggggacacgtag

SEQ ID NO: 206581 - DNA, 873 bp, synthetic construct
  misc_feature 1..873: note = Description of Artificial Sequence: Synthetic coding sequence
  source 1..873: mol_type = other DNA
atgaccaaggaggagttcaccaagatgaagcaggagctggaggccgagtacttagccatcttcaagaagacagttgccatgcatgaggtgtttctctgccgggtggctgctcatcctatcttgaggcgtgacttgaattttcacgtattcctggagtataaccaggacctgagcgtcagggggaagaataaaaaggagaagttggaggacttctttaaaaatatggtgaaatctgctgacggggtgatcgtgtccggcgtgaaagacgtcgacgatttttttgagcacgagcgcaccttcctgttagagtaccataatagagtaaaggacgcgagcgcgaagagtgataggatgacccgctcacataagagcgccgccgacgactacaataggattggaagcagcctctatgccttaggtactcaggactccacggatatctgcaagttcttcctcaaagtttcggaactgttcgataagactcggaagatagaggcacgcgtttcggcggatgaagacctgaagttaagcgacctgcttaagtattatttgagggaaagccaggccgcaaaagatctcctctaccgacgcagccgcagtctcgtcgattacgagaatgccaacaaagccctggataaagcccgagcaaaaaataaggacgtcctgcaggctgaaacaagccaacagctctgctgtcagaaattcgagaagatatccgaaagtgcgaagcaggaactgattgattttaaaacacgccgggtggccgcttttcggaaaaatttagtggagctggctgaactcgaactgaagcatgcaaaggggaatctgcaactccttcagaactgcctcgccgtgctgaatggtgatacttag

SEQ ID NO: 206582 - DNA, 1188 bp, synthetic construct
  misc_feature 1..1188: note = Description of Artificial Sequence: Synthetic coding sequence
  source 1..1188: mol_type = other DNA
atgaagatccccctgaacaagttccccggcttcgccaagcccggcactgaacagtacctgcttgcaaaacagttggctaagcctaaggagaagattccaattattgtaggggattatgggcccatgtgggtgtatccaacgtccacctttgattgcgtcgtggccgacccgagaaaagggagcaagatgtatggacttaaaagctacattgagtatcagctgaccccaacaaataccaatcggagcgtgaatcaccgctacaaacacttcgactggctgtacgagcgactcttggtaaaattcggaagtgcaatacctatcccgtcgctgcctgacaaacaggtcacaggtagattcgaggaagagttcatcaagatgaggatggagagactccaagcatggatgacccggatgtgccgacaccccgttattagcgaatccgaggtttttcagcagtttttgaactttcgggatgagaaggaatggaaaaccgggaaaagaaaagccgagcgcgacgaactggcaggagtgatgatcttctccacaatggagccagaggctccagacctggatctggtggaaatcgagcagaaatgcgaggccgttggaaagttcaccaaggctatggatgacggagtgaaggagctgctaaccgtgggtcaggagcactggaaacgatgcactggccctcttccaaaggagtaccagaaaattggtaaagcccttcagtccctcgccactgtgttcagcagttctgggtaccaaggagagaccgacctgaacgatgccataaccgaagctggaaagacctatgaggaaatcgctagtctggtggccgaacaaccgaagaaggacctccattttctcatggaatgcaatcatgaatacaagggcttcctggggtgctttccagacataataggtactcacaagggtgcaatcgagaaggttaaggaatctgataagctcgtggctactagtaaaattacactccaggataagcagaacatggtgaaacgggtctctatcatgtcatacgctttacaggccgagatgaatcacttccactccaatagaatatatgactacaattcagtgattaggctttatcttgagcagcaggtccagttctacgaaacaatcgccgagaaattgcggcaggctttatctagattcccagtgatgtag

SEQ ID NO: 206583 - DNA, 1788 bp, synthetic construct
  misc_feature 1..1788: note = Description of Artificial Sequence: Synthetic coding sequence
  source 1..1788: mol_type = other DNA
atggccaccaaggcccgggtgatgtacgacttcgccgccgagcccggaaataatgaactcacagttaacgagggtgaaattatcaccatcacaaatcctgacgtgggcggtggttggttggagggccgcaacattaagggcgaacgcgggttagttcctacggactatgtcgaaatcttgccctctgacggaaaggatcagtttagctgcggaaattccgtggcggatcaagcctttctagattcactcagcgcctccaccgcccaagcttcatctagcgctgccagtaataatcaccaggtgggctctggcaatgacccatggtccgcctggtccgcctctaagtctggcaactgggagtcgagcgaaggctggggagcacaaccggagggcgcaggggcacagcgaaacacgaacactcccaataattgggacaccgcattcggacatccccaggcttaccagggccctgccactggagatgacgatgactgggacgaggattgggacgggccaaaaagcagttcctatttcaaagacagtgaatccgcagacgccggtggggcacagagggggaactcacgcgcctcctccagtagcatgaagatcccattgaacaagttcccaggatttgctaagcctgggactgagcagtatttgcttgccaagcaactcgccaaacccaaggaaaaaattccaattatagttggggattacggcccaatgtgggtataccctacttcaacatttgattgtgtcgtggcagacccacgtaaagggtctaaaatgtacggcctgaagagttatattgaataccaacttacaccaaccaacactaatagaagcgtcaatcataggtacaaacacttcgattggctgtacgagcgcctgctcgtcaagttcggctccgccataccgattccctccctgcctgacaagcaggtaaccggccgcttcgaggaggagttcattaaaatgcggatggagagactccaggcgtggatgacaaggatgtgcagacacccagttatttctgaatcggaggtcttccaacagttcctcaactttagagatgaaaaggaatggaaaacagggaaacggaaagctgaacgagatgagctagcaggcgtcatgatttttagcactatggaacccgaggctccagacctggacctggtggagattgaacagaagtgcgaagcagtgggcaaatttactaaggcaatggatgatggcgttaaagagctgcttaccgtgggtcaggagcattggaagcggtgtacaggccctctaccaaaggaatatcagaaaatcgggaaggccttgcagtctctcgcgaccgtgttcagcagttctggttaccaaggggagaccgacctaaatgacgctatcactgaagcaggcaagacatacgaagaaatcgcatcactggtggccgaacaacctaaaaaagacctccattttctgatggaatgtaaccatgaatacaagggatttctggggtgttttcctgacatcatcggaacccacaagggagctatcgaaaaagtaaaagagtccgacaaactggtcgccaccagtaaaattactctgcaagataagcagaacatggtgaagagagtgtccataatgagctacgcccttcaggcagaaatgaaccacttccattccaatcgcatctatgactacaattcggttattagactgtatctcgagcaacaggttcagttttacgagaccattgccgaaaagctgcggcaggccttgagtcggttccccgttatgtag

SEQ ID NO: 206584 - DNA, 1788 bp, synthetic construct
  misc_feature 1..1788: note = Description of Artificial Sequence: Synthetic coding sequence
  source 1..1788: mol_type = other DNA
atggccaccaaggcccgggtgatgtacgacttcgccgccgagcccggaaacaatgaactgacagtgaatgagggcgaaatcatcactatcacaaaccccgatgtgggcggagggtggctcgaagggcgcaatatcaagggagagagagggctggtgcccaccgattacgtggaaatcctaccaagtgatggtaaggaccagttcagctgcggcaactctgtggcagaccaggctttccttgacagcctctctgccagtaccgcccaggcttccagctccgcggcctcaaataatcaccaggtgggctcagggaacgatccttggtctgcctggagtgcctctaagtccggaaattgggaaagtagtgaaggctggggagcacagcccgaaggcgctggtgcgcagcgaaacaccaacacacctaacaactgggacacggcatttggacatccgcaagcttaccagggaccagctacaggggatgacgatgactgggatgaagattgggacggcccaaagagctcaagctacttcaaggactccgagtctgctgacgccggtggtgcccagagaggaaatagccgcgcctcttcctcgtctatgaaaatccccctcaacaagttccccggtttcgccaagcctggtacagagcagtatctcctcgcgaagcagctcgccaaacctaaggaaaagatcccaattatcgtgggagactatggtcctatgtgggtgtaccccacaagcacctttgactgcgttgtcgctgatccaagaaagggctctaagatgtacggacttaaatcctacattgagtaccaattaacacctactaacaccaacaggagtgtcaatcaccgctacaagcatttcgactggctctacgagcgcttgctggtaaagttcggttctgcgattcccattccatcattgcccgataagcaggtgactgggcgtttcgaggaagaatttattaaaatgaggatggagcgccttcaggcttggatgacacgaatgtgtagacatcctgtcatttccgagtcagaagtattccagcagttcctgaacttccgcgacgaaaaggaatggaagactggaaaacggaaagccgagagagatgaactggcaggagtgatgatattttctacaatggaacctgaagcaccggatctcgacctcgtggagatcgagcaaaaatgtgaagccgtggggaaatttaccaaagcgatggatgatggagtgaaggagttgctgaccgtgggccaggaacactggaaaaggtgtactggtccgctacccaaggaataccagaaaatcgggaaggcgctccagtccctagcaacagtgttcagctcaagcgggtaccagggagagacagacctgaacgacgccataactgaagccgggaagacctatgaggagatcgccagcctggtggccgaacagccaaaaaaggacctgcactttttgatggagtgcaatcatgaatacaaggggttcctcggatgcttccccgacatcattgggacccataagggcgccattgaaaaggtgaaagagtccgacaagctcgtcgcgacctctaagatcaccttacaggacaagcagaatatggtcaagagggtgagtatcatgagttacgcgctgcaagccgagatgaaccattttcattctaaccgcatctatgactacaattcagtcatcaggctttaccttgaacagcaggttcagttctacgagaccatcgcggaaaaactgcgacaggccctcagccgctttccagtcatgtag

SEQ ID NO: 206585 - DNA, 1308 bp, synthetic construct
  misc_feature 1..1308: note = Description of Artificial Sequence: Synthetic coding sequence
  source 1..1308: mol_type = other DNA
atgggcctgagcttcagcctgttccccctgcggaaccacgtgaacgtggagggagccacgcataagcaggtcgtggatctgatcagagcgggtgaaaaggaactgattttgacagtcctctcggtcccgccacatgaagccgataacctcgaccccagcgatgactcactaggtcagtccttctacgattataccgaaaagcaagcagttcctatttctgtgcctcgctacaagcatgtcgaacagaacggggaaaaatttgttgtttataatgtttacatggcaggcaggcagttgtgtagtaagcggtatcgcgagttcgccatactacaccaaaatctcaagcgggagtttgcaaatttcacttttcctcgccttcccgggaagtggcctttcagcctgagcgaacagcagctggacgcccgacggcggggccttgaggaatacctggaaaaggtgtgtagcatccgagtcattggcgagagcgatataatgcaggagttcctgtctgagagtgacgagaattacaacggcgttagtgacgtggaattgcgagtagcccttccggatggcactaccgtaacagtgcgggtaaaaaaaaatagcacgaccgatcaggtgtaccaggccattgccgcaaaggtgggcatggattccaccactgttaattactttgccctctttgaagtgatctcccactcctttgtgcggaaacttgcccccaacgaattccctcataagctctatatacagaactacacaagtgccgtgcctggaacatgccttaccatccggaaatggctgttcaccacggaagaagaaattttgttaaatgataacgatctggcggtcacttactttttccatcaggctgtcgacgacgtcaaaaagggttatataaaggccgaggagaaaagctatcagttgcagaaactgtacgaacagagaaaaatggtgatgtacctcaatatgctgcggacatgtgaaggctataacgaaatcattttcccccattgtgcatgcgactcaagaagaaagggtcacgtaataacagccatctcaataactcactttaagttgcatgcatgcactgaggaaggccaactcgagaatcaggtaatcgcctttgagtgggatgagatgcaaaggtgggacaccgacgaggaaggcatggccttctgctttgagtacgccaggggcgagaagaagcccagatgggtgaaaatcttcacgccatactttaattacatgcacgagtgtttcgagcgggttttttgcgagctaaagtggcggaaggaggagtactag

SEQ ID NO: 206586 - DNA, 1587 bp, synthetic construct
  misc_feature 1..1587: note = Description of Artificial Sequence: Synthetic coding sequence
  source 1..1587: mol_type = other DNA
atggccgacgaggacggcgagggcatccaccccagcgccccccacaggaatggcgggggcgggggcggaggcggatccggacttcactgtgcaggaaatggtggcggaggaggcgggggtcctcgtgtcgtgcgtatcgttaagtctgagagtgggtatggtttcaatgtgaggggtcaagtgtccgagggtgggcagctgcgcagtatcaacggtgagctgtacgcccccctccagcatgtttcagccgtccttcccggaggtgcagcagaccgagccggcgtccggaagggcgacaggattctcgaagtgaatcatgtcaatgtggaaggagccacccataaacaagtggtggaccttatcagagccggagaaaaagaactaatcctgactgtcctgtccgtgccccctcacgaggcagataacctagacccgagcgacgatagcctgggccagagcttttacgactataccgaaaagcaggcagttcctatcagtgtgccacgctataagcacgtggagcagaatggagagaagttcgtcgtatataatgtgtatatggctggccggcagctttgctcaaaaaggtatcgagagttcgctatactccaccagaacttgaaaagagagtttgccaacttcacattcccgcgcctgcctgggaagtggcctttctctttatcggagcagcagttggatgcgcggaggaggggcttggaggagtacctggaaaaagtatgttcgatcagggtcatcggagagagcgacattatgcaggagttcttatctgaaagtgatgagaattataatggtgtgtcggacgtcgaactccgcgtagctctcccagacggaactactgtaactgtccgagttaaaaaaaactccactaccgatcaagtgtaccaggctatagccgccaaggttggaatggatagcaccacagttaattattttgcactgttcgaagtcatcagtcacagctttgtcagaaaactagccccaaatgagtttccccataaactctacatccagaattatactagtgctgtaccaggcacgtgccttacaatcagaaagtggctcttcaccaccgaagaagagatccttcttaacgataacgatcttgccgtgacctattttttccaccaggcagtagatgatgtaaagaagggctacatcaaagcagaggagaagtcttatcagctccagaaactatatgagcaacggaagatggtcatgtatctgaatatgttaaggacttgcgaaggctacaacgaaatcattttcccacattgtgcatgtgacagcaggcgcaaggggcatgtgattaccgccatatccattactcatttcaagcttcacgcctgtaccgaggaaggccagctggaaaaccaagtcattgcgtttgagtgggatgagatgcaacgatgggacactgacgaagagggaatggccttttgttttgagtatgccaggggagagaagaaaccccgatgggtgaagatcttcaccccatattttaactacatgcacgagtgcttcgaaagagtgttttgcgaattaaagtggagaaaggaggagtattag

SEQ ID NO: 206587 - DNA, 1626 bp, synthetic construct
  misc_feature 1..1626: note = Description of Artificial Sequence: Synthetic coding sequence
  source 1..1626: mol_type = other DNA
atggccgacgaggacggcgagggcatccaccccagcgccccccacagaaacggcggaggcgggggtggcggtggcagcggcctgcactgcgcaggaaacgggggcggcggaggtgggggcccgagagttgttagaattgtgaaaagtgagagcgggtacgggttcaacgtgcgagggcaagtgagcgaaggagggcaactccgctccataaacggagagctctatgcccccctgcaacacgtctctgccgtgctgcctggcggcgccgctgaccgggctggcgtgcggaagggtgataggattctcgaggtcaatcatgtgaacgtggagggggctactcataagcaggtggtcgatttgatacgggcaggagaaaaggaattaattttaactgtgttgtccgtgccacctcatgaagctgataatctagacccctcagacgattcactgggccagtcgttttatgactatactgagaagcaggctgtcccaatctcagtgcctcgatacaagcatgtcgaacagaacggagagaagttcgtcgtatataacgtctacatggccggaagacagctctgctccaaacgctatagagagttcgcaattctccatcagaatctgaagcgcgaattcgcgaattttacatttcctcgtttgcctgggaaatggccgttctcgctgtctgagcagcagctggatgcccgcagaagagggttggaagagtaccttgagaaggtctgttccattagagtgatcggcgaaagcgacatcatgcaagagtttttgagcgaatccgacgagaattataacggagtcagcgacgtggagcttcgggtcgccctccccgatggaaccaccgtaactgtccgcgttaagaaaaactctaccacagatcaagtttaccaggccattgccgccaaagtaggtatggactctacgactgtcaattactttgccctctttgaggtgatctctcacagctttgttcggaagcttgcccccaatgaattccctcataagctgtacattcaaaattacacaagcgccgttcccggaacttgcctgaccataaggaagtggctttttactacagaagaggagattctcctgaatgacaatgatctggccgtgacctacttttttcatcaggccgtggacgacgttaagaaaggatacatcaaggcagaggagaaaagttatcagttacagaagctctacgaacaaagaaagatggtgatgtacttgaacatgctaaggacatgcgaaggctacaatgagatcatctttccacactgtgcttgcgattcccgcaggaagggccatgtcattaccgccatcagtatcacacactttaagctacatgcatgtactgaagagggacagctcgaaaaccaggtgatagcattcgagtgggatgaaatgcagaggtgggataccgacgaagagggcatggcgttttgctttgaatatgctcgcggcgaaaagaagccccggtgggtaaagatttttactccctatttcaattatatgcatgagtgttttgagagggtgttctgcgagctaaaatggcgcaaggagaacattttccagatggctagaagccagcagagagatgttgcaacctag

SEQ ID NO: 206588 - DNA, 2640 bp, synthetic construct
  misc_feature 1..2640: note = Description of Artificial Sequence: Synthetic coding sequence
  source 1..2640: mol_type = other DNA
atggccggcggcggcggcgacctgagcacccggcggctgaacgagtgcatctctccagtagcaaatgagatgaaccacttgcccgcccattcgcatgacctgcaacgaatgtttacagaagatcaaggcgtagacgatcggcttttgtacgatattgtgtttaagcactttaagcgcaataaagtcgagattagcaatgccattaagaagacctttcctttcttggagggcctcagggaccgagatctcatcaccaataagatgttcgaagacagccaggatagctgccgtaacctcgtgccggtccagagagtcgtgtataatgtcctgagcgagctggagaagaccttcaaccttcccgtgcttgaagcgctctttagtgacgtcaacatgcaggagtatcccgatctgatccacatctacaagggcttcgagaacgtaatccacgacaagttgcccctacaagaaagtgaggaggaggagagggaagaacggagcggcctccagttatccttagaacaggggacgggtgaaaatagcttccggagcctcacatggcccccgagtgggtccccaagtcacgccggtacaaccccacccgagaacggcttgtctgaacacccgtgtgagacagagcagatcaacgccaaacgaaaggacaccacatccgacaaggacgatagccttggctcccaacaaaccaacgagcaatgtgcccagaaggcagaaccgaccgaaagctgcgaacagatagcggtgcaggtgaacaacggagacgccggacgtgaaatgccttgtccattgccttgtgacgaggaaagcccagaggcagagcttcataatcatggcatacaaattaatagctgctctgtgagactcgtggatataaagaaggaaaagcccttttcaaattcaaaggttgagtgtcaggcccaggccagaacacatcacaaccaagccagcgatattattgttatatccagtgaagactctgaggggagcactgatgtggacgagcctctggaggtgttcatcagcgccccgcgatcagagcctgtgattaacaacgacaaccccttagaatcgaatgacgagaaagagggacaggaggcgacgtgtagcagaccccagattgtcccggaacccatggactttcggaagctctctacgttcagagaaagttttaaaaagagagtgattggtcaggaccacgatttttccgaaagctctgaggaagaagctcccgccgaggcatcatccggcgccttgcgcagcaaacatggagagaaggctccaatgactagccgcagcacctcaacctggagaattccgtcacgaaaaagacgcttttctagttctgattttagcgacctctcaaatggagaagaattgcaggagacttgctctagcagcctaaggagaggttcaggaagccagcctcaggaacccgagaataagaaatgcagttgtgtaatgtgttttcctaaaggcgttccccgtagccaggaggcccgaacagaaagctctcaggcttcagatatgatggatactatggacgttgaaaataactcaactctggagaagcactccggcaaaagacgtaagaaacggcgacataggtcaaaggtcaacgggctgcagagaggtagaaagaaggaccgccccagaaagcaccttaccctgaataacaaagtgcagaagaagcgctggcagcagcgcggcaggaaggcaaacacgcgaccactgaagcgaaggagaaagaggggcccacgtattccaaaggatgagaacatcaactttaagcagagcgagctccctgttacctgcggtgaggtcaaagggacattgtacaaggaacgattcaagcagggtactagtaagaagtgtattcagtccgaggataagaagtggttcactccacgcgaattcgagatagagggggaccggggcgccagcaaaaactggaaattgtcaatccgctgtggaggctataccctgaaagttctgatggagaacaagttccttcccgagcctccatctactaggaaaaagcgcattctggagagtcacaacaacaccctggttgacccttgtgaggaacacaagaagaaaaatccagacgcctctgtgaaattctccgaatttctgaagaaatgcagtgaaacctggaagacgatatttgcaaaagaaaaaggcaaatttgaagatatggcaaaggccgataaagcgcactatgaaagagagatgaaaacttatatcccacctaagggcgagaagaaaaagaagttcaaagatccaaacgcccccaagcggccaccactggccttttttctgttctgtagtgagtacaggcctaagattaagggagaacatccgggtctgagtattgacgacgttgtgaaaaaacttgccggtatgtggaataacactgctgctgctgacaaacagttttatgaaaaaaaggcagcaaaactgaaggagaagtacaagaaggacatagccgcctaccgggccaagggaaagccgaactccgctaagaaaagagtggtcaaggccgaaaaatccaaaaaaaaaaaggaggaggaggaggacgaggaagatgaacaggaggaagaaaatgaagaagacgatgacaagtag

SEQ ID NO: 206589 - DNA, 2658 bp, synthetic construct
  misc_feature 1..2658: note = Description of Artificial Sequence: Synthetic coding sequence
  source 1..2658: mol_type = other DNA
atggccggcggcggcggcgacctgagcacccggcggctgaacgagtgcataagtcccgtcgctaacgagatgaaccacctcccagcacattctcacgacctgcaaaggatgttcactgaggatcagggcgtggacgatcgtttgctttatgacattgtgttcaaacactttaaaaggaataaagttgaaatctcaaacgcgattaagaagaccttcccctttttagagggcttgcgcgatcgggatctaatcaccaacaagatgtttgaagatagtcaggactcttgccgcaaccttgtgcctgtgcagcgtgttgtgtataatgtgctgtcagagctggagaaaaccttcaatcttcctgtgctagaggctctcttttccgatgtcaatatgcaagagtatccggatctgatacacatttacaagggctttgaaaacgtcatacacgataaactgccgttgcaggagtccgaggaagaggaacgggaagagcggagcggtctccagctgtccttggaacagggaaccggagaaaactcgtttcggtctctgacctggcccccctcaggatccccctctcacgcaggaacgactcctcctgagaatgggctctcagaacacccatgcgaaacagagcagatcaatgccaagagaaaggacaccactagcgacaaagatgatagcctaggatcacagcagactaacgagcaatgcgcacaaaaggcagagccaaccgaatcatgcgaacagattgctgtccaggtgaataatggcgatgctgggcgcgaaatgccatgcccacttccttgtgacgaagagagcccagaagctgaactgcacaaccacggcatccagataaactcttgcagtgtccgactcgtggatatcaagaaggaaaaacccttcagcaacagtaaagtcgagtgccaggcccaggctcggactcatcacaatcaggcctcagacataatcgtgattagctctgaggatagcgaagggtcaactgacgttgatgaacctctcgaggtcttcatcagcgctccacgttccgaaccagtcattaataacgataaccccttggagtctaacgacgaaaaggaggggcaggaggcaacatgtagtcgcccccagatcgttcccgagcctatggatttccgcaagctgtctaccttcagagaatcattcaaaaaaagggtgatcgggcaggaccatgacttttcagagagcagcgaggaagaggccccagccgaggctagctctggagctctgcgcagtaagcacggagaaaaagccccaatgacttcccgatcaactagcacctggcggatcccctctagaaagagacggttttccagttcagacttctctgatctctctaacggagaagagttgcaggagacttgtagtagtagtctgcggcgcggctccggtagccaaccccaggagccggagaacaagaagtgctcctgtgtgatgtgctttcccaaaggggtgcctcgttctcaagaggctcggacagaatcctctcaagcctcagacatgatggacacaatggatgtggaaaacaacagcacactcgagaaacactcaggcaagagaaggaagaagaggcgtcacagaagtaaagtcaacggtctccagagggggcggaaaaaagatcgtccacgaaagcatctcacactgaataacaaggtgcaaaaaaaacgatggcagcagcgcgggcgtaaagcaaatactcgccctttgaagagacgcaggaagcgaggccctcgtattcccaaggacgagaatattaacttcaagcagagcgaattgcctgtcacctgtggtgaggttaaggggactctctacaaggaaagatttaagcagggaacgtctaagaagtgcatacagtccgaagataagaaatggtttaccccaagggaatttgagatcgaaggggaccgcggcgctagtaagaactggaagctgtccatccggtgcggaggctatacgctgaaggtccttatggaaaataaatttctgcctgagccgccctcgactagaaagaaacggattttagagagtcacaacaacacactggtagatccttgccctgagaattccaacatatgcgaagtttgtaacaaatggggacgcctcttctgttgcgatacctgccccagatccttccatgagcattgccatattccgtcagtggaagcaaacaagaatccctggagctgtatattctgccgcattaaaaccatacaagagagatgtcctgagtcccagtctgggcatcaggagagcgaagtcctcatgcgtcagatgctgccagaggaacagctaaagtgcgagtttctcctgttaaaagtgtactgcgattctaagtcctgtttcttcgccagtgagccatactataatagggagggatcccaaggtccccagaaacccatgtggctgaacaaggtgaagacctccctgaatgagcagatgtatacccgtgtcgagggtttcgttcaagacatgaggctcatatttcacaaccacaaagaattctacagggaagacaagtttacccgtttgggcattcaggttcaagacattttcgagaagaacttccgcaatatttttgccatccaagagacctcaaagaacatcatcatgttcatctag

SEQ ID NO: 206590 - DNA, 1422 bp, synthetic construct
  misc_feature 1..1422: note = Description of Artificial Sequence: Synthetic coding sequence
  source 1..1422: mol_type = other DNA
atggccggcggcggcggcgacctgagcacccggcggctgaacgagtgcatcagcccggttgctaatgagatgaaccatttgcctgctcacagtcacgacctgcaaaggatgttcactgaggatcaaggggtggacgaccggctcctctacgacatcgtgtttaagcatttcaaaaggaataaagtcgagatctccaacgctataaaaaagaccttccccttcctggaggggcttcgagaccgcgacctgatcaccaacaagatgtttgaagacagccaggactcctgcaggaatcttgtcccagtgcaaagggtcgtctacaatgtgttgtccgagctggagaaaacctttaatcttcccgtgctggaggccctgttctccgacgtcaacatgcaggagtaccccgacctcattcacatttataagggattcgagaacgtcattcacgacaagctcccactgcaggaaagcgaagaagaagaaagggaggaaaggagcggactccagctctctttggaacagggcactggtgagaatagctttagatccctcacttggcccccatcgggctctccttcacatgcaggcaccactcctcctgagaatggcctcagcgagcatccttgtgagactgaacagatcaatgcgaaacgcaaagacacaacgtcggataaagacgacagcctgggatcccaacagaccaacgaacagtgcgcccagaaggcagagccgacagaatcctgtgaacaaatagcagttcaggtaaacaacggagacgctggcagggagatgccttgtcctctcccatgcgatgaagagagccctgaggctgagttgcataatcacgggatccagatcaattcgtgtagcgtccggctggtggacatcaagaaggagaaacccttttccaacagtaaggtggagtgtcaggcccaggcgcgtacgcaccacaaccaggccagcgacatcattgtgatttcaagcgaagatagcgagggctcaaccgacgtggacgagccattggaagtgttcatttccgcaccccgcagtgaaccggtaatcaacaacgataaccccttggagagcaacgatgaaaaggaaggacaggaagcaacctgtagcaggcctcaaattgtccctgaaccaatggactttaggaaacttagcacttttcgggagagcttcaagaaaagggtgatcggccaagaccacgactttagtgagtcctcagaagaagaggctccagccgaggctagcagcggagccctgcgtagcaaacacggtgagaaggcaccaatgacttcccggagtacatctacttggagaattccatcacggaagcgccagcttaaaaagaaaaagaaaaagaagcaatgtcaccctcagcctcaaccccagagaggcctcctcgaacaaagctag

SEQ ID NO: 206591 - DNA, 2067 bp, synthetic construct
  misc_feature 1..2067: note = Description of Artificial Sequence: Synthetic coding sequence
  source 1..2067: mol_type = other DNA
atggccggcggcggcggcgacctgagcacccggcggctgaacgagtgcatctctcccgtggccaatgagatgaaccatttaccggcccactcacacgacctccagcgcatgttcacggaggaccagggcgtggatgacaggctgctctatgacatcgtcttcaaacactttaaaaggaacaaagtggagatcagtaatgcaataaaaaagacttttccattcttagaaggtctgcgtgaccgcgacttaatcaccaataagatgtttgaggactcacaggactcatgtcggaatttggtgcctgttcagagggtcgtgtataacgtactgagcgaattagaaaagaccttcaatctcccagtgctggaagcactcttctcggatgtcaatatgcaggagtatcctgatctgatccacatctataagggattcgaaaacgtcatccacgataagcttccactgcaggaatctgaggaggaggagagagaggaacgttctggtctccaactgtccctggagcagggcaccggcgaaaattccttccgaagcctgacgtggcctccatccggctcccctagtcacgccggcaccaccccccctgagaacggcctctctgagcatccttgcgaaacagaacaaataaatgccaaacgtaaggacaccacaagcgacaaagacgactccctcggtagtcagcagaccaacgagcagtgcgcacaaaaggctgagccaacagaaagctgcgagcaaatcgctgtgcaggtaaataatggcgacgccggacgggagatgccctgtccactgccttgtgacgaggagtcccccgaggctgagttgcacaaccatgggattcaaatcaattcctgttccgtgaggttagtggatattaagaaggaaaagccctttagcaatagtaaggtagagtgtcaggcacaggcgcggactcatcataaccaggctagtgacatcattgtgatctcctccgaggacagtgaaggctctactgacgtggacgaacccctggaggtgttcatcagcgccccacggtctgagccagtgataaataacgataatccactggagagcaatgacgagaaagaagggcaggaggcaacttgctcccggccccagattgtgcccgagcccatggacttccgtaagttgagcacgtttcgggaatcttttaaaaaaagagttataggccaggaccatgacttttccgaaagttctgaggaagaggcaccggccgaagcttccagcggagcccttcgtagcaagcacggcgaaaaagctccaatgacttctaggagcacatctacttggcggatcccctctagaaagcgacggttctcttctagtgacttttctgatctgagcaatggcgaggagctgcaggaaacatgctcttcatctcttagacggggatcaggttctcaaccacaggagcccgagaacaagaagtgtagctgcgtcatgtgttttccgaagggtgttcccagaagccaggaagccaggactgagagtagtcaggcgagtgatatgatggacacaatggacgtggaaaacaacagtaccttggagaagcacagtggcaaacgtcggaagaaacgcagacaccgtagcaaggtcaatgggctccagcgcggacgaaagaaggacagacccagaaaacacctcacactaaacaataaagttcagaaaaagcggtggcagcaacggggaaggaaggccaacacgagacctctgaagcgccgcaggaaaagggggccccgtatccccaaggacgaaaatatcaattttaaacaatctgagcttcctgtgacctgtggcgaggtgaaaggaacgctctacaaggaaagatttaagcaaggaacttccaagaagtgcattcagtccgaagataagaagtggttcacaccacgagagttcgagatagagggagaccgcggagcttctaaaaattggaaactctcaatccgatgtgggggctatacattaaaggttctgatggaaaacaaatttctgcccgagccgccctccacacgcaaaaaggtgatgatcaaatag

SEQ ID NO: 206592 - DNA, 1443 bp, synthetic construct
  misc_feature 1..1443: note = Description of Artificial Sequence: Synthetic coding sequence
  source 1..1443: mol_type = other DNA
atggccggcggcggcggcgacctgagcacccggcggctgaacgagtgtatttccccggtcgctaatgaaatgaatcacctccccgcacattcccacgaccttcagcggatgtttaccgaggatcagggggtcgatgaccgtctgttgtacgatatagtctttaaacacttcaagaggaacaaagttgagatctccaacgcaattaaaaaaacattccctttcttggaaggtctgcgggatagagatctcattactaacaagatgttcgaagactctcaggacagctgtcgaaatcttgtgccagtgcagcgagtggtgtacaacgtgctgagcgaactggagaaaacgttcaatctaccagtgctcgaggctttattctcggatgtgaacatgcaggaatacccggaccttattcatatttataaggggttcgaaaacgtaatccacgataagctccccctgcaggaatccgaggaggaagagagggaggaaagaagcggactgcagctgtcccttgaacaaggaacgggcgagaactccttccgcagcctgacatggcccccctcgggcagcccttcgcatgcaggaacaaccccgcccgagaatggactgtctgagcatccatgcgaaaccgaacagattaatgctaagcggaaagacacaacaagtgacaaggatgacagcctagggtcgcagcagacaaacgagcagtgtgctcagaaggccgagcctacagagagttgcgaacagattgcagtacaggtaaacaatggcgatgctgggcgcgagatgccctgcccactgccttgcgacgaggagagccccgaagccgagttgcataatcacggcattcagattaattcatgttctgttcggctggtcgacatcaaaaaagagaaaccattttctaatagtaaagtggagtgccaagcacaggcgcggacccatcataaccaggcaagcgatatcatcgtgatctcttcagaggacagcgagggctctactgatgtggacgaaccgctggaggtgttcatttcagctccgaggtcagaacccgtgattaacaacgataatcctctggaaagcaatgatgagaaggaaggacaggaggcaacctgctcacggccccagattgtgccagagcctatggactttaggaagttgagcacatttcgagaaagcttcaaaaagagggtgattggacaggaccacgattttagcgagtctagcgaggaagaggcccccgccgaagcatcaagtggtgcgctccgctccaagcatggcgagaaggccccaatgaccagtaggtcaacatctacttggcgcataccttccagaaagcggcgctttagttccagcgacttttcagacctgtccaatggcgaagagctgcaagagacttgttcatccagtttgagacgcggctccgggaaagaggactag

SEQ ID NO: 206593 - DNA, 1068 bp, synthetic construct
  misc_feature 1..1068: note = Description of Artificial Sequence: Synthetic coding sequence
  source 1..1068: mol_type = other DNA
atggacgtggagaacaacagcaccctggagaagcacagcggcaagagaagaaagaaacgacgacaccggtccaaagtcaacggccttcagcgcggccgtaagaaggaccgtcctaggaagcaccttacactaaataacaaagttcagaaaaagcgctggcagcagcgggggaggaaggcgaatacacgtccactgaagcggcggcgtaagagagggcctaggatacccaaagacgagaacatcaattttaaacagagcgagctccctgtcacctgtggtgaagtcaaaggcaccctatataaggaacggtttaaacagggtacctctaagaagtgcattcagagtgaagataagaaatggtttacaccaagggaatttgagatcgaaggggatcggggggcatctaaaaattggaaactcagtatccggtgtggaggctacactttgaaagtactgatggagcgcattcttgaatctcacaacaatacactcgtggatccgtgcccagaaaactctaacatatgtgaggtgtgcaacaaatgggggaggctcttctgctgcgacacctgcccaagatctttccatgagcactgccacatcccttctgtggaggccaacaaaaacccctggagctgtatcttctgccggatcaaaacaattcaggaacgttgtccagagtcccaatctggccaccaggagagcgaggttcttatgcgacagatgctgcctgaggagcaactcaaatgcgagttcctgctcctaaaagtttactgcgatagcaaatcctgtttcttcgccagcgagccttattataaccgggagggatctcagggcccccagaagccgatgtggctgaataaggtcaagacctcactcaatgaacagatgtacacccgggtggaaggcttcgtacaagacatgagattgatctttcacaaccacaaggagttctaccgggaggacaaatttacacggctgggaattcaggtccaggacatcttcgaaaagaattttcgcaacatcttcgcaatccaggaaacttccaaaaacattatcatgttcatctag

SEQ ID NO: 206594 - DNA, 1359 bp, synthetic construct
  misc_feature 1..1359: note = Description of Artificial Sequence: Synthetic coding sequence
  source 1..1359: mol_type = other DNA
atggccggcggcggcggcgacctgagcacccggatgttcaccgaggatcagggagtggacgatcgattgctgtatgatatcgtttttaaacatttcaaacggaataaggtggagattagcaatgcaattaaaaaaacttttccattcctagaaggcctgcgcgaccgggacctgattacgaacaaaatgtttgaagatagtcaagattcctgtcgaaatttggtacccgtgcaaagagtggtatacaacgtcctctcggaattagaaaaaacatttaaccttcccgtgctagaggctctcttcagcgacgtcaacatgcaggaatacccggatttgattcacatctataaggggtttgagaacgtgattcacgataagctgccacttcaggagtctgaggaggaggagcgcgaagaaagaagcggcctgcagctgagcctggaacagggcaccggtgagaattcatttcgatcattgacctggcccccctccggcagtccaagccatgctgggaccactccacctgagaacggtctttcagagcatccctgtgagacagaacagatcaacgctaagaggaaggacaccacgagcgataaagatgactctctgggttcccagcagaccaatgagcaatgtgcgcaaaaagccgaacctaccgagagctgtgagcagatcgccgtgcaggtgaataatggtgacgccggcagagagatgccctgccccctgccttgcgacgaggaatcccccgaagccgaacttcacaatcacggcatacagatcaacagctgtagcgtgcgcttggtggatatcaagaaagaaaagccctttagcaattccaaggttgagtgccaggcacaggctagaacgcaccataaccaggcctctgacatcattgtgatatcgtcagaggatagcgaaggctccacagacgtggatgaacctctcgaagtctttattagcgcaccaagatcagaaccagtgattaacaacgataacccgctggagagcaacgatgagaaagaaggccaggaagccacatgttccaggccccagatagtccccgagccgatggattttcgcaaactctcgactttccgagagtcatttaaaaagagggtcatcggacaggatcatgacttttctgagagttccgaagaggaggctcccgctgaggcctccagtggagctctccgaagtaagcatgcccccatgactagtaggtctactagcacgtggcgtattccgtcccgcaaacgcagatttagttcaagcgatttctcagacctgtccaatggagaggaattacaggaaacctgtagtagctcacttcgccgaggctccggcaaggaggactag

SEQ ID NO: 206595 - DNA, 1338 bp, synthetic construct
  misc_feature 1..1338: note = Description of Artificial Sequence: Synthetic coding sequence
  source 1..1338: mol_type = other DNA
atgatgttcaccgaggaccagggcgtggacgaccggctgctgtacgatatcgtgtttaagcactttaagcggaacaaggtggagatttcaaacgcgattaagaaaacgttcccttttctcgagggactgagggaccgagacctcatcacaaataagatgtttgaggatagtcaggacagttgtcggaaccttgttccagtccagcgggttgtatataacgtcctgtctgaactggagaagacttttaaccttccagtcctggaagcccttttcagtgatgtgaatatgcaggagtaccccgatctaatacacatttacaaggggtttgagaacgtaattcacgataaactgccacttcaggagagcgaagaggaagaaagagaggaacgttctgggctgcaattaagtctggaacagggcaccggagagaattcttttcggtcactgacttggcctcccagcgggtctccatcgcacgccggcacaacccctcccgagaatggcctttcagagcacccctgtgagacggagcaaatcaatgccaagaggaaagataccacaagcgataaggacgacagtcttggatctcagcagaccaacgagcagtgcgcgcagaaagctgaacccactgagagctgtgagcagatcgctgtacaggttaacaacggagacgctggccgcgagatgccgtgcccattaccttgtgacgaagaatcacccgaggcagagctgcacaaccacggcatccagatcaactcttgttccgtgcgcctggtggacatcaagaaagagaaacccttttctaactccaaggtggagtgtcaggcccaggccaggacacatcacaatcaggcatcagatataatcgttatctctagtgaagacagcgagggcagcactgatgtcgatgagcccctggaagtgtttatatccgcacccagaagcgagcctgtaattaataacgataaccccttggaatccaatgatgaaaaggaaggacaagaagctacttgtagtagaccacagatcgtgcccgaacccatggatttccgcaagctgtcgacctttcgcgagtccttcaaaaagcgggtgatcgggcaggatcacgatttcagcgagagcagcgaagaagaggcacctgcagaggcctcctcaggcgcgctcagaagcaaacatggtgaaaaggccccaatgacatcccgctcaacttccacttggcgcatcccctcgcggaagcggcgtttcagctccagtgacttttcagacctctcaaatggagaggaactgcaggaaacatgcagcagctctctccgacgcggcagtggaaaggaagattag

SEQ ID NO: 206596 - DNA, 2142 bp, synthetic construct
  misc_feature 1..2142: note = Description of Artificial Sequence: Synthetic coding sequence
  source 1..2142: mol_type = other DNA
atgttcaccatgacccgggccatggaggaggccctgttccagcacttcatgcaccagaagttaggcattgcgtatgctatccacaagccctttccattctttgaggggttgctggacaattctattataacaaagcggatgtacatggagagcttggaggcatgcagaaacctgatcccagtatcacgagtagttcataacatacttacccagctggagcgcacctttaatctgtccctacttgtcacactgtttagtcaaatcaatctccgcgagtaccctaatctggtgaccatctaccgttcgttcaagagggtgggcgcaagttatgagtggcagtctagagatactcctattctgttggaagccccaacaggattggccgaggggagcagtctccatacacccctcgcacttccccccccacagcctccccaacctagctgttccccgtgtgctcctcgggttagtgaaccaggcactagctcgcagcaaagtgacgagatactgagcgagagccccagcccctccgatcctgtgctgcctctcccagccttaatccaggagggcagatccaccagcgtaactaatgataaactcacatcaaaaatgaacgctgaagaagatagcgaggaaatgccctcactcctgactagcacagtacaggtggccagcgacaatctgatcccccaaatccgggataaagaagacccacaggaaatgccacattctcccctgggaagcatgcccgaaatccgtgataattcccccgagcctaatgatcctgaggaacctcaggaggtaagttcaacgcccagcgacaaaaagggcaagaagaggaaacggtgtatctggagcactccgaagcggcggcataagaagaaatcactgcctggggggactgcctcgagtagacacgggatacagaagaagctgaagagagtagatcaggtgccgcagaaaaaagatgatagcacatgtaattcaaccgttgaaactcgggcgcagaaggcacgaaccgagtgcgctcgcaaatcgcgatccgaggaaattattgatggaacgtcagagatgaacgagggtaaacgctcacagaagaccccttccacgcctaggcgagtgactcagggcgcggcgagccctgggcacggcatccaagagaagttgcaggtcgttgataaggttacacagcgtaaggacgatagcacatggaactccgaggtgatgatgcgtgtccaaaaggcccgtacgaagtgtgccagaaagtctaggctgaaagaaaaaaagaaagaaaaggacatttgctcatcaagcaaacgacgctttcagaagaacatccaccgccgtggcaagcccaagtccgacactgtcgactttcactgctccaagctgcccgtcacctgtggggaggcaaaaggcattctatataagaaaaaaatgaagcatggctcttccgtcaagtgtattaggaatgaggatggaacttggctgactccgaatgagttcgaagttgagggtaaaggtcgtaacgccaagaattggaagcgtaatattaggtgtgaaggcatgacgcttggcgaactactgaagcggaaaaatagcgacgaatgcgaggtgtgttgtcagggaggacaattactttgctgcggcacatgtccccgcgtgtttcatgaagattgccacataccccctgtcgaagccaaacggatgttatggagctgcactttttgtagaatgaaacggagttctggatcacagcagtgtcaccacgtgagcaagacacttgaaagacaaatgcagccacaagaccaactgaagtgcgaatttctgctgctcaaagcttactgtcatcctcaatcttctttctttaccgggatcccgttcaacatacgagactacggggagccgttccaggaggctatgtggctagacttggtgaaggaacgactcatcactgaaatgtacaccgtagcttggtttgtgcgtgacatgcggctcatgtttaggaaccacaagacgttttacaaagcaagcgattttggtcaggtgggattagatctagaggcggaatttgagaaagaccttaaagacgtactaggttttcatgaggctaacgatggggggttttggactttgccttag

SEQ ID NO: 206597 - DNA, 1650 bp, synthetic construct
  misc_feature 1..1650: note = Description of Artificial Sequence: Synthetic coding sequence
  source 1..1650: mol_type = other DNA
atgttcaccatgacccgggccatggaggaggccctgttccagcacttcatgcatcagaaactggggatcgcatatgcaattcacaagcccttcccttttttcgaaggcctcctggataattctataatcacaaaacggatgtatatggagtccctggaggcttgcagaaacctgattcctgtgagtcgcgtcgtgcacaacattctcactcagttggagcgcactttcaatcttagtttactggtcactctcttcagccagataaatctgcgtgagtatccgaatctggtgaccatttaccgcagctttaagcgggtgggcgcgtcctacgagtggcagtctcgagatactcccattctcctagaggctccgacaggcctagctgagggttcaagcttgcatacccccctggccctcccacccccgcagccgccacaacctagctgtagcccttgcgcgccacgggtgtccgagcctggaacatccagtcagcagtcggatgagatcctgtccgagtccccatcaccgagcgatccggtgctcccactgcctgctctgatacaagagggccggagcacaagtgtcactaatgacaaattgacttctaaaatgaatgccgaggaggactcagaggagatgccttccctgctaacttcaaccgtgcaggtagctagcgataacctgattccacaaatccgagacaaagaggatcctcaggaaatgccgcactcacctctcggctccatgcccgaaatccgggacaactcaccggaaccaaatgatccagaggaaccacaggaagttagctctacgcctagcgacaaaaagggcaaaaagagaaaaaggtgcatttggagtaccccaaagaggcgacacaagaagaaatcactacctggaggaaccgcctctagtagacacggcattcagaaaaagcttaagcgggtggatcaggtcccacagaaaaaagacgactccacatgcaactcaacggtcgagactagggcacaaaaggcacgcacagaatgtgcaagaaaatcacggtcggaagaaatcatcgatggaactagtgagatgaacgaaggtaaacggtcccagaagacaccctctaccccaagaagggtgactcaaggcgcagcctcaccaggacacggaatacaagagaagttgcaggtggtcgacaaagtgactcagaggaaggatgacagcacttggaacagcgaagtgatgatgcgtgtgcagaaagcgcggaccaagtgtgcaaggaagagtcggcttaaggagaaaaaaaaagaaaaagatatttgttccagctccaaaagaaggttccagaagaacatacaccgcagaggcaaaccaaaatccgatacggtggatttccactgctctaaattgccagtgacctgcggcgaggccaagggcatactttataagaaaaagatgaagcacggcagtagcgttaagtgtatcaggaatgaagatggaacgtggctgaccccaaacgaattcgaggttgagggaaaaggaaggaatgcaaaaaactggaagcgcaacatacggtgcgagggtatgaccctaggggaactgctaaagtccggccttctgctttgtccgccgcgaattaacctgaagcgggagctgaactcaaaatag

SEQ ID NO: 206598 - DNA, 756 bp, synthetic construct
  misc_feature 1..756: note = Description of Artificial Sequence: Synthetic coding sequence
  source 1..756: mol_type = other DNA
atgcccgagatccgggacaacagccccgagcccaacgaccccgaggagccacaggaggtgtcctcaacgccaagtgataaaaaaggcaagaaaagaaaaaggtgcatatggtcgacgccgaagcggaggcacaagaaaaaatcgctgccaggcgaaattatcgatggtaccagtgagatgaacgaaggaaaaaggagtcagaaaacacccagcacaccaagaagagtaacgcagggcgctgcctcgccgggacatggcatccaggaaaagctgcaagtcgtggacaaagtgactcagcgaaaggacgacagcacttggaacagtgaagtaatgatgcgagtgcagaaagcacgcaccaaatgtgcacggaagagcagattgaaagagaagaaaaaggaaaaagatatttgctctagctccaaacggcggttccaaaaaaatatccatcggcgtggaaaaccaaaatctgacaccgttgattttcattgcagcaagctaccggtcacctgcggagaagcgaagggtattttatataagaagaagatgaaacatggctcctctgtgaagtgcatcaggaacgaagacggcacctggttaaccccaaacgagttcgaagtggaggggaaagggcgcaacgctaagaactggaaaaggaacatcagatgtgagggcatgacactgggagaactgctcaaaagtggcctgctgctctgtccacccagaatcaaccttaagagagagctgaactccaaatag

SEQ ID NO: 206599 - DNA, 2070 bp, synthetic construct
  misc_feature 1..2070: note = Description of Artificial Sequence: Synthetic coding sequence
  source 1..2070: mol_type = other DNA
atgttcaccatgacccgggccatggaggaggccctgttccagcactttatgcaccagaagcttggcatcgcttacgccatacataagccgttccctttcttcgagggactgctagacaactccattattacaaagcgaatgtacatggagtcgctggaggcctgccgaaatttgatcccagtttcccgcgttgtgcacaacattttaacacagctagagaggacctttaacctcagcctgctggttaccctattctcccagattaacctccgcgaatatcctaatctggtgaccatctacagatctttcaagcgtgttggcgcttcttacgaatggcagtctagagatacgccgattttgcttgaggcccctaccggcttagcagagggtagcagcctgcacaccccattggccctgccccctccgcaaccaccgcaaccctcctgtagtccctgcgcgccccgggtatccgaaccagggacttcttcacagcagtctgatgaaatcctatccgagtctccaagcccatcagacccggttctgcccttgccagctttaatccaggagggaagatccactagcgtgaccaatgacaagctgacatccaagatgaatgcggaagaggattccgaagaaatgccaagcttacttacgagtacggtgcaggtggcttccgataacctgattccccaaatcagagataaggaagatccacaggagatgccacattctcccctgggcagcatgccagaaattcgggataattccccagaacctaacgatcccgaagagccccaggaggtctcttccaccccaagcgataaaaaagggaaaaagcgtaaaaggtgcatctggtcaacccctaaaaggcggcacaagaagaaatcgttgcccggcggaactgcatcttctcgtcacggaattcagaagaaactcaagcgagtggaccaagtgcctcagaagaaggacgattcaacatgtaattctaccgtcgaaactagagcccaaaaggcccggacagagtgcgcacgcaaatcacgaagcgaggagattatcgacggtacaagcgaaatgaatgaaggaaaacggtcccagaaaacaccatccacccctcgcagagttacccaaggagctgcgtcccctggccacgggatacaggaaaaacttcaggtagtcgacaaggtgactcagagaaaagatgatagcacatggaactctgaagttatgatgagggtgcaaaaggcacgtacaaaatgtgcgcggaagtcaaggctgaaggaaaagaagaaggagaaggacatctgctctagcagtaaacgccgtttccagaagaatattcaccgaaggggcaagcccaagagcgacactgtcgacttccattgttctaagctgcccgtgacttgcggggaggccaaggggatcttgtataaaaaaaagatgaaacacggaagcagcgtgaagtgtatccgtaatgaagatggaacgtggctgactcctaatgaattcgaagttgagggcaagggtcgcaatgctaagaactggaagcgcaacatccgatgcgagggtatgactctcggtgagctccttaagcgaaagaatagtgatgaatgcgaggtctgttgtcaggggggacagctgttgtgttgtggcacctgcccaagggtgtttcacgaagactgtcatataccgccggtcgaagcaaaaagaatgctgtggtcctgcaccttttgtaggatgaaacgtagctcagggagtcagcagtgtcatcatgtgagtaagactctcgagaggcagatgcagccgcaggaccagttgataagagactatggggagcctttccaagaggccatgtggctggaccttgtcaaagaaagactgattactgagatgtatactgtcgcctggtttgtccgggatatgcgcctgatgttccgcaatcataagacattttacaaggccagtgatttcggacaggtaggcctagaccttgaggcagagtttgagaaggaccttaaggacgtgctgggatttcatgaggctaatgacggtggtttctggacacttccatag

SEQ ID NO: 206600 - DNA, 1644 bp, synthetic construct
  misc_feature 1..1644: note = Description of Artificial Sequence: Synthetic coding sequence
  source 1..1644: mol_type = other DNA
atgttcaccatgacccgggccatggaggaggccctgttccagcactttatgcaccagaaacttggcatagcgtacgctattcacaagccttttccattctttgaaggcctcctggataatagcatcatcactaagaggatgtatatggagagcctggaggcgtgccgaaacctgatccctgttagtcgagttgtgcacaatatcttgactcagttggaacgcactttcaacttgtcgctcctcgtcactctgttcagccagatcaacctgcgcgaatacccaaatttagttactatataccggagctttaaaagagtgggcgcatcctacgagtggcagtccagggatacaccgatcctcctggaagcgcctactgggctggccgaaggatcctctctgcacactcccctcgccctcccccctcctcaaccccctcaaccgtcatgctctccttgcgctcctcgggtgtccgaacctggcacctcatcacagcaatctgacgagattctctctgaatcgccgagcccatctgaccccgtgttaccccttcctgccctgatacaggagggacggagcaccagtgtgacaaatgacaaacttaccagcaagatgaacgccgaggaggacagcgaggagatgccatcattgctcacctcgactgtgcaggtggcatcagataatctgataccccagatcagggataaggaagacccgcaggaaatgcctcattctcccctcggatcgatgccagaaatcagagacaattctccagaacccaatgatcctgaggaaccccaggaggtctcatctactccctctgataagaaaggcaagaagcggaagcggtgcatttggtccacgccaaagaggagacacaagaagaaaagcctccctggggcaagttcccggcacggcatccagaaaaaattaaaacgtgttgaccaggtcccccagaaaaaggatgattccacatgtaattccacagttgaaacaagagcgcagaaagcccgaaccgaatgcgccagaaaaagcaggtctgaagagattatagatgggacgtccgagatgaacgaaggaaaacgctcgcaaaagaccccctcaacaccacggcgagtgacccagggcgctgcgtcccctggccacggtattcaagaaaaactgcaagtggtcgataaggtgactcagcggaaggatgactctacttggaactccgaggtcatgatgagagttcaaaaggcccggacaaagtgtgcccggaaatcccgtctgaaggaaaagaaaaaggagaaagatatctgtagctcgtcaaagcgccgctttcagaaaaacatccatagaagggggaaaccgaagagcgacacagtggacttccattgttcaaaattgcctgtgacatgcggggaggctaaggggatactttacaagaagaagatgaagcacggcagcagtgtgaagtgcatcagaaacgaggatggcacctggctgactcctaacgagttcgaggtagagggcaaaggtaggaacgccaagaactggaagaggaacatacgatgcgaagggatgactctcggcgagttactgaaaagcggcctgcttctttgtcctcccagaatcaatctcaagcgtgagctcaacagcaaatag

SEQ ID NO: 206601 - DNA, 666 bp, synthetic construct
  misc_feature 1..666: note = Description of Artificial Sequence: Synthetic coding sequence
  source 1..666: mol_type = other DNA
atgttcaccatgacccgggccatggaggaggccctgttccagcacttcatgcatcagaagttaggaattgcctacgcaattcacaagcccttcccattcttcgagggactgctcgataacagtatcattacgaagagaatgtatatggaatctctggaggcctgtaggaatctgatcccagtcagcagggtcgtacacaatattctgacccaacttgagcgaacttttaacctttcacttctcgtgaccctgttcagccagattaacctaagagaatatcccaacttagttactatatacaggagctttaagagagttggagcttcgtacgaatggcaaagcagggatactccaatccttctggaagcccccacaggactggccgaggggtctagcttacacacacccctcgcactcccacctcctcagccgcctcagccctcttgtagcccgtgtgcaccccgcgtcagcgagccagggacatcgtctcagcagagcgacgagatcctcagcgaatccccctccccaagcgatccagtgctgccgctgcctgctctcatccaggagggcagatctaccagtgtaactaacgataagctgaccagtaaaatgaacgccgaagaagattcagaagagatgccatcactgctcacctccaccgtctag

SEQ ID NO: 206602 - DNA, 306 bp, synthetic construct
  misc_feature 1..306: note = Description of Artificial Sequence: Synthetic coding sequence
  source 1..306: mol_type = other DNA
atgttcaccatgacccgggccatggaggaggccctgttccagcactttatgcaccaaaaactggggatcgcctacgccattcataaacccttcccttttttcgaggggctgctggacaactcaattattaccaagcgaatgtacatggaatctctggaggcttgccgcaatctcattcccgtttctcgtgtggtccataacattttgacccaactcgagaggacatttaatctgagtttactggtgactctattcagtcagatcaacctccgagaatatcccaatctcgtcactatatacagatag

SEQ ID NO: 206603 - DNA, 1668 bp, synthetic construct
  misc_feature 1..1668: note = Description of Artificial Sequence: Synthetic coding sequence
  source 1..1668: mol_type = other DNA
atgggccggggcttccggatgttcaccatgacccgggccatggaggaagccctttttcagcactttatgcaccaaaagttagggatagcctacgcgatccataagccattccccttctttgaaggcttgctagacaacagcataatcacaaaacgcatgtacatggagtctttagaggcctgccgcaatttgatcccagtgagcagagtcgtgcacaatattctgactcagctggagcgaaccttcaacctgtccctcctcgttaccctcttctcacagatcaacctaagagaataccccaatctggtgaccatttacagatcttttaagcgggtcggggcaagctatgaatggcagagccgcgatacccctatacttttagaagcaccaaccgggctggctgagggatcatccctgcacacacccctggccctaccacccccgcagcctccccagcccagttgtagtccctgtgctccaagagtgagcgagccaggaaccagcagccaacagtctgatgaaatactctcagaaagtccgtccccaagtgacccagtgttaccactgccagcactcatccaggaagggcgttctacaagcgtgacgaacgacaaattgaccagcaaaatgaatgctgaggaggactccgaggagatgccctcactcctgacctcaactgtgcaggtggctagtgataatttaatcccacagattcgcgataaagaagacccgcaggaaatgccacactcccccctgggatcaatgcctgaaatccgcgacaacagtcccgaacccaacgaccccgaagagcctcaggaggtgtcctctaccccgagcgataagaaagggaaaaaaaggaaaaggtgcatttggtccactccaaagcgtcggcacaaaaagaagtcattacctggaggtacggcaagctcacggcatggaatccagaagaagctgaagagagtggaccaggtgccacagaaaaaggatgattctacgtgtaatagcacagtcgagacaagggcccagaaggccaggacagagtgtgcccgtaagtcaagatctgaggaaataatagacgggactagtgagatgaatgagggcaaacgaagccagaaaacccccagcacgccaaggcgcgtgacccaaggagccgcttcacctgggcatggcatccaagaaaagttgcaagtcgtggacaaggtaacacagcgcaaggatgactctacgtggaatagtgaagtcatgatgcgggtgcagaaggcccggacaaaatgcgcaagaaagtcaaggctcaaggaaaagaagaaagaaaaagacatttgcagctcttctaagaggcggtttcagaagaatattcaccgcagaggtaaacctaaaagcgataccgttgacttccactgcagcaagctccccgttacctgcggggaggcaaaggggatcctgtataagaagaagatgaagcatgggagctccgttaagtgcattcgtaatgaggacggtacctggttaacgcctaatgagttcgaggtagaaggaaaagggcgtaacgctaagaactggaagcggaatatcaggtgtgagggaatgacactgggagaactattaaagagcggactgctcctgtgcccgcctcgcattaatctgaagagagagctaaattccaagtag

SEQ ID NO: 206604 - DNA, 2346 bp, synthetic construct
  misc_feature 1..2346: note = Description of Artificial Sequence: Synthetic coding sequence
  source 1..2346: mol_type = other DNA
atgaccgcccccgagaagcccgtgaagcaggaggagatggccgccctggacgtcgattctggcggagggggaggaggaggcggaggccacggagaatatctgcagcagcaacagcagcatggaaatggagcagtggcagccgccgctgcagctcaggacacgcagccttcacctctggcactcctggcggctacctgctctaagatcgggccgccttccccgggagatgatgaggaagaggctgccgccgctgcaggtgcaccagcggcagctggcgccacgggagatctggcatcagcacaactcggaggtgcccccaataggtgggaagtgctcagcgctacccccaccaccatcaaagacgaggccggaaatttagtgcaaatacccagtgctgctacgagttccggtcagtacgtcctgcctctccagaatctacagaatcagcagattttttccgttgctcccggctctgattcaagcaatggaacggttagcagtgtccagtaccaggtcattcctcagattcagtctgctgatggacagcaggttcagatcggattcaccggctcttcagataatggaggcatcaatcaggaatcctctcagatccaaataataccgggcagcaaccagaccctactggcatcagggacgccttccgcaaacatacagaatctcatcccacagacaggccaggtgcaagttcagggcgtcgctattggaggctcatcctttccaggacagacccaagtggtcgccaacgttccgttgggtcttcctggcaacatcacatttgtgcctattaatagtgtcgacctggatagtttgggattaagcggaagcagtcagacaatgactgcgggcatcaatgctgacggccacctcattaatactgggcaagccatggattcctcagacaattctgaacggactggcgagagggtatcccctgacattaacgaaaccaatactgacaccgatctttttgtgccaacatcaagtagcagtcagcttccagtcacgatagacagtaccggaatcctgcagcagaacactaattccttgaccacatcgagtggccaagtccactcctcagatcttcaggggaactacattcagtcccccgtatccgaggagacccaggcccagaacatccaagtttcgaccgctcagcctgtcgtgcagcacctccaactccaggagtcccaacaacctacctcgcaagcccagatcgtgcaagggataacacctcagaccatccatggtgtgcaagcttccggccagaatatcagtcagcaagctctccagaacctacaattacagctgaaccccggcaccttcctgatccaggctcagactgtgacaccaagcggacaggtgacgtggcagactttccaggttcagggcgtgcaaaatctgcagaacttgcaaattcagaacaccgcagcgcaacagattaccttaactccggttcagaccctgaccctgggccaggtggcggctgggggagccttcacgtcaactcccgtgagcctcagcacgggacagctccccaatctccagaccgtgactgtaaactcaattgacagtgccggcatccagcttcaccctggcgagaatgctgactcaccagcggacattagaatcaaagaggaagaacccgaccccgaggagtggcagctgagcggggacagcacactcaatactaatgatctgacacatttgagggtacaggtggtggacgaagaaggggatcagcaacaccaggagggaaaaagactgaggcgagtagcttgtacctgccccaactgcaaggaggggggaggacgagggacaaacctgggcaagaaaaagcagcacatctgccatattcccggatgcgggaaggtctacggcaagacgtcgcatcttcgtgctcacctccggtggcactctggcgagcggccttttgtctgcaactggatgtattgcgggaaacggttcactcggagtgacgaactgcagcgacacaggagaacacacactggggaaaagaaatttgtgtgtcctgagtgttctaagaggttcatgcgatccgaccacctggctaaacacatcaagactcatcagaataagaaaggaattcatagtagtagtacggttctcgcttctgttgaggccgcgcgcgacgatactctgattaccgccggcggaactacccttatcctggcgaacatacagcaaggcagcgtatcaggtattggcacagtgaacaccagcgccacttcgaaccaggatatcctcaccaatacagagattcccctccaactcgtgacagtctcgggcaacgaaactatggagtag

SEQ ID NO: 206605 - DNA, 2217 bp, synthetic construct
  misc_feature 1..2217: note = Description of Artificial Sequence: Synthetic coding sequence
  source 1..2217: mol_type = other DNA
tgacccgagaagcccgtgaagcaggaggagatggccgccctggacgtggactccggtgggggaggcggggggggaggcggacatggcgagtacctgcaacagcaacagcaacacggtaatggtgccgttgccgcagcggctgctgctcagaccggtgacctggcaagcgctcagttagggggcgcccctaatagatgggaggtgctgagcgctacccctaccaccataaaggacgaggccgggaatttggtacagatcccaagtgctgccactagcagcggacagtacgttctgcctcttcaaaacctgcagaaccagcaaatcttcagtgtggcccccggcagcgactcctctaatggaacggtttcatccgtgcaataccaggttatcccccagatccagagcgccgacggacagcaggtgcagattggctttacggggtcctctgacaacggagggatcaaccaggaaagcagtcagatccagattatcccagggagcaaccagactctgctcgcctctggcacccccagcgccaacatccagaatctgattcctcagacaggccaggttcaggtgcaaggcgtagccattggggggtccagcttccccggacagacccaagtggtcgccaatgtgcctctcggcctgcccggtaacattactttcgttcccattaactcagtagatttggatagcctgggcttatccgggtcctcccagaccatgaccgcagggatcaatgccgatggccatttgattaatacaggtcaagcaatggattcctccgacaatagtgagcgcaccggagaaagggtcagccctgatattaacgagacaaatacagacaccgatctgttcgtcccaacttcctcgtcttctcaactccccgtgacaattgattccactgggatcctacaacagaatacgaactcgctgaccacttcatctggccaggtacactcaagcgacttacagggcaactacatacagagcccagtgtccgaggaaactcaggcccagaacatccaggtctctacggcccagccggtcgtgcagcatttacagctgcaggaaagccagcagcccacatcccaggctcaaatagtccaggggatcaccccccagacgattcacggcgtgcaggcctccggccagaacattagccagcaggctcttcaaaatctgcagctgcagttaaatccaggcacattcttgattcaagcacagactgtgactccgtccgggcaggtgacctggcagacttttcaggttcaaggcgtgcagaatcttcaaaatctgcagatacagaacactgcagcgcagcagatcacacttacccctgttcagacactgactctcgggcaggttgcagcagggggagcttttacctctacccctgttagtctcagtactggccagctgccaaatctccagactgttaccgtgaactcgatcgacagcgctgggatccagcttcacccaggcgaaaacgcagactctcccgcagacattcggataaaggaggaagaaccggaccccgaagagtggcagctgagtggcgattccaccctgaacacaaacgacctgacgcatcttcgcgttcaggtcgtcgatgaagagggcgaccagcagcatcaggagggaaaaaggctgcgccgcgtagcctgcacctgccctaattgtaaggaaggaggagggcgtggaactaatctgggaaagaagaagcagcatatctgccatatacccggttgtgggaaagtgtatggtaagactagccatttgcgggcgcacctgagatggcatagcggcgagcgacccttcgtgtgcaactggatgtactgtggtaagcgtttcacacgctctgatgagctccagagacaccggcgcactcacactggtgagaaaaaattcgtttgccctgagtgctccaagcggttcatgcgaagtgaccatctagcaaaacatattaagacacaccagaataagaagggcattcactccagcagtactgtgctcgcctccgtggaggcagccagggatgataccttgattacagcaggcgggaccacactgattctcgccaatatccaacaggggagcgtgtccggcattggtacggtgaacacgagtgccacaagcaatcaggatatcctgactaatactgaaattccgcttcagctggtaaccgtgtctggaaatgagacgatggagtag

SEQ ID NO: 206606 - DNA, 2142 bp, synthetic construct
  misc_feature 1..2142: note = Description of Artificial Sequence: Synthetic coding sequence
  source 1..2142: mol_type = other DNA
atcggcccccccagccccggcgacgacgaggaggaggccgccgccgccgccggtgcccccgccgcggccggggcaacaggggatttagcttccgcacaattaggtggcgctcctaaccggtgggaggtgctaagtgccaccccaaccaccattaaggatgaggccggaaaccttgtgcaaatcccatctgcagccacttcctcaggccagtacgtgctcccactccagaacctgcagaaccagcagatattcagtgtagccccaggatcagattcaagtaatggcacagtctctagcgtccagtatcaggtcatccctcagattcagtcggccgatggccagcaagttcagataggattcaccgggtctagcgataacggagggattaatcaggagagctcacagatacagattataccaggttctaaccaaacgctcctggcctccgggactccctccgccaacatccagaacctgatcccccaaacgggccaggtgcaggtccagggcgtcgccattgggggaagttcattccccggccagacccaggtggtcgctaatgttcccctgggattgcctggaaacattactttcgtaccaataaattctgtcgacctagattctctgggcctgagcggaagcagccagaccatgacagctggtataaacgctgatggacaccttatcaatacagggcaagcaatggacagtagcgacaacagcgagcgcacaggagaaagggtgtctccagatatcaatgagacgaatactgacacggacttgtttgtaccaacatcaagtagctcgcagctacccgtcacaatcgactctacaggaattctgcagcaaaatactaactcacttactacctcttcaggccaggtccattcctccgatcttcagggaaattatatccagagccccgtaagcgaggaaacgcaggcgcagaacatacaagtgtctactgcccagcccgttgttcagcatctacagcttcaggagagccagcagccaacctcacaggcccagatagtccagggcattaccccacagaccattcatggagtgcaggcatccggacagaacataagccaacaggccttgcagaacttacaactgcagctgaatcccggaaccttcctgattcaggcacagacggtgacacctagcggccaagtcacctggcagacgttccaagtccagggggtccagaacctccagaatttacaaatccagaatactgccgctcagcagatcaccttgaccccagtacagaccctgacgctggggcaagtcgcggcaggaggtgctttcacgagcacacccgtgagtctctcaacgggacagttgccaaatctgcagacggtcactgtgaacagcattgactcggccggaatccagttacatccaggcgagaacgctgactctcccgctgatatccgtatcaaggaagaggaaccagatcctgaagagtggcagctgtccggtgatagcaccttgaacacgaatgatctaacccacctgcgagtgcaagtggtggatgaagagggagatcagcagcaccaggagggtaaacggttgcgccgcgtagcttgcacatgtcctaattgtaaggagggcggtgggcgcggaactaacttggggaagaagaaacaacatatctgccatatacctggctgtggtaaagtctacgggaagacatcgcaccttcgcgcccatctccggtggcactcgggtgaacgtcctttcgtttgtaattggatgtattgcggtaagcgcttcacccggagcgacgagctgcaaaggcacaggcgaacccatacaggcgagaaaaagtttgtttgtccggaatgctctaaaaggttcatgagaagcgaccacttggcaaagcatatcaagacccatcagaataagaagggaatacactcttcttcgactgtgcttgcgtcggtcgaagctgctagagacgacacccttatcacagctggcgggaccactcttatcttggccaatattcagcaaggcagcgtgagcggtattggaaccgtcaatacaagcgcgacatctaaccaggatattctcacgaacactgaaatcccccttcagttggtcaccgtgtcagggaatgaaacaatggagtag

SEQ ID NO: 206607 - DNA, 2187 bp, synthetic construct
  misc_feature 1..2187: note = Description of Artificial Sequence: Synthetic coding sequence
  source 1..2187: mol_type = other DNA
atggccgccctggacgtggacagcggcggcggcggcggcggcggcggtggtcatggggaatacttacagcaacaacagcaacacgggaatggtgccgtagccgcagccgccgcggcccagaccggcgacctggcgtctgctcaactaggcggagcccctaatagatgggaggtgctgtctgccacgccaaccactatcaaagacgaggccgggaacctggtgcagattccaagcgccgcaactagctctggccagtacgtgctccctctgcaaaacctccagaaccaacagattttcagtgtcgcacccggatccgactcttccaacggaaccgtatcttcggtccagtaccaagttataccacagattcagagcgctgacggccaacaagtacaaatcgggttcacaggaagttctgataacggaggtattaaccaggaaagcagccagatccaaattattcccggcagcaatcagacactgctcgcatcaggaacaccctcagccaatatccagaacctaattcctcagaccggacaggtgcaggtgcaaggggttgccattggaggctccagctttcctgggcagactcaggtcgttgccaacgtcccactcggattgcctggtaatataaccttcgttcctatcaatagcgtcgacctggactccttggggttgtccggttcaagtcaaaccatgacagcaggcatcaacgctgacggtcacttaattaatactggccaggccatggactcatcagacaactccgaacggaccggcgagcgcgtgtcaccagatatcaatgaaacgaacaccgacaccgatctcttcgtgccaacaagttccagctcgcaactccccgtaacgatcgatagtacaggtatcttgcagcagaacaccaattcgctgactacttcatctgggcaggtgcacagttcagaccttcaaggtaactatatacagagtccagtttctgaggaaactcaggctcagaacattcaggtgtccactgctcaaccagtcgttcagcacctgcagcttcaggaatcccagcagccgacctcccaggcccagattgtgcaaggaataacaccacagacgatccacggggtccaggcctcaggtcagaacatctcccagcaggctctccaaaatttacagctgcaacttaacccaggcacattcctgatccaagcgcagacagtgaccccatctggacaggtcacctggcagaccttccaggtccaaggagtgcagaacctccagaacctccagatccagaacaccgccgctcagcagattaccctgacccccgtgcagactctgacactgggacaggtggctgccgggggagccttcacatctactccagtttctctctctaccgggcagttaccaaatctgcagactgtcactgttaactccatcgacagcgcaggaatccagttgcatccaggggaaaatgccgattctcccgccgacatacgaattaaggaagaagaacccgacccggaagaatggcagttgagtggggatagcacactgaataccaacgatctgacccacttgcgggttcaggtggtcgatgaagagggagaccagcaacaccaggagggaaaacggctccggcgcgtggcctgcacctgcccgaactgcaaggaggggggcggccggggcacgaacttaggcaagaaaaagcagcacatctgccacatccccggatgtgggaaagtttatgggaaaaccagccacctgcgagcacacctgcgctggcattccggcgagagaccgtttgtgtgcaactggatgtactgcggtaaacggttcacgagaagcgacgaactacagcggcaccggcggactcatactggggagaaaaagtttgtttgtccggagtgtagcaagagattcatgagatccgaccacttagcaaagcacatcaagacgcaccagaataagaaaggtatccactcctcttccacagtgttggcctccgtggaagctgcgcgcgacgacaccctcattacggccgggggaacaactctcatcctggccaacatccaacagggcagtgtgtctggtattggcacagtgaacacatctgctacttcaaatcaggacatactgacgaacaccgagatccccctgcaactggtgaccgtgtccgggaacgagactatggaatag

SEQ ID NO: 206608 - DNA, 1545 bp, synthetic construct
  misc_feature 1..1545: note = Description of Artificial Sequence: Synthetic coding sequence
  source 1..1545: mol_type = other DNA
atggtgtgggaggtgaagaccaaccagatgcccaacgccgtgcagaaactgctccttgtcatggataaacgagctagcggtatgaatgattctctggaactgttacagtgtaacgagaatttgccttcaagccctgggtataatagttgcgatgaacatatggaactcgatgatttgccagagctccaagccgttcaatccgaccccactcagtctgggatgtaccagctgagctcggacgtaagccaccaggagtaccctcgatcgtcatggaaccagaacacttcagacatccccgagaccacctacagagagaacgaggtggattggctgacagaactggcgaatatcgccacgagtccccagtctcctctgatgcagtgctccttttacaatagatcttctcccgtgcatattatcgccaccagtaaatccctgcactcatacgctcgccctcctccggtctccagcagtagcaagtcggaacccgcattccctcatcaccactggaaagaagagacgcccgtgaggcacgagcgagcaaattccgagtccgagagcggaattttttgtatgagtagtctgtccgacgatgacgacctcgggtggtgtaattcatggccctccaccgtgtggcattgcttccttaagggcacaagactctgttttcacaaagggagcaacaaagaatggcaggacgtggaggatttcgctagagcggaggggtgcgataacgaggaagacctgcagatggggattcacaaaggctatggttcggatggcctgaaactgcttagccacgaagaaagtgtatcgttcggggagtcagtcctgaaactgaccttcgacccaggcacggtggaagacggcctgctgacagtcgagtgcaagcttgatcaccctttttatgtcaagaacaaagggtggtcgagtttttatccttctctcaccgtggtccagcacggcatcccatgttgtgaagtgcatatcggggacgtgtgcttgcccccaggccatcccgatgctataaacttcgacgattctggggtcttcgacacatttaagagttatgactttacacccatggattcctccgccgtgtatgtcctgtcatccatggccagacagagaagggcctccctgtcatgcgggggacccggcggacaagattttgcgcgtagtgggtttagcaagaactgcggttctcctggttctagtcagttgtcatctaactccctgtacgccaaggctgtcaaaaaccacagcagtggaaccgtcagtgctacctctcccaacaaatgtaagcggcctatgaatgccttcatgctcttcgctaaaaagtatcgagttgaatatacccagatgtacccaggtaaagacaatagggctatatcggtaatattgggtgataggtggaagaagatgaagaatgaagaacggaggatgtacaccctagaggcaaaagctctggccgaggaacaaaaaaggctaaatccagactgctggaagagaaaacggacaaacagcggatcacagcagcactag

SEQ ID NO: 206609 - DNA, 432 bp, synthetic construct
  misc_feature 1..432: note = Description of Artificial Sequence: Synthetic coding sequence
  source 1..432: mol_type = other DNA
atgagcgaccagaagaaggaggaggaggaggaggccgccgccgccgccgcgatggctacagagggtggcaagacatctgagcctgaaaacaataacaagaaacctaagacaagcgggtctcaggattctcaaccatcaccgctggcattgcttgcggctacctgtagtaagataggcacccccggagaaaatcaggccacaggacagcagcagaggaacctgctcgaaacacttggtaacctgctcccgcccctactgcttctccaaaaacggatcacattccttaaccagcctctggtgcggttagtgctgccggccgtcatcaccggtgtgcacctgctccagaagttgaaccaagtgattcttcctcccctggtgaactttaagtcatacaaatacaagatccaggttgtggtctacagcactaagtag

SEQ ID NO: 206610 - DNA, 1296 bp, synthetic construct
  misc_feature 1..1296: note = Description of Artificial Sequence: Synthetic coding sequence
  source 1..1296: mol_type = other DNA
atggccagcagcctgctggaggaggaggtgcactacggcagcagccccctcgcaatgttgaccgcggcttgttcaaagttcgggggttcatcgccactgagggattccacaacacttggcaaagcagggacaaagaagccatattctgtaggatctgatttgtctgctagtaagactatgggcgacgcctatcccgctccgtttacaagcacaaacggtttgctttcacccgccgggagccctcctgctcctacctccggatacgcgaatgattaccctcctttctcacacagcttccccggccccactggcacacaagatcctggtctgctggttcctaaaggccactccagctcggattgtctcccttcagtgtatacaagtctggacatgacacacccttacggaagctggtataaggccggtatccatgcaggaattagtccaggacctggcaacactccgactccatggtgggatatgcatcccggaggaaattggctcggcggggggcaggggcaaggggatggtttacagggcacacttccgaccggcccagcccagcccccattgaatccccagcttcctacttatccttctgacttcgctcccctaaaccctgccccttatcccgccccgcacttgttgcagcccgggccacaacacgtccttccccaggatgtgtacaagcctaaggctgttggaaatagtggtcagctggaggggagcggcggagcaaagccgccaagaggagccagtaccggagggtccggaggatacgggggcagcggagctgggaggtcctcctgtgactgcccaaattgccaggagctggaacggctgggcgctgcagctgccggactgcggaagaagccgattcacagctgtcatatcccaggctgcggaaaggtttacgggaaagcttcacacctgaaagctcatctgagatggcacaccggcgagcggcccttcgtttgcaattggctcttctgcggcaagagatttacccgaagtgacgagctggagcgacatgtgcgtacacacactcgggagaagaaattcacttgtcttctgtgtagcaaaagatttacacgtagtgatcacttatccaagcaccagaggacgcatggggagcctgggcccggccctcctccaagtggccccaaggaactaggagagggccggtccactggcgaggaggaggccagtcagactccccgcccatcagcttcaccagccacaccagagaaagctccaggcgggtcccccgagcagtcaaatctgctggaaatttag

SEQ ID NO: 206611 - DNA, 1296 bp, synthetic construct
  misc_feature 1..1296: note = Description of Artificial Sequence: Synthetic coding sequence
  source 1..1296: mol_type = other DNA
atggccagcagcctgctggaggaggaggtgcactacggcagcagccccctggcaatgttgaccgccgcatgttccaagtttggggggtcttccccattgcgagattctacaacactggggaaagcaggaacaaagaagccgtattcggtgggctcggacctgagtgcctcaaaaaccatgggagacgcttaccctgctcctttcacatctaccaacggtctccttagccccgcaggctctcccccagctcctacatcaggttacgccaacgattaccccccattcagccattcctttcctggccctactgggacccaggaccccggactgttggttcccaaaggtcactccagtagtgactgcctgccatcggtctataccagcctggatatgactcatccatatggcagctggtataaagctggtattcacgccggaatatctcccggccctggaaacactcccaccccctggtgggatatgcaccctgggggcaattggctgggaggaggacaaggtcaaggcgacgggcttcagggcacgctgccgaccggtcccgctcagcctcccctgaatccgcagctccccacatatccctccgatttcgccccacttaaccccgcaccctatccagccccacatctcctgcagcccggacctcaacacgtgttaccacaggatgtttacaagcctaaagccgtcggtaacagtggacagctggagggatcaggcggcgccaagcctcctcggggcgcaagcacaggtgggtccggcggatacggcggatccggcgctggccgctccagttgcgattgccccaattgccaggagctcgagcgcctgggggcagccgccgcgggtctacggaaaaaaccaattcattcctgtcacattccaggttgcggaaaggtctacggcaaggctagccatctcaaggcgcatctgagatggcacaccggagagaggccatttgtttgcaattggcttttctgcggtaagcgttttactaggagcgatgagctagagcgccacgtccgcactcacacccgtgagaagaagttcacgtgcctgctgtgcagcaaacgctttaccagatccgatcacctttcgaaacatcagcggacacatggggagccaggccccggaccccctccctctggacccaaggagcttggggagggtaggtctacaggggaggaggaggcctcacagaccccccggcctagcgcctcaccagctactcctgaaaaggccccagggggctctccggagcaatcaaatctgctcgagatctag

SEQ ID NO: 206612 - DNA, 1242 bp, synthetic construct
  misc_feature 1..1242: note = Description of Artificial Sequence: Synthetic coding sequence
  source 1..1242: mol_type = other DNA
atgctgaccgccgcctgcagcaagttcggcggcagcagccccctgcgagacagtactactctcggtaaggccggaacaaaaaaaccttactctgttggctccgatctttcagccagtaagacgatgggagacgcgtacccagccccctttacctccacaaacggcttgttgtcccctgccggctctccccctgctcccaccagcgggtatgccaacgattaccccccattctctcattcatttcccgggcctaccgggacccaggacccgggcctgctggttcccaagggccactcttcttctgactgcttgcctagtgtgtataccagtttggacatgacccacccatacgggtcttggtacaaagcaggaatccatgcaggcatctcccctgggcctggtaatactcccaccccttggtgggacatgcatcctggcggcaattggctgggcggtggtcagggtcaaggggacggcctgcaggggacactgcctactggaccagcacaacccccacttaacccccagcttcccacttaccccagcgactttgctcccctgaaccctgcaccttaccccgcgcctcatttgctgcagcccgggcctcagcacgtacttcctcaggacgtgtacaaacccaaagctgtaggcaacagcgggcagcttgagggttcggggggtgcaaagcctccacggggagcctcaaccggtggctcgggtggatacggaggctcaggggctggcaggtctagctgcgactgccccaactgtcaggagcttgagcgacttggcgccgccgctgcgggactgcgcaagaagcctattcacagctgtcatatcccaggatgcggcaaagtctatggtaaggcatcacacctgaaagcccatcttcggtggcacacaggggagaggcccttcgtatgtaattggctgttctgcgggaagcggtttactcggagcgacgagctcgagcgccacgtgcgcacgcatacgcgcgagaagaagtttacatgtctgctgtgttctaagcgcttcactagatctgaccacctgtccaagcaccaacgcacccatggggaacctgggcctggccctcccccatcaggccccaaggagttgggcgaaggacgatcgaccggcgaggaagaggcatcacagactcctaggccatccgcatcccctgctacgccagagaaggcaccaggcggatctcccgaacagtctaatttactcgagatttag

SEQ ID NO: 206613 - DNA, 1401 bp, synthetic construct
  misc_feature 1..1401: note = Description of Artificial Sequence: Synthetic coding sequence
  source 1..1401: mol_type = other DNA
atggccaccagcctgctgggcgaggagccccggctgggcagcaccccgctggctatgcttgccgccacctgcaacaagatcggcagtccgtcaccttctccctcaagtttgagcgactccagctcgtccttcgggaaaggctttcatccctggaagaggtcctcttcttcatcgagcgcttcctgcaatgtcgtcggaagttcactgtcttcatttggagtgtctggcgccagtcgaaacgggggctccagctctgctgcggccgctgctgccgccgccgcagcagcagctgcagcactggtgtctgacagcttttcatgcggcggtagcccagggtcctctgctttcagcttgacctcatccggaggctcctcagctcatagccaggacggatcacaccagcctgtgttcatctctaaagtgcatacatccgtcgacgggctgcaaggcatctaccctcgcgtaggtatggctcacccttatgagtcttggtttaagccatcccatcccggtctgggggccgccggcgaggttggctccgccggggcctccagctggtgggacgtgggcgctgggtggatcgacgtgcagaatccaaacagcgctgccgctttgcccggtagcttacaccctgcagccggcggccttcagacctctctgcattcgcccctcgggggctataactcggattactcaggtctttcccactccgcgtttagcagtggtgcttcctcccacctactgagccctgccggtcagcacctcatggacgggtttaagccagtgctgcctggatcttatcccgactctgccccttcacctctggccggggccgggggatcaatgctgtccgccggtccatctgccccgctcggagggagcccacggtccagcgccaggcgttatagtggtagagccacgtgcgattgtcccaactgccaggaagctgaaaggctggggcctgccggcgcttcccttaggcgcaagggacttcactcctgccatattcccggctgcggcaaagtgtacggtaagacatcacacctaaaggcccacttacggtggcacactggcgaacgccccttcgtctgtaattggctcttctgcggaaagcggtttacccggtcagacgagcttcagaggcatctgagaacacatactggcgaaaagagatttgcatgccctgtgtgcaacaaaaggttcatgcggtcggaccaccttagcaaacatgtgaaaactcatagcggcggtggcgggggtgggggaagcgcaggcagcgggtcagggggcaagaaaggctctgatactgattccgaacattctgccgcggggtctccaccatgccactctcccgagctgttgcaaccaccagaacccgggcatagaaacggactcgaatag

SEQ ID NO: 206614 - DNA, 1473 bp, synthetic construct
  misc_feature 1..1473: note = Description of Artificial Sequence: Synthetic coding sequence
  source 1..1473: mol_type = other DNA
atgctggccgccacctgcaacaagatcggcagccccagccccagcccttcatccctaagtgactcgagttccagctttggcaaagggtttcatccatggaagaggtcgagctctagcagtagcgcatcatgcaatgtggtgggcagctccttaagcagttttggcgtgagcggcgcctcccggaatggcggatcctccagcgctgcggctgctgccgcagccgccgcggcagctgccgccgccctggttagcgatagtttttcctgtggcggcagtccagggagctccgctttctcactgaccagttcatcagcagcagcggctgcggcagctgccgcggctgccgccagttcctcacccttcgctaacgattattcagtgtttcaagctcctggcgtttccggcggatccgggggcgggggaggcgggggagggggaggatcctccgcccactctcaggacgggtcacaccagccggtgttcatttctaaagtacacacatctgtagatgggcttcagggaatctacccacgcgtaggaatggcacacccctacgaatcctggtttaaaccctcgcacccgggtctcggcgccgccggagaggtgggaagcgctggcgcctcatcatggtgggacgtcggtgcgggctggatcgatgtccagaatccaaattccgccgcagccttgcctggaagtttgcaccctgcggcaggggggctgcagacgtcactgcatagccccctcgggggctataattcagattactctgggttgagtcattcagcttttagctcaggtgctagttcccacctgctgagtccggccggccagcacttgatggacggctttaaacccgttcttccaggctcctatcccgactctgctccctctccactggctggcgctgggggctccatgttgtcagctggtccatctgcccccttgggaggaagcccacggtcgagtgcacgtcgatactcgggccgggccacctgcgactgtccgaactgccaggaggcagagaggctggggccagcgggcgcttcactccgaaggaagggattgcattcctgtcatataccgggctgtggcaaagtgtacggaaaaacgtcacatctcaaggcccacctgcgctggcacaccggcgaaaggccctttgtctgtaactggctgttttgcggtaaaaggtttactcgctcagatgagctccagcgccaccttaggactcataccggcgaaaaacgttttgcatgtccagtctgcaacaaacggtttatgcgcagcgatcatctctcaaagcacgtcaaaacccactctggcggcggtggtggtggaggttccgctgggagtgggtctggtggcaaaaaaggtagcgacacagacagcgaacactcagccgccggaagccccccctgtcattcccctgagctcttgcagccgccggagccgggtcataggaacggcctggaatag

SEQ ID NO: 206615 - DNA, 1527 bp, synthetic construct
  misc_feature 1..1527: note = Description of Artificial Sequence: Synthetic coding sequence
  source 1..1527: mol_type = other DNA
atggccaccagcctgctgggcgaggagccccggctgggcagcacccctctggccatgctggctgctacctgtaacaaaatcggctctccctcaccatctccctcttcactctcagattccagttcatccttcggcaagggcttccatccttggaagagatcctcatcaagctcgagtgcaagctgtaatgtagtgggaagcagcctttcgtccttcggagtgagcggggcctcgcgtaatggaggaagcagttccgctgcagcagcggcggctgctgcggccgcggccgcagccgcgctggtgagcgattctttcagctgcggtgggtctccggggagctcggcattctctctgacttcatcttccgcggctgctgcagccgcagctgcggcggcagctgcctcatcaagtccattcgctaatgactatagtgtgttccaagctcccggagtttcaggcggatcagggggcgggggcggaggtggcggaggaggatcctccgcacacagccaggacggctctcaccagccagtttttattagcaaagtccacaccagcgttgatggcctgcagggcatttatcccagagttggcatggcacatccgtatgagtcctggtttaagcctagccatccgggactgggagccgccggcgaagttggatcagccggagcaagcagctggtgggacgtgggcgcaggatggatagatgtgcagaaccccaatagcgccgcagccctcccgggatctctccatcctgctgcaggggggctgcagacaagcctgcattctccgctgggcggttataacagcgattatagcgggttgagtcattctgccttctcatccggagcctccagccacctgctgtcccccgccggccagcacctcatggatgggttcaagcctgtgcttccaggatcttaccctgacagcgccccatcccctctcgctggggccggcggctccatgttgtctgctggtccttctgcccccttgggcgggagtcccagatcctccgcaagacggtactccggcagagccacatgtgattgtcccaactgccaggaggccgaacggctcggtccagctggcgcaagcctgcgccggaagggcctccatagctgtcatattcccggctgcggcaaggtgtacgggaaaacatctcatctgaaagctcatctgcgatggcacactggcgaacgcccttttgtgtgcaactggttgttttgcggtaagagattcaccagaagcgatgagctccagcggcacctgcggacccacacgggtgaaaaacgtttcgcttgtcccgtttgcaacaagcgatttatgcggagtgaccatctcagtaagcacgtgaaaactcatagcgggggcggaggggggggaggaagcgctgggagcggtagcggcgggaaaaagggctcagacaccgacagcgagcatagcgcggctggctctccaccttgccacagcccagaattactgcagccacccgaacccggacatcgcaatggccttgaatag

SEQ ID NO: 206616 - DNA, 294 bp, synthetic construct
  misc_feature 1..294: note = Description of Artificial Sequence: Synthetic coding sequence
  source 1..294: mol_type = other DNA
atggacaagcagagcagcgccggcggcgtgaagcggagcgtgccctgtgactctaacgaagccaacgaaatgatgccagagactccaaccggcgacagcgatccacagccagcgcctaaaaaaatgaaaacaagtgagtcgtcgacaatccttgtggtccgataccggcgaaactttaagcgtactagcccagaggaattactcaatgatcatgcccgggaaaatcgaatcaacccactccaaatggaagaagaggagttcatggagattatggtggaaattcctgccaagtag

SEQ ID NO: 206617 - DNA, 294 bp, synthetic construct
  misc_feature 1..294: note = Description of Artificial Sequence: Synthetic coding sequence
  source 1..294: mol_type = other DNA
atggacaagcagagcagcgccggcggcgtgaagcggagcgtgccctgcgagagcaatgaggtaaacgagaccatgcctgaaaccccgaccggtgatagtgatccccagcctgcccccaagaaaatgaagacatcagagtccagcactattttggtagtgaggtaccgccggaacgttaaacggaccagccccgaggaactactgaacgaccatgctagggagaaccggatcaatccactccagatggaggaggaggaatttatggagatcatggtggaaattccggccaagtag

SEQ ID NO: 206618 - DNA, 1308 bp, synthetic construct
  misc_feature 1..1308: note = Description of Artificial Sequence: Synthetic coding sequence
  source 1..1308: mol_type = other DNA
atgctgcccgcccggtgcgcccggctgctgaccccccacctgctgttggtgcttgtccagctctctccagctagaggccatcggacaactggcccaaggtttctcattagcgacagagatccccaatgtaatctgcactgctcccggactcagcccaaacccatttgcgccagcgacgggaggtcctacgaaagcatgtgcgagtaccagcgggctaaatgtcgggaccccaccttgggggtcgttcatagggggcggtgcaaagacgccggacagtcaaaatgtaggctcgagcgtgcacaggctctggagcaggccaagaagccacaggaggcagttttcgtgcccgagtgtggtgaggatggcagtttcacccaggtgcagtgtcatacctataccgggtattgctggtgcgtcactcctgacgggaagccgatatcagggagctctgtgcagaacaagacccctgtatgttcaggttcagtgactgataagccactgtcccaagggaactccggaaggaaggacgacggttcaaaacccacgcctacgatggaaacacagcctgtatttgacggtgatgaaatcaccgctcctactctctggattaaacatctcgttattaaggactcaaagctgaataataccaatatccgcaattcagagaaggtgtatagttgtgatcaagagaggcaaagcgcactggaagaggcacagcagaaccccagagaagggatagttattccggaatgcgctcctggcgggttatataagccagtgcagtgccaccagtcaacgggctactgttggtgtgtcctggtggataccggaaggcctctccctgggacctcgacacgctacgtgatgccctcatgtgaatctgatgcacgtgctaagaccaccgaagccgacgatcccttcaaagacagggagctgcctggctgccccgagggtaagaaaatggaatttatcaccagcctgctggatgccctcactacagatatggtgcaggctatcaattctgccgcacccaccgggggtgggaggttcagcgaacccgatccttcacatacactggaagagcgcgtggtgcactggtactttagccagctcgattctaacagctcaaacgacattaacaagcgggaaatgaagccttttaagcgttacgttaagaagaaagctaagcctaagaaatgcgcaaggcgcttcacggattactgtgacctgaacaaagataaagtcataagccttcccgaactgaagggatgcctcggagtatcgaaagaagtgggtcgccttgtttag

SEQ ID NO: 206619 - DNA, 1305 bp, synthetic construct
  misc_feature 1..1305: note = Description of Artificial Sequence: Synthetic coding sequence
  source 1..1305: mol_type = other DNA
atgctgcccgcccggtgcgcccggctgctgaccccccacctgctgctcgtgctggttcagctatcacccgccagaggacaccggactacaggcccccgctttttaatctccgaccgggatccacagtgcaacctgcattgcagtcggacccagccaaagccaatctgtgcctccgacggaaggtcatatgaatcaatgtgtgagtatcagagggcaaagtgtcgcgacccaacgttgggtgtggttcacaggggaagatgtaaagatgcaggacaatcaaagtgccgactggaacgagcgcaggccttagaacaggctaagaaaccgcaggaggccgtgttcgtgcccgaatgtggagaagacggatcattcacacaggtgcagtgccatacctacaccgggtattgttggtgtgtcactcccgacggaaaaccaatttctggcagcagcgtccagaacaagacaccagtatgctctggatcagttactgataagcccctgtcccagggaaatagtggcaggaaagacgacgggtccaaacccaccccaaccatggagacacagcctgtcttcgacggagacgaaattacggctccaacattatggattaagcacctggtgatcaaagactctaagctaaacaacactaatattcggaactcagagaaagtttatagttgcgatcaagaacgccagtcggcactggaagaggctcagcagaacccacgtgagggcatagtgatcccagaatgcgcccccggcggcctgtataagccagtgcagtgccatcagagcactggctactgttggtgcgtgctggtggataccggaaggcccttgcccgggacctccacacggtatgtaatgccttcctgcgagagcgacgccagggcaaaaactacagaggccgatgatccgttcaaagatagagagctgcccgggtgtccggagggcaaaaaaatggaatttattactagccttctcgacgccttgacaacggatatggttcaagcaatcaattccgcagcacctaccggaggaggtaggttctcagaaccagatccgtcacacacgctagaagaaagggttgttcattggtacttcagtcaattggatagtaattcaagtaatgatattaacaaacgcgagatgaagccgtttaagagatacgtgaagaagaaggctaagcccaagaagtgtgctagacgtttcactgattattgcgacctcaataaagataaagtgatttcacttcccgagctaaaagggtgtctaggcgtcagtaaagagggtcgcctcgtgtag

SEQ ID NO: 206620 - DNA, 1374 bp, synthetic construct
  misc_feature 1..1374: note = Description of Artificial Sequence: Synthetic coding sequence
  source 1..1374: mol_type = other DNA
atgctgctgccccagctgtgctggctgcccctgctggccggcctgctgccccccgttcctgcacagaagttctccgcacttaccttcctgagagtggaccaggacaaagataaagactgctctctggattgcgctggcagccctcagaaacctctgtgcgcgagcgatggaaggacctttctgtccaggtgtgagtttcagagggcgaaatgtaaggatccacaattggagatagcctacaggggtaattgtaaagatgtcagtcgctgcgtggccgagcgcaaatatactcaagagcaagccaggaaagagtttcagcaggtatttataccagaatgtaatgatgatgggacatatagtcaggtgcaatgccacagctacactggctactgttggtgtgtgacacccaacggccggcctatctccggaaccgcggtggctcataaaacacccaggtgtcctggctcggtgaacgagaaactaccccagagggaagggaccggaaagactgtgagcttacagatattctccgtcctcaattctgatgacgctgccgcgcctgctctggaaacccaacctcagggcgacgaggaggatattgcctcaaggtatcctaccctgtggacagagcaggtcaaatccaggcagaacaagactaataaaaatagcgttagcagctgtgaccaggaacatcagagtgcactggaggaagctaaacagcctaagaacgataatgtggtcatcccagagtgtgcccacggaggattatacaaaccagtccagtgtcacccctcaacgggctactgttggtgcgtactggtggacacagggaggcccatccccgggacttctactcggtatgaacagcccaagtgtgataataccgccagggctcacccagcaaaggccagggatctgtacaagggccggcagctacagggctgtcccggcgccaaaaaacacgaatttctcactagtgtgttagatgcactcagcacggatatggtgcatgccgcttcggacccatcctcaagctctgggaggctgtctgaacccgacccttctcacactctcgaggagagagtggtgcactggtattttaaactgctggataaaaattcttcgggcgatattgggaagaaagagattaagcccttcaagagatttcttcgaaagaagagtaaaccaaagaagtgtgtgaaaaagttcgtggaatactgcgatgttaacaatgacaaaagcatttctgtccaggagctgatgggctgcctgggagtcgccaaggaggatggcaaagctgacaccaagaaacggcacaccccaaggggacatgctgaaagcacttccaaccggcaaccccggaagcagggatag

SEQ ID NO: 206621 - DNA, 1341 bp, synthetic construct
  misc_feature 1..1341: note = Description of Artificial Sequence: Synthetic coding sequence
  source 1..1341: mol_type = other DNA
atgctgctgccccagctgtgctggctgcccctgctggccggcctgctccccccagttcctgctcagaaattctccgccctgacatttcttcgcgtggaccaggataaagacaaggattgcagcctagattgtgccggcagcccccagaaaccactgtgtgccagcgatgggagaacttttctgtccaggtgcgaattccagagggcaaagtgtaaagatccacagctggaaattgcatatcggggcaactgtaaagacgtgtccaggtgtgtggccgagcgtaagtacacccaggagcaggcgcggaaggagtttcagcaagtgttcattcccgagtgtaacgacgatggaacctactcacaggttcagtgtcattcatatactggctattgctggtgcgtcacgccaaacggtcggcctattagcgggaccgcagttgctcataagacaccgaggtgccctggctctgtgaacgaaaagctgcctcagcgtgaagggaccggcaagaccgatgacgccgccgcccccgcccttgaaacgcagccccagggcgatgaagaggatattgcctctcggtacccaaccctgtggacagaacaggtcaagagtcggcagaacaagacaaataaaaattcagtgtccagctgcgaccaggagcatcagtcagccctggaggaggctaagcaaccaaagaacgataatgtcgtgattcccgagtgcgcccacggcggactctacaaaccggtccagtgtcacccttctactggctattgttggtgcgtcttggtcgatacaggccgacccattcccggtaccagcacaagatatgaacaaccgaagtgtgataacactgcccgggcccaccccgcaaaagcccgggatttgtacaagggacggcagctgcagggctgcccaggtgccaaaaagcacgaatttctgacatctgttctagacgccctctcaacagatatggtacacgccgcctccgacccgagcagtagctccggacgcctgagtgaaccagatccgagccataccctggaagagcgtgtagtacactggtacttcaagctattggacaaaaactcaagcggcgacatcggcaagaaggaaataaagccctttaaacgctttctgcgaaaaaagtctaagccaaagaaatgcgtaaagaaattcgttgagtactgcgacgtcaataatgataaatccatctccgtacaagagctcatggggtgcctgggagtggccaaggaggatggaaaagcggacacgaagaagagacatactcctaggggacacgcagagagtacttctaatcggcagcccaggaagcaggggtag

SEQ ID NO: 206622 - DNA, 1347 bp, synthetic construct
  misc_feature 1..1347: note = Description of Artificial Sequence: Synthetic coding sequence
  source 1..1347: mol_type = other DNA
atgctgctgccccagctgtgctggctgcccctgctggccggcctgctgcctccggtccccgctcagaagttctctgcgctcacttttcttcgagtggatcaggataaggataaagactgcagcttagactgcgccggaagtccccagaagcccttgtgcgcgtcagacgggagaaccttcctgtcccgctgcgaatttcagcgagccaaatgtaaggaccctcaattagagattgcctatagaggaaactgtaaggatgtgtcccggtgcgtcgcggagcgcaagtacacacaagagcaggcgcgcaaggaattccagcaggtgttcatccctgaatgcaatgatgatggtacatatagccaggttcagtgtcacagttacacaggttactgctggtgtgttactcctaacggccgacctatttcaggcactgcagtggctcacaagaccccacggtgtcccggaagcgttaatgaaaagctgccacaaagggagggcactggcaagaccgacgatgccgccgctcccgcactcgagactcagcctcagggcgacgaagaggacattgcttcccggtatccaacgctttggaccgaacaggtgaaaagccgacagaacaaaaccaacaagaactctgtctctagctgcgaccaggaacaccaatctgccctagaggaggctaaacagccgaagaatgataatgtggtgattcccgagtgcgcgcacggcggcctttacaagccggttcaatgtcatccatctacagggtattgttggtgcgtcttggtggatactgggcggccaatcccaggtacaagcacacgctacgaacagccaaaatgtgacaacacggcgcgcgctcaccccgccaaagcacgggatctctacaagggcagacagctacaggggtgcccaggggccaaaaaacacgaatttcttactagcgtcctcgacgctttgtcgactgacatggttcatgccgcttctgatcctagctcctcctctggtcgactctccgaaccggacccgtctcatacactcgaagagagggtggtgcactggtacttcaagttgctggataagaattcttccggtgacatcggaaagaaagagattaaacccttcaaaagattcctgaggaagaaatccaagccaaagaaatgtgtgaagaaattcgtggaatattgtgacgtcaataacgacaagtctataagtgtacaggagctgatgggctgtctgggggtggctaaagaggacggaaaggcggataccaaaaaaagacacactcccagagggcatgcagagtcaacctctaaccgccaggagaacccccggaaggagggctag

SEQ ID NO: 206623 - DNA, 255 bp, synthetic construct
  misc_feature 1..255: note = Description of Artificial Sequence: Synthetic coding sequence
  source 1..255: mol_type = other DNA
aagaagagcaagcccaagaagtgcgtgaagaagttcgtggagtactgcgacgtgaacaatgataagtccattagcgtgcaagagctaatgggctgtctgggtgtggccaaggaggatggtaaggccgatacaaaaaagagacacactccacgaggacacgccgaaagcacatcaaatcgtcaggacgccatggttgtttctagccggcccaaggctaccacgcaccggaaaagtaggaccctgagtcgccgttag

SEQ ID NO: 206624 - DNA, 1275 bp, synthetic construct
  misc_feature 1..1275: note = Description of Artificial Sequence: Synthetic coding sequence
  source 1..1275: mol_type = other DNA
atgcgggcccccggctgcggccggctggtgctgcccctgctgctgctcgcggctgcagccctggccgagggcgatgccaagggcctgaaagagggtgaaacgcctggcaactttatggaggatgaacagtggctgtctagcataagccaatactctggtaagataaaacactggaatagattccgagatgaggtcgaagatgactatatcaaatcttgggaggacaatcagcagggagatgaggcactcgacacaacaaaagacccctgtcaaaaggtgaaatgctcacgacacaaagtctgtatagcacagggctatcagagggctatgtgcattagccgaaaaaagctggagcaccggattaaacagccaacagtgaagctacatgggaataaggacagcatctgtaagccatgccatatggctcaactcgccagcgtttgtggatctgacggccacacgtattcctccgtctgcaaactggagcagcaggcctgtttgagttccaagcagctggccgtgcgatgtgaaggaccgtgtccatgtcctaccgaacaggccgccacatcaactgctgatggaaagcccgagacttgcaccggacaagacttagcagatctgggggaccgtctacgagattggtttcagttgcttcacgaaaatagcaaacagaatggatcagcctcttccgttgcaggtcctgcttccgggttggataaatccctaggagcgtcatgtaaagacagcatcggctggatgtttagcaaacttgatacgtctgccgacctcttcctggatcagactgagctggcagcaataaaccttgataaatatgaggtatgtataaggccctttttcaatagctgcgacacatataaggatggcagagtgtccaccgctgagtggtgtttctgtttctggagggaaaaacctccctgccttgcagaactggagcgtattcagatccaggaggcggctaaaaaaaagccgggtatattcataccctcctgcgatgaggacggctactatcgtaagatgcagtgtgaccagagctccggggattgctggtgtgtagatcagttgggcctggagttaacaggcactcggacacacggctcccccgactgtgacgacatcgtggggttttccggggactttggtagcggcgtgggttgggaagacgaagaagaaaaagaaactgaagaagcaggggaagaagctgaggaggaagaaggtgaggcaggggaggccgacgacggaggttatatttggtag

SEQ ID NO: 206625 - DNA, 1266 bp, synthetic construct
  misc_feature 1..1266: note = Description of Artificial Sequence: Synthetic coding sequence
  source 1..1266: mol_type = other DNA
atgcgggcccccggctgcggccggctggtgctgcccctgctgctgcttgccgccgctgcccttgctgaaggagacgcaaagggtctcaaggaaggagagacccccggtaatttcatggaggacgagcagtggctgtctagtatctcccagtattctggaaaaatcaagcattggaatcgctttagggatgatgactatatcaagtcttgggaggacaaccagcagggcgatgaagccttggataccaccaaggacccctgtcagaaggtgaaatgctctagacataaggtctgcatagctcagggatatcagagggcaatgtgtatctcccgtaaaaagttagaacacagaatcaaacagcccacagtgaaacttcatgggaataaagattctatctgcaagccttgccatatggcgcagctggcatctgtatgcggtagcgacggccatacatacagctctgtatgtaaacttgagcagcaagcttgcctgtcctccaaacagctggcagtccgatgtgaaggaccttgcccgtgtcccaccgagcaggctgcaacaagtactgctgacgggaagcctgagacatgcaccggccaagatttggcggacttgggggataggctgagggactggttccaattacttcatgagaactcaaagcagaatgggtctgcatcttccgtggcgggcccggcaagcgggctggataagtccctaggtgccagctgcaaggactctataggatggatgtttagtaaacttgacacgagtgccgatctctttctggaccagacagagttagcggccatcaatctggataagtacgaagtgtgcataaggcccttcttcaattcatgtgatacctacaaagacggtcgagttagtacagctgagtggtgtttttgcttctggcgcgagaaaccaccgtgtctggccgagttagaacgcattcaaatccaggaagctgcgaaaaagaagccaggtattttcattccgtcctgtgacgaagacggctactacaggaaaatgcaatgcgatcaatctagcggtgactgctggtgcgtggatcagcttggtctcgaactgacgggcactagaactcacggctctcctgattgcgatgatatagttggctttagtggggatttcggttctggggtggggtgggaggatgaggaggagaaagaaacagaggaggccggagaagaagccgaggaagaagagggagaagcaggagaagctgacgacggtggctatatttggtag

SEQ ID NO: 206626 - DNA, 234 bp, synthetic construct
  misc_feature 1..234: note = Description of Artificial Sequence: Synthetic coding sequence
  source 1..234: mol_type = other DNA
atgcgggcccccggctgcggccggctggtgctgcccctgctgctgttagccgccgctgcgcttgcagaaggggacgccaagggcctgaaggagggagagacccccggtaatttcatggaggatgagcagtggttgagctccatttcgcaatatagtggtaagattaagcactggaatcggttccgcgacgtgccttcaagtgacccacctagcaccacccaagcaacaccatag

SEQ ID NO: 206627 - DNA, 1275 bp, synthetic construct
  misc_feature 1..1275: note = Description of Artificial Sequence: Synthetic coding sequence
  source 1..1275: mol_type = other DNA
atgcgggcccccggctgcggccggctggtgctgcccctgctgctgcttgccgcagctgccctagccgaaggcgacgctaaaggcctgaaggagggtgagacaccaggaaactttatggaggatgagcagtggctttcatccattagtcagtatagtggcaagatcaagcactggaatcgctttagagatggcatagaagatgactacatcaagagctgggaggataaccaacagggggacgaggcgctcgacacaactaaagacccctgtcagaaagtaaaatgcagccggcataaagtgtgtattgcccagggttatcagagagccatgtgcatcagccgcaaaaagctagagcacaggatcaagcagcccactgtgaaactgcacggcaacaaggactcaatttgtaagccctgtcacatggcccagcttgcatctgtgtgtggctcagacgggcacacctactctagcgtgtgtaaactggagcaacaggcatgtttgagctccaagcaacttgctgtcaggtgcgaaggtccctgtccatgccctacggagcaagcagccacctcaacagccgatggaaaacctgagacctgcacagggcaggatttggccgatcttggtgaccgattgagggattggtttcagttactgcatgaaaactccaagcaaaatggctcagcttcaagcgtggccggccccgccagcggactggataagtcactgggcgcctcctgcaaagattcaattgggtggatgttttccaaactggatacaagcgcggaccttttcctggaccagaccgagcttgccgcaattaacctggataagtatgaggtgtgcatcagacctttctttaattcttgtgatacctacaaggatggtagagtctcaactgctgagtggtgcttctgcttttggagggagaagccaccatgcctggcggagctcgaaaggattcagatccaggaagctgcaaaaaagaagcccgggatttttatcccatcatgcgacgaggacggatattacaggaaaatgcagtgcgaccagtcttcgggggactgctggtgtgtcgaccagctcggtctggagctgactgggacacgtactcacggtagcccagactgcgacgatattgtcgggtttagtggggattttggctctggggtcggatgggaggacgaggaggaaaaggaaacagaagaagccggtgaggaagcggaagaagaagagggtgaagcaggagaagcagacgacggcgggtatatatggtag

SEQ ID NO: 206628 - DNA, 1311 bp, synthetic construct
  misc_feature 1..1311: note = Description of Artificial Sequence: Synthetic coding sequence
  source 1..1311: mol_type = other DNA
atgctgaaggtgagcgccgtgctgtgcgtgtgcgccgccgcctggtgctcccagagcctcgccgctgctgccgctgtggctgccgccggaggcaggagcgacgggggcaattttttagatgacaagcagtggctgacaaccatcagccagtacgacaaagaagtgggccaatggaataagtttagggacgaggtggaggatgactacttccgtacatggtcccccggtaagccatttgatcaggctctggatcccgccaaggatccttgtctgaaaatgaagtgctcaagacataaggtatgcatcgcccaggactcacagaccgctgtgtgcatctcacaccgcagacttacacatcggatgaaagaggccggagtggaccatagacagtggagggggcctatattatcaacatgcaaacagtgccccgttgtgtacccctcccccgtctgcggttccgatggccatacttactctttccagtgcaagctggagtatcaggcctgtgtgctgggcaagcagatctctgtcaagtgcgaaggccattgtccttgcccatcagataaaccgacctcgacgagccgaaacgtaaagcgcgcctgtagtgacctggagtttcgagaggtcgcaaatagactgagagactggttcaaagcgttgcatgagagtggtagccaaaacaaaaagacaaaaactctcctgagacccgaacgcagcagatttgatacttctatccttccaatatgcaaagattctctgggctggatgtttaacaggttggataccaactacgacctgctgctggaccagtctgaattgcgcagtatctacttggataaaaatgaacagtgcacaaaagcttttttcaattcttgtgatacttacaaagacagcctgatcagtaacaacgagtggtgctactgttttcagaggcagcaggaccccccatgtcagaccgagctatcgaatattcaaaaacggcagggcgtcaagaagctgctgggccagtacattccactgtgtgatgaagatggatattacaagcccactcagtgtcacggttctgtcggccagtgttggtgcgtagaccgatacggaaacgaggtgatggggagtcggatcaatggggtggcagattgtgcaatcgactttgaaatctccggcgatttcgcttccggagatttccacgagtggactgacgatgaggacgacgaagatgatatcatgaacgacgaggatgaaatagaggacgatgacgaggatgagggggacgacgatgatggcggcgacgatcatgacgtgtacatctag

SEQ ID NO: 206629 - DNA, 1302 bp, synthetic construct
  misc_feature 1..1302: note = Description of Artificial Sequence: Synthetic coding sequence
  source 1..1302: mol_type = other DNA
atgctgaaggtgagcgccgtgctgtgcgtgtgcgccgccgcctggtgcagtcagagcctcgctgctgccgcagcagttgctgccgccggtggccgaagtgatgggggcaatttcctggacgacaagcaatggcttactacgatcagccagtacgacaaggaagtgggccagtggaacaagtttagggacgacgactacttccggacttggtcccccggcaagccgttcgaccaggcacttgatcccgctaaggatccgtgccttaaaatgaagtgttcacgacacaaggtctgtatcgctcaggacagccaaactgccgtctgtatctcccacaggaggcttacacaccgcatgaaagaggcaggggtcgaccacaggcaatggaggggcccaattctgagcacttgcaaacagtgccctgttgtctacccgtcccccgtctgcggctccgacgggcatacgtattcctttcagtgcaaattagaatatcaggcgtgtgtgttgggcaaacagatttcggttaaatgcgaaggccactgcccttgcccatctgataaaccaacctctactagccgtaacgtgaaaagggcctgctcagacctggagttccgggaggtcgcaaacaggctgcgggattggttcaaggccttacatgaatctggatctcagaacaaaaaaaccaagaccctcttgcgcccagaacggtctcggtttgacacatcaatcctgcccatctgcaaggactctcttggttggatgttcaatcgtcttgacaccaactacgacttacttctggaccagagtgaactgcgaagtatctacctcgataaaaatgagcagtgcaccaaagccttcttcaactcttgtgacacatacaaggacagtcttatctccaacaacgagtggtgctactgtttccagaggcagcaggatccgccctgccagactgagctgtcaaacatccagaagcgacaaggggtcaagaaactgctgggccagtacatacccctctgtgacgaagatggttactataaaccaacacagtgccacggttctgtcggtcagtgttggtgtgtggaccgctatggcaatgaagtgatgggcagcagaatcaacggtgtcgccgactgcgcaattgattttgagatcagcggggattttgcttccggagattttcatgaatggacggacgacgaagatgatgaagatgacatcatgaacgatgaggacgagatcgaggacgatgacgaagatgaaggcgacgacgatgacggtggcgacgaccacgatgtgtacatctag

SEQ ID NO: 206630 - DNA, 1158 bp, synthetic construct
  misc_feature 1..1158: note = Description of Artificial Sequence: Synthetic coding sequence
  source 1..1158: mol_type = other DNA
atgatcacccaggaccacatccacatgagcagcggcctgagccaggacgactatttcagaacctggtctccgggtaaaccattcgatcaggccctggaccccgcaaaggatccttgtctgaaaatgaagtgcagcaggcacaaagtgtgtatagcgcaggattctcagacggctgtgtgcatcagccaccgtcgtttaacacaccggatgaaggaggcgggcgtggaccatcgacagtggaggggaccaatcctaagcacgtgtaagcagtgtccagtagtgtacccttcgccagtttgtggctcagacggacacacgtatagtttccagtgcaagctcgagtatcaagcttgtgtgctgggcaagcaaatctccgtaaagtgtgaaggccattgtccctgtccctctgataagcctaccagtacctctaggaacgttaagcgagcatgcagtgacctcgagttcagggaagtagcaaacagactcagggactggtttaaggctctgcacgagtctggtagccagaacaagaagaccaaaactttgctgagacctgaaaggtctcgtttcgatacgtctatcctccctatttgcaaagatagcttgggatggatgttcaatcgccttgacactaattatgacctgctcctggaccaatccgaacttcgaagcatctatcttgataagaacgagcagtgcaccaaggcctttttcaactcctgtgacacatataaggactctctcatctcaaataacgagtggtgctattgtttccagaggcagcaggatccaccatgtcagacagaactcagcaacattcagaagagacagggcgtgaagaagctgctcggccagtatattcctttgtgtgacgaagatggatactacaagcctactcaatgtcatggctctgtcggacagtgctggtgtgtggaccgctatggtaatgaagtgatggggtccaggatcaatggggtggccgattgcgcaatagatttcgagattagcggcgatttcgcgagtggggacttccacgagtggacagacgacgaggatgatgaagacgacatcatgaacgatgaagatgagatcgaagacgatgacgaggacgagggagacgacgacgatggcggagatgaccacgatgtgtacatttag

SEQ ID NO: 206631 - DNA, 1311 bp, synthetic construct
  misc_feature 1..1311: note = Description of Artificial Sequence: Synthetic coding sequence
  source 1..1311: mol_type = other DNA
atgctgaaggtgagcgccgtgctgtgcgtgtgcgccgccgcctggtgttcccagtccctcgcagcagcagcagctgtcgcggccgctggtggtcgaagtgacggggggaatttcctcgatgacaaacagtggctgactaccatctctcagtacgataaggaggtgggccagtggaacaaattcagggacgaggtggaggatgactatttccggacctggtccccaggcaagcctttcgatcaagctctcgacccagccaaagacccttgcctgaagatgaagtgctctcggcacaaggtgtgcattgcccaagacagccaaactgccgtgtgcatatcccatcgcagactgacacataggatgaaagaggccggggtcgaccaccggcagtggcgcggaccgatattgagtacctgcaagcagtgccccgtcgtgtatccaagccccgtgtgtggcagtgatgggcacacatactccttccagtgtaagcttgagtatcaagcctgtgtactggggaaacaaatttcagtcaaatgtgagggacactgcccatgccccagcgacaagcccacatccacctcgagaaatgtcaaaagggcatgcagcgacctcgagtttcgcgaggttgctaacaggttaagagactggtttaaagctctgcacgaaagtggttcacagaataaaaagaccaaaacacttcttcgcccagaaaggagccgcttcgacaccagtatactgccaatctgtaaagattcactgggatggatgttcaatcgcctggatacaaactacgatctgctgttagaccagagtgaactaagatcaatctatctcgacaaaaatgaacagtgtactaaggcgttcttcaacagctgtgatacttataaggattctcttatatccaataatgagtggtgttactgctttcagcggcaacaggatccaccatgccagacagaactgagcaacatccaaaagagacagggcgtaaagaaactccttgggcagtatatcccgctttgcgatgaagatggttactacaaacccacacagtgccacgggtccgtaggtcaatgttggtgcgttgaccggtacggcaacgaggttatgggtagccggataaacggagtggcagactgcgcaattgattttgaaattagtggagattttgcgagtggcgactttcacgaatggacagatgatgaagatgatgaggatgacatcatgaacgatgaagatgaaatcgaggatgatgatgaggacgagggcgacgacgacgatggcggggacgaccatgacgtctatatctag

SEQ ID NO: 206632 - DNA, 1302 bp, synthetic construct
  misc_feature 1..1302: note = Description of Artificial Sequence: Synthetic coding sequence
  source 1..1302: mol_type = other DNA
atgctgaaggtgagcgccgtgctgtgcgtgtgcgccgccgcctggtgtagccaaagcctcgcggctgccgccgcagtagccgccgctgggggacgttccgatggtggcaactttctcgatgacaagcagtggcttactacaattagtcagtatgataaggaagtcgggcagtggaataagttccgtgatgacgactacttcaggacttggagcccagggaagcctttcgatcaagccctggatccggctaaggacccctgcctcaaaatgaagtgctctcgacataaggtgtgcatcgctcaagattcccagaccgcggtatgtatatcacaccgtcggctgacccacaggatgaaagaggccggtgtggatcacaggcagtggcgggggccgatcttatcaacctgcaaacagtgccctgtcgtgtatccttccccggtgtgtggatcagatggccatacttatagcttccagtgcaaactggaatatcaggcatgcgtactgggcaaacagatctccgtcaagtgcgagggacactgcccatgtcccagcgataagcccacaagtactagcaggaacgtaaagcgtgcgtgctctgatttggagttccgggaagtcgccaatagactgcgggactggttcaaagccttacacgaatccggctcccagaacaagaagaccaagaccctattgaggcccgagagatcccgtttcgacactagtattctgccgatttgtaaagatagcctagggtggatgttcaaccggctggatacgaattatgatctgctgctcgaccagagcgaacttcgatcgatctacctggataaaaatgaacagtgcaccaaggcattctttaactcgtgtgatacctacaaggattctctcatcagcaacaatgaatggtgctattgtttccagaggcaacaggatcctccttgccaaaccgagctctctaatatacagaaacgacagggtgtgaagaagctgttgggtcaatatattcccctctgcgatgaggacggctattacaaaccgacacagtgtcacggctccgtcggccagtgttggtgcgtcgaccgctacgggaatgaggtcatgggcagcagaattaatggcgtggccgactgtgccattgacttcgaaattagcggggactttgccagcggcgattttcacgagtggacagatgatgaggatgacgaagatgacattatgaacgatgaggatgaaatcgaggacgatgacgaagacgagggtgacgacgatgacggcggggatgatcatgatgtttacatttag

SEQ ID NO: 206633 - DNA, 348 bp, synthetic construct
  misc_feature 1..348: note = Description of Artificial Sequence: Synthetic coding sequence
  source 1..348: mol_type = other DNA
atgctgaaggtgagcgccgtgctgtgcgtgtgcgccgccgcctggtgtagccaatctctggcagccgccgcagccgtagcggcagccggcgggagaagtgatggggggaacttccttgatgataaacagtggctgacaacgatctctcagtacgataaggaggtgggacagtggaacaagtttcgagatgaggtcgaggacgactactttcggacttggtccccagggaagccgtttgatcaagccctcgaccccgcaaaggatccatgcctgaaaatgaaatgcagccgccacaaggtctgcatcgcccaggacagccagaccgcagtgtgcatctctcaccgttag

SEQ ID NO: 206634 - DNA, 1311 bp, synthetic construct
  misc_feature 1..1311: note = Description of Artificial Sequence: Synthetic coding sequence
  source 1..1311: mol_type = other DNA
atgctgaaggtgagcgccgtgctgtgcgtgtgcgccgccgcctggtgctcacaatctctggctgccgccgcagctgtcgcagccgccggaggccggtctgatggcggaaattttcttgacgacaagcagtggctgacaactatcagtcagtacgacaaggaggttggacaatggaataagttcagagatgaggtggaagacgactactttcgaacctggagtccagggaagcccttcgaccaggcgcttgatcctgcaaaagacccctgcctcaaaatgaagtgctctcgccataaggtttgcattgctcaggatagtcagaccgcagtatgcatttcacaccgccgcctgacccataggatgaaggaagcaggcgtggaccaccggcaatggcgcgggcccattctatcaacctgtaagcagtgtcccgtggtctacccaagtccggtatgtggatcagatggacacacctattcgttccagtgtaaactcgaataccaggcttgtgtcttggggaagcaaatttccgtgaagtgcgaaggacactgtccttgccccagcgacaaacctacctctacaagccgaaatgtgaagagggcctgttccgacttggagtttcgggaggtggctaataggttaagggactggtttaaagcactgcacgaatccgggagtcagaacaagaagaccaagacgctcctacgcccagagcgcagccgcttcgataccagcatactgccgatttgcaaagatagcctgggctggatgtttaaccgcctcgacactaattacgacctcctactggatcagagtgaactgaggtccatctatctggacaagaatgaacagtgcaccaaggctttttttaacagctgtgacacttacaaggattcactgatcagtaacaacgagtggtgctactgttttcagaggcaacaggatcccccgtgccagactgaattgtctaacattcaaaagcggcagggcgtgaaaaagcttctgggccagtacatcccactatgtgatgaagatggatattacaagcccacacaatgccatggatccgtcggccagtgttggtgcgtggaccggtacggcaatgaggtcatgggatcacgcattaatggggtggccgactgtgccatagacttcgaaatctcaggggacttcgcctctggagatttccacgagtggactgacgacgaagacgacgaagacgatatcatgaatgacgaggacgagattgaggacgacgacgaggatgaaggagatgatgacgatggtggggatgaccatgacgtgtatatttag

SEQ ID NO: 206635 - DNA, 486 bp, synthetic construct
  misc_feature 1..486: note = Description of Artificial Sequence: Synthetic coding sequence
  source 1..486: mol_type = other DNA
atgctgaaggtgagcgccgtgctgtgcgtgtgcgccgccgcctggtgctctcagagtcttgctgctgccgccgctgtagcggctgctggcgggcgtagcgatggaggaaatttccttgacgacaagcaatggcttacaacgatctcacagtacgacaaggaggtggggcagtggaataaatttagagacgacgactactttcggacctggtccccaggaaaaccattcgatcaggccctcgatccagcaaaggatccatgcttaaaaatgaagtgtagccgacacaaagtgtgtatcgctcaggacagccagactgctgtgtgcatctcccataggagattgacacaccgtatgaaggaggccggagtagaccatcgccagtggcgaggtcccattctgtctacgtgcaaacagtgccctgtggtgtatccttctcccgtgtgcggctcggacggccatacttacagcttccagtgtaagctatag

SEQ ID NO: 206636 - DNA, 522 bp, synthetic construct
  misc_feature 1..522: note = Description of Artificial Sequence: Synthetic coding sequence
  source 1..522: mol_type = other DNA
atgctgaaggtgagcgccgtgctgtgcgtgtgcgccgccgcctggtgctcccaaagcctggccgctgccgccgccgtggcggccgccggagggcggtctgacggtggcaatttcctcgacgacaaacaatggttaaccacaatctcacagtacgataaggaggttggccaatggaacaagttccgcgatgatgactacttcaggacttggagccctgggaagccgtttgaccaggcttgttccgatctggaattccgcgaagtcgccaaccgtttaagagattggttcaaggccctccatgagtccggatcccagaataagaagactaaaaccctactgagacctgaacggtcgcgctttgatacaagcatccttccaatttgcaaggacagcctgggatggatgtttaacaggttggacaccaattatgacctcctactcgaccagagtgagctccgttccatctatctggataagaacgaacagtgtactaaagctttttttaattcttgcgatacatag

SEQ ID NO: 206637 - DNA, 1182 bp, synthetic construct
  misc_feature 1..1182: note = Description of Artificial Sequence: Synthetic coding sequence
  source 1..1182: mol_type = other DNA
atgctgaaggtgagcgccgtgctgtgcgtgtgcgccgccgcctggtgctcccaaagcctcgctgccgcagcggcggtagctgcagctgggggtcggtcggatggcgggaattttctcgacgacaagcagtggctgacaaccatcagccaatatgacaaagaagtgggacaatggaataagtttcgggacgatgattactttcgaacgtggagccctggtaagccttttgatcaggcactggatcccgcaaaagacccatgtctgaagatgaaatgcagtcgccacaaggtgtgtatagcgcaagacagccagacagcagtttgcattagccatcgtaggcttacccaccggatgaaggaggccggtgtggaccaccgccaatggaggggtcctattctctccacctgtaagcagtgtcctgtggtttacccgtcacccgtatgcggaagtgatggacacacctactccttccagtgtaagctggagtaccaggcctgcgtcctcggcaaacaaataagcgtgaagtgcgaggggcattgtccttgccctagcgataagcctacaagcacgagtcgcaacgtcaagcgggggttcgacaccagtatcctgcccatctgtaaggatagcctggggtggatgttcaaccgtctggacaccaattatgatctcctcttggatcagagcgaactccgatcgatttatctcgacaaaaacgaacagtgcacaaaagcgttcttcaattcttgtgatacctacaaagacagccttattagcaataatgagtggtgctattgcttccagagacagcaggaccctccgtgccagacagaactgagcaatattcagaagagacagggcgtgaagaaattgctcggccagtacatccctttatgtgatgaggacggatactataaaccgacacagtgtcacggcagtgtcggccagtgctggtgcgtcgacagatatggaaatgaagttatggggtctcggatcaacggtgtcgctgattgcgcgattgactttgagattagcggggattttgcgtctggagacttccacgagtggacggatgacgaagacgatgaagatgacattatgaatgatgaagatgagatcgaggacgacgatgaagatgaaggggatgacgacgacggaggggatgatcatgacgtttatatttag

SEQ ID NO: 206638 - DNA, 1302 bp, synthetic construct
  misc_feature 1..1302: note = Description of Artificial Sequence: Synthetic coding sequence
  source 1..1302: mol_type = other DNA
atgctgaaggtgagcgccgtgctgtgcgtgtgcgccgccgcctggtgttcccagtccctcgcagcagccgctgcagtcgccgcggccgggggtagaagtgacggtggaaattttcttgacgacaaacagtggctgacgacaatcagccagtacgataaggaggtgggacagtggaacaaatttcgcgacgatgattactttaggacgtggagtcctggcaagcctttcgaccaggccttagatcccgccaaggacccctgcctcaagatgaagtgttccagacacaaggtatgcatagcccaagacagccagaccgccgtttgtatctcccacagacgcctaacccatcgcatgaaggaggccggcgtggaccaccggcagtggagaggcccgattttatccacctgtaagcagtgtcccgtggtatatccatcccctgtctgcgggagcgacggccacacctattcctttcagtgcaagttggaataccaggcttgcgtcttaggaaaacagatcagcgtgaagtgtgaaggtcactgtccctgtcccagtgataaacctacgtcaacaagcaggaacgtaaaacgagcttgttctgatttagaatttcgagaggttgccaaccggcttagggattggtttaaggcgctgcacgaatccggtagtcagaacaagaaaactaaaacactgctgagacctgaacgttctaggttcgatacatctattctgccaatctgcaaggattccttaggctggatgtttaaccgcctggatacaaattatgatttgctcctcgaccagtcagagttaagatctatctacctagataagaacgagcagtgtaccaaagcgttttttaattcttgcgacacatacaaagacagccttatctccaacaacgagtggtgctattgtttccagcggcaacaagaccccccttgtcaaactgaactctctaacatccaaaagcgccagggggtgaaaaaacttctgggacagtacatcccactgtgtgacgaggatggctattataaacccacccagtgtcacggttctgttgggcagtgttggtgtgtcgatcgatacgggaatgaggtgatgggcagtcgcattaacggcgtggctgactgcgccatcgattttgagatctctggcgatttcgcttcaggcgactttcacgagtggactgatgacgaggacgacgaggacgatatcatgaatgacgaggatgagattgaggacgacgatgaggatgaaggcgatgacgatgatggtggcgacgatcacgatgtatatatatag

SEQ ID NO: 206639 - DNA, 1311 bp, synthetic construct
  misc_feature 1..1311: note = Description of Artificial Sequence: Synthetic coding sequence
  source 1..1311: mol_type = other DNA
atgctgaaggtgagcgccgtgctgtgcgtgtgcgccgccgcctggtgcagccagtctctggctgctgccgcggcggtggcagccgccggtggaagaagtgacggaggaaatttcttagacgataagcagtggctcacaacaatttcccagtacgacaaggaggtggggcagtggaataagttcagagacgaagtggaagatgattatttccgcacttggtctcccggaaagcccttcgatcaggccttggacccagcgaaagatccgtgcctgaagatgaaatgctcccgacacaaggtttgcattgcccaggacagtcaaactgcagtgtgcatttcccatagaagactgactcacaggatgaaagaggctggggtggaccacaggcagtggcggggcccgattttgtcaacatgcaagcaatgccctgtggtgtaccccagtcccgtgtgtggcagcgacggacacacatattcgtttcagtgtaagctggagtatcaagcctgcgtgctggggaaacagattagtgtcaagtgcgaaggccattgtccctgtccaagcgataagcccacaagcacatctagaaacgtcaagagagcctgctcagatcttgagttcagagaagttgcaaaccgacttcgtgattggttcaaagcacttcatgagtcaggaagccaaaacaaaaagaccaaaactttgttacggcccgagcgtagcagattcgatacctcgattttgcctatctgcaaggattcactgggctggatgttcaatcgattggataccaattatgacctgcttctggatcagagcgaactgcgatcaatatacctggacaaaaatgaacagtgcactaaggcattctttaatagctgtgacacgtataaggacagtctgatttcaaataacgagtggtgctactgtttccagagacagcaggaccccccttgccagacggaattgtcaaatattcagaagaggcaaggcgtcaaaaagctcctcggccaatacatcccactctgcgacgaggacgggtactacaagccaacacagtgccatgggtccgtggggcagtgctggtgcgttgacagatatggaaatgaagtaatgggaagtcggatcaacggagtcgctgactgtgccatcgattttgagatcagcggagattttgccagcggcgattttcacgaatggaccgacgatgaagatgatgaagacgacattatgaacgatgaagacgagattgaggacgacgatgaagacgaaggtgatgatgatgatggaggcgatgaccatgatgtctacatttag

SEQ ID NO: 206640 - DNA, 348 bp, synthetic construct
  misc_feature 1..348: note = Description of Artificial Sequence: Synthetic coding sequence
  source 1..348: mol_type = other DNA
atgctgaaggtgagcgccgtgctgtgcgtgtgcgccgccgcctggtgctctcagtccctcgctgccgccgcggcagtggcagctgctggcggacggagcgatggcggaaactttcttgacgataaacagtggctgaccactatcagtcaatatgataaggaggtgggtcagtggaataaattcagagacgaggtcgaagatgattatttcaggacctggtccccaggaaaacctttcgatcaagctctcgacccggccaaggacccttgcttgaagatgaagtgttccagacacaaggtgtgtattgcccaagacagccagactgccgtgtgtataagtcacaggtag

SEQ ID NO: 206641 - DNA, 942 bp, synthetic construct
  misc_feature 1..942: note = Description of Artificial Sequence: Synthetic coding sequence
  source 1..942: mol_type = other DNA
atgctgaaggtgagcgccgtgctgtgcgtgtgcgccgccgcctggtgctcccaatcgctggctgccgctgcagccgtggcagctgcaggcggtcgctccgacggggggaatttcctggatgataaacagtggttgacgactatctctcagtatgacaaggaagtggggcagtggaataagtttcgcgacgacgattactttagaacttggtctcctgggaaaccttttgaccaggctttggacccagcaaaggatccctgccttaagatgaaatgtagtaggcataaagtgtgcatagcccaagatagccagaccgctgtgtgcataagtcatagacgactgactcatcgcatgaaggaagcaggcgtggaccacagacaatggcgcggccctatcctgagtacctgcaaacagtgtcccgtagtctatccgtcccccgtgtgcggttccgatgggcatacttatagcttccagtgcaagctggaataccaggcttgcgtccttggaaagcagattagcgtgaagtgtgagggacattgcccctgcccgtcggacaagccgacaagtacttctaggaatgtgaaaagagcttgttcagacttagagtttcgtgaggttgcaaatagactaagggactggtttaaagctttgcacgaaagtggtagccagaacaaaaagacaaagaccctgctacggcccgagaggagtaggtttgatacgtccatcctgccgatctgtaaagatagcctggggtggatgttcaataggctggacacaaactatgaccttctcctggaccagtctgagttacggagcatctacctggacaagaacgaacaatgtaccaaagccttttttaactcatgcgacacctacaaggactccctgatttcaaacaatgaatggtgctactgcttccaacgccagcagggtaaacgatag

SEQ ID NO: 206642 - DNA, 1017 bp, synthetic construct
  misc_feature 1..1017: note = Description of Artificial Sequence: Synthetic coding sequence
  source 1..1017: mol_type = other DNA
atgctgaaggtgagcgccgtgctgtgcgtgtgcgccgccgcctggtgttcacaatctctggccgcggctgctgccgtcgctgccgccggcgggcgcagcgatggaggaaacttcctcgatgataagcagtggctcaccaccattagccaatatgataaggaagtgggacagtggaataagttcagagactgcaaacttgaatatcaggcctgtgtgctaggtaagcagatttcagtgaaatgtgaggggcattgcccatgtcctagcgacaaacctaccagcacatctagaaacgtgaagcgggcatgttcagacttggagtttagagaggttgccaatagacttagggattggtttaaagccctccatgaatcagggtcccaaaataaaaagacgaagacattactgcgaccggagcggtcaagatttgataccagtattctgcctatatgcaaagatagtctgggctggatgttcaatagactggacacgaattatgacctgctcctggatcagagcgagctgcggtccatctatctggataaaaacgagcagtgcaccaaggcctttttcaacagttgtgatacctataaggactctttaatctccaacaacgagtggtgttattgctttcagcgccagcaggatcccccctgtcagaccgagctgagtaacattcaaaaaagacagggggtgaaaaagcttttgggccagtacatcccgttgtgcgatgaggatggctattacaagcccactcagtgccatggcagcgtcgggcagtgttggtgcgtcgaccgctacggcaacgaagtcatgggaagccggataaacggggtggcagattgtgccatcgatttcgagatttcaggggatttcgcgagcggggacttccatgagtggacagacgatgaagatgacgaagatgacataatgaacgatgaagatgaaatcgaggatgacgacgaggacgagggcgatgacgatgatggaggggacgaccatgatgtctacatctag

SEQ ID NO: 206643 - DNA, 1023 bp, synthetic construct
  misc_feature 1..1023: note = Description of Artificial Sequence: Synthetic coding sequence
  source 1..1023: mol_type = other DNA
atgatcaacaacggcagcccccagagcctgagcatgacccggaagtccgactctggcactaattctgagactatgaaagaagccggggtggaccacaggcagtggaggggacccatcctgtctacatgcaaacagtgtcccgttgtctacccctcgcccgtttgcgggagcgacggccacacctattccttccagtgtaaactcgagtaccaggcgtgcgtgctaggcaaacagatcagcgtgaaatgcgagggtcactgtccttgcccttcagataagccaacttccacgtcaaggaatgtgaaaagggcctgctccgacctggaatttcgtgaagtggccaatagactgcgtgactggtttaaagctttacacgagtcggggtcccagaacaaaaaaactaaaaccctcctaagacccgagcggtctcgctttgacacctctatcttgccaatttgtaaggatagtcttgggtggatgttcaaccgcttggacaccaattatgacctgctgctggatcagagcgagctgcggtctatctacctggataagaatgaacagtgtactaaagctttcttcaactcatgcgacacttacaaggatagtcttatcagtaataatgagtggtgttattgcttccagcggcagcaagaccccccctgtcaaaccgaactttctaacattcagaagcgccaaggagtgaagaagctgctcggtcaatatatccccctgtgtgacgaagacggatattataagcctacccagtgccatggatcagtcggacagtgttggtgcgtggacaggtacgggaatgaggttatgggcagcagaatcaatggggtggccgattgtgctatagatttcgagatcagcggggattttgctagcggcgactttcacgaatggactgatgacgaggatgatgaggatgatatcatgaacgacgaggacgagattgaagacgatgatgaggacgagggtgatgacgacgacggcggagatgaccacgatgtctacatatag

SEQ ID NO: 206644 - DNA, 915 bp, synthetic construct
  misc_feature 1..915: note = Description of Artificial Sequence: Synthetic coding sequence
  source 1..915: mol_type = other DNA
atgaagtgcagccggcacaaggtgtgcatcgcccaggacagccagacagcagtgtgcatcagtcacagacgcctgacgcaccggatgaaagaagcaggggttgaccaccggcagtggagaggaccaattctgagcacatgcaagcagtgccctgttgtgtaccctagccctgtctgtggctcagatgggcatacttactcgtttcagtgcaagctagaatatcaggcgtgtgtgctcgggaaacagatttcagtgaagtgtgagggtcattgtccctgcccctcggataagccaacttctacaagcagaaatgtgaagcgcggattcgataccagtatcctgccaatctgtaaggatagtctgggctggatgttcaaccgcctggacaccaactatgatctcctgctggatcagtcggagctgcgtagcatttatctagacaagaacgagcagtgcacaaaggcctttttcaacagctgcgacacctacaaagactctctgatctccaataacgagtggtgttactgctttcagcggcagcaggatcctccttgccagacagagttatcaaacatccaaaagagacagggagttaagaagctcctgggccaatacattcccctttgtgatgaggatggatattacaagccaacacaatgccacggctctgtgggccaatgctggtgtgtcgataggtacggtaacgaagtgatgggaagtagaatcaacggcgtggctgattgtgccatagactttgagataagtggcgatttcgcgagcggggacttccatgagtggacagacgatgaagacgacgaggatgatattatgaacgatgaagacgaaatagaagacgacgatgaggacgagggagatgacgacgatggcggggatgatcatgatgtctatatttag

SEQ ID NO: 206645 - DNA, 951 bp, synthetic construct
  misc_feature 1..951: note = Description of Artificial Sequence: Synthetic coding sequence
  source 1..951: mol_type = other DNA
atgaaggaggccggcgtggaccaccggcagtggcggggccccatcctttcaacctgtaagcagtgtccagtggtgtatccctcaccagtgtgtgggtccgatggacacacctatagctttcaatgcaaactggaataccaggcctgcgtgctgggcaaacagatcagcgtcaagtgcgagggtcactgtccctgtccttctgataagcctaccagcacttcgaggaacgtgaagcgagcctgttccgacctagagtttcgggaagtggcaaacaggctgagagattggttcaaagccttgcacgaatcaggatcccaaaataaaaaaaccaagaccctgttgaggcccgagcggtcgcggttcgatacgtcgattctgcctatctgtaaggactccctagggtggatgttcaatcggcttgataccaattacgaccttctgttggatcaaagcgaactcaggtctatctatttggacaaaaatgaacagtgtaccaaagccttttttaatagttgcgacacatataaggactcactgatttccaataacgagtggtgttactgctttcagaggcaacaggaccctccctgtcagacggaacttagcaacattcagaaaaggcagggcgtgaaaaagctgctcgggcaatatatccccctgtgcgatgaagacggatattataaaccaacgcagtgtcacggcagcgtaggtcagtgttggtgcgtggaccgctatggtaatgaagtgatgggcagtagaatcaacggggtagccgactgtgcgatcgatttcgagatcagtggggactttgctagcggtgattttcatgaatggaccgacgatgaggacgatgaggacgacattatgaacgatgaggatgaaatcgaagatgacgatgaggatgaaggggacgatgacgatggcggcgatgaccatgacgtctacatatag

SEQ ID NO: 206646 - DNA, 1017 bp, synthetic construct
  misc_feature 1..1017: note = Description of Artificial Sequence: Synthetic coding sequence
  source 1..1017: mol_type = other DNA
atgctgaaggtgagcgccgtgctgtgcgtgtgcgccgccgcctggtgctcacagtctcttgcggccgctgccgcagtcgccgcagccggtggccgaagcgatggcgggaatttcctcgacgataagcagtggctcactacaattagccagtacgataaagaggtcggtcaatggaacaagtttcgggattgtaaactcgagtaccaggcctgcgtcctcggcaagcagatttccgtcaagtgcgaggggcattgcccgtgcccatctgataagcctacttctactagcagaaacgttaagagggcttgttctgacctagagttcagggaggtagccaataggttaagagattggttcaaggcgctgcatgaaagcggtagccagaataagaaaaccaagactctgctgaggcctgagaggtcccgattcgacacaagcatcttgccaatttgcaaagacagcctaggttggatgtttaatcggctggatacaaactatgacttgctactggatcagtccgaactacgcagtatttacctggataagaatgagcaatgcacgaaagcattcttcaactcatgcgacacctacaaagacagtctgataagcaacaacgaatggtgctattgctttcagagacagcaggatcccccatgccaaactgaattgtccaatatacagaagcgccagggtgtcaaaaagctattgggccagtacattccactgtgcgacgaggacggatactacaagcctacccagtgccacggttctgtcggccagtgctggtgtgtggaccggtacgggaatgaggtcatggggagccggattaacggagtggcagactgcgccattgactttgagatttctggtgactttgccagcggggacttccatgagtggaccgatgatgaggatgatgaggatgacataatgaacgacgaagacgagatcgaagacgacgatgaggacgaaggggatgatgacgatgggggtgatgatcacgacgtctacatttag

SEQ ID NO: 206647 - DNA, 13740 bp, synthetic construct
  misc_feature 1..13740: note = Description of Artificial Sequence: Synthetic coding sequence
  source 1..13740: mol_type = other DNA
atggagaccaaggagaaccggtgggtgcccgtgaccgtgctgcccggctgtgtgggatgtagaaccgtggccgctctggcctcatggacagtccgggatgtcaaggaaagaatcttcgccgaaacagggttccccgtgagtgaacagcggctgtggagaggtggaagagaactgtccgactggatcaagatcggggacctgacaagcaagaactgccaccttttcgtcaatctccagtctaaagggctcaagggcggtggaaggtttgggcagacgactcctcctctggtcgatttcttgaaggatattctccggcggtatccggaaggcggccaaatcttgaaagagcttatccagaacgcagaggacgcaggcgcaaccgaggtgaagttcctctatgatgaaacacagtacggaacagagactctgtggtctaaggacatggcaccctatcaggggcctgccctgtacgtatataacaacgccgtcttcactcctgaggactggcacggcatacaggagattgcccgctcccgcaagaaagatgatcccctgaaggttggcaggttcggcatcgggtttaactcagtgtatcacattacagacgtaccttgtatcttcagcggggaccagatcggcatgttggatccgcaccagacgctgtttggaccccatgagagcggacagtgctggaacctgaaggacgacagtaaagaaatctcagaactctcagaccagttcgcgccattcgtggggatcttcggctcgacgaaggaaactttcattaacggtaattttcccggtacattctttagatttccattgcggcttcagcctagccaactgagttcaaacttgtataacaagcagaaggttttggaactattcgagagctttcgagccgatgcagacactgtattactcttcctcaaatccgtccaggacgtttcactgtacgtgcgggaggcagacggcacagagaaattggttttccgggtaactagctctgagtctaaggccttgaaacatgagagaccgaatagtatcaaaattttgggcacagcaatctctaactactgcaagaagacaccaagtaacaacatcacctgtgtgacctaccacgtaaatatcgtgctagaggaagagtcaaccaaggacgcccagaagacctcatggctggtttgcaatagcgtcggggggagagggatatcgtctaagcttgacagcctcgccgacgaactcaagttcgtgcccattatcggtatcgcaatgccattaagctcaagagatgacgaggccaaaggagcaacaagcgacttttcaggcaaggccttctgcttcctgccacttccccctggggaggaaagctccacgggccttccagtgcatattagcggattcttcgggctaactgacaacaggcggtccatcaaatggcgagagctggaccagtggcgcgaccccgcagccctgtggaacgaatttcttgttatgaacgtcgtgcccaaggcctatgccactctgattttagactccattaagcgattagagatggaaaaaagctctgatttccccctgtctgttgacgtcatttataaattgtggcccgaagcttccaaggtgaaagttcattggcagccggtactcgaacctttatttagcgagttactccagaacgccgtcatctattctatttcctgcgactgggtccggctggaacaggtttacttctcagagctggacgaaaacctggagtacactaagactgttctgaactacctccagagttctgggaaacagatagcaaaagtacccgggaatgtcgatgccgccgttcagttgacagccgctagcggaactacccctgtgaggaaggttacacccgcatgggtacgtcaggttctccggaagtgcgcccacctgggttgtgctgaagaaaagcttcatctcctggagtttgttctctcagatcaggcctatagcgagttgttgggcttggagctgttgccactgcagaacgggaatttcgttcccttttctagtagcgttagtgatcaggatgtgatctatatcacatcagccgagtatccacggagcctttttccaagcttagaaggtagattcatacttgataacctgaaacctcatcttgtcgccgctcttaaggaggctgctcaaacaaggggcagaccctgtacgcaactgcaactactgaatcccgaacgctttgccaggctgatcaaagaggtgatgaatacgttctggccaggacgagagttaatagtgcaatggtatccatttgacgagaacagaaaccatccctccgtttcctggctgaagatggtttggaagaatctgtacatccatttttctgaggacctaacacttttcgatgaaatgccactcatcccgcgaacgatcctggaagagggccagacatgtgtggaactcataagactccgcatcccttctttggtcatactggacgatgagagcgaagcccaactcccagagtttttggctgatatcgtccagaagctgggggggtttgtccttaagaagcttgatgccagtattcagcatccgctgataaagaaatatatccacagccccctgcccagcgccgtcttgcagatcatggagaagatgccccttcagaaattgtgtaaccaaattacttcgctgctgccgacgcacaaagacgcgctgcgaaagtttctggccagcctaacggattcaagcgaaaaagagaaaaggattattcaggagctcgcgatcttcaagcggattaaccactcctctgatcaaggcattagcagctataccaaactcaaggggtgcaaggtgctgcaccacacagctaagctgcccgccgatctgcggttgtcaatatccgttatcgactcgtctgacgaggctacgataagattagcgaacatgcttaagattgagcaactcaaaactacttcatgcttaaagctagtgctcaaagacatcgaaaatgcattctacagtcatgaggaggtcacccagttaatgctttgggttctggagaacctgtcatctttaaagaacgaaaatcctaacgtcttggagtggctcactccactcaagtttatccagattagccaggagcagatggtgagtgctggggagctctttgaccctgacatcgaggtactgaaggatctgttctgtaatgaagagggaacatacttcccacctagtgtgttcaccagtcccgatattctgcacagtcttcggcagattggactgaagaatgaagcatctctgaaggagaaggatgttgtccaggtcgcgaaaaaaatcgaggcgcttcaggtgggcgcatgccccgatcaggacgttttgctgaagaaagccaaaactctgctcctggtgctaaataagaatcatactcttcttcaaagctctgagggcaagatgactctaaagaagatcaagtgggtgccagcgtgcaaagaacgtcctcctaattacccggggtctttggtgtggaagggcgacctctgtaacttgtgcgcccccccagatatgtgtgacgtcgggcacgcaatcctcattggttcatctctgcccctagtcgaaagtattcacgtaaatttggagaaagctctggggattttcacaaaaccttcccttagtgcggtgctgaaacacttcaaaattgtagtggactggtattcatccaagactttttcagacgaagactattaccagtttcagcacattctgcttgaaatatacggctttatgcacgaccacctcaacgagggtaaagactccttcagggccttgaagtttccctgggtgtggacgggaaaaaaattctgcccactggctcaagcagtaatcaaacccattcacgatcttgacctccagccatatttgcacaacgtgccaaagacaatggcgaagtttcaccagctttttaaggtgtgcggatctatagaggagttgacaagcgaccacatctctatggtgattcagaaaatttacttaaagagtgatcaagacctctctgagcaggaaagcaaacaaaatctccacctgatgcttaacatcatacgatggttgtacagcaatcaaatacctgcatctccgaacacccccgtgcccatccatcattcaaagaatcccagtaagctaatcatgaagccgattcacgaatgctgttattgtgacataaaggtggatgacttaaacgatctcctggaggacagcgtggaacctatcattctggtgcacgaggacatccctatgaaaactgccgaatggctcaaagtaccatgtctcagcacaagattgataaatccagaaaatatgggatttgaacagtcaggccagcgagagcctctcaccgtgcgaataaagaatattctggaggaatacccatccgtgagcgacatcttcaaggaactgctgcaaaacgctgacgacgccaacgcgacagaatgctctttcttgattgatatgcgccggaacatggatattagggagaatttacttgacccagggatggcagcctgtcacggcccggcgctgtggtcttttaacaattctcagttctccgattccgactttgtgaatatcactcgccttggagaatcactaaaacgtggagaagtagacaaggttggcaagtttggtctgggattcaactccgtttatcatatcacagacatccctatcatcatgtctagggaatttatgatcatgttcgatccaaacattaaccatattagtaaacacattaaagataagagcaatcctggaataaagattaattggtctaaacaacagaaacgtctgagaaaatttccaaaccagttcaagccctttatcgatgtgtttggatgtcagctgcctctcactgtcgaggctccttatagttacaatggcaccctcttccgactttctttccggacacaacaggaggccaaggtctccgaggtttctagtacttgttacaacacagccgacatctactctctcgtggatgaattctccttatgcggacacaggctcattatattcacgcagtccgtgaagtctatgtacttgaagtacctgaaaattgaagagaccaacccctcactcgctcaggataccgtgatcattaagaagaagtcctgctctagcaaggcactgaacactcccgttctgtccgtgcttaaggaagcagccaaactgatgaagacatgtagcagctccaacaagaagctgccatctgatgagcctaagagtagttgcatactgcaaatcacggtggaggaatttcaccacgtcttcagacgcatcgccgatctgcagtcccccctgttccgcggtccggatgacgatccagcagccctttttgagatggccaaatcaggccagtccaaaaaacccagcgacgagttatcacagaaaacagtggagtgcactacatggctgctctgcacatgcatggacaccggagaagcactgaaattctctctgtcagagagtggacggagactaggactggtgccctgtggggcggttggagtacaactgtcagagatccaggaccaaaaatggacagtaaagcctcatatcggagaggttttttgctacctgcccctcagaatcaaaacaggcctgcctgtccatattaacggatgcttcgccgttacttccaaccggaaagaaatctggaaaaccgataccaagggtcgctggaacaccacctttatgcggcatgtcattgtgaaggcctaccttcaagttctttcagtgcttcgcgacttggcaaccagcggcgagctcatggactacacgtattatgcagtgtggcccgaccccgatctggtgcacgatgacttcagcgtaatttgccagggattttacgaggacattgcacatggaaaggggaaagaactgacaaaggtgtttagcgatggcagtacatgggtatctatgaagaacgtcaggttcctggacgactctatcttgaagcgacgggacgtggggagcgcagcattcaagatttttctaaagtacctcaagaaaaccggctcaaaaaacctctgcgctgtcgaactgccatcatcagtgaagctggggtttgaggaggcaggctgcaagcagatcttgctggaaaacacgttcagtgagaagcagtttttttctgaggtgttttttcccaacattcaagaaattgaagcagagcttagggatccgctcatgatatttgtgctgaacgagaaagtggatgagtttagcggagtcctgagagttacaccctgtattccatgcagcctggaggggcaccccctagtgctaccctctaggttgatacatcctgaaggcagagtcgccaaactgttcgatatcaaggatgggaggtttccctacggatctacacaggactacctgaaccctattatcctcattaagctggtgcaactgggaatggcgaaggatgacattctgtgggacgacatgctcgaacgggccgtgagcgttgccgaaatcaacaaaagcgatcatgtagcggcttgtcttcgatccagcatactgcttagcctgattgacgagaagctgaaaatacgagatcctcgggctaaagactttgccgccaaataccagacgattcgcttcctgcccttcctcactaagccagccggattttccctggactggaaggggaattcattcaagcccgaaacaatgttcgctgcgaccgatctttataccgccgagcaccaggatatcgtgtgtcttctccagcctattttgaacgaaaacagccattcattcagaggatgtgggagcgtgtccctggccgtgaaggagtttctgggcctactaaagaagcccacagtcgacctagtgatcaaccagctaaaagaggtcgccaagtcagttgacgacggaatcacactgtatcaggagaatattactaatgcctgttataaataccttcacgaggcacttatgcaaaatgagataaccaaaatgtctatcatcgataagctcaagccctttagcttcattcttgtcgagaatgcttacgtggactccgaaaaggtttcctttcacttaaatttcgaagccgcaccttacctttatcagcttcctaacaaatacaagaataactttagagaactctttgagaccgtgggtgtaaggcagtcctgtacagtggaagacttcgcgctcgtgctggagtctatcgatcaggagcggggaactaagcagataaccgaagaaaatttccaattatgcagacgaattatctcagagggaatttggtcactcataagggagaagaagcaagagttttgcgagaagaattatggcaaaattctccttcctgatactaatctcatgcttttgcctgctaagagtctctgctacaacgattgtccctggataaaagtgaaagatactactgtcaagtattgccacgccgacatccctagggaagtggcagttaagctaggggcagtgcctaaacgccataaagctttggaacgctacgcaagcaacgtttgcttcaccactctcggcaccgaatttggtcagaaggagaaactgactagtcgcatcaaatctatcctaaatgcctacccaagtgaaaaagagatgctgaaagagctcctgcaaaacgcagatgatgccaaagccacagagatttgttttgtgttcgatccaagacaacaccctgtcgacaggatttttgatgacaagtgggctcccctccaaggccctgctctgtgtgtatataacaatcaacccttcactgaggacgacgtgaggggaatccagaatcttggcaaggggacaaaggaaggtaacccgtacaagacaggacagtatggcataggctttaattccgtatatcacattacggactgcccatctttcattagcggcaatgacatcctctgtatctttgacccgcatgcacggtatgcccccggcgccacaagcatcagtcctggtcgcatgttccgcgatttggacgcagactttcgaacccagtttagcgacgttcttgatttgtatttaggaacacactttaagcttgataattgcaccatgttccgattcccgctgcggaacgccgaaatggccaaggtatctgagatcagctcagtgcctgcctcagatagaatggtgcaaaatctcctcgacaagctgagatccgatggggcggaattactcatgttcctgaaccacatggagaaaatcagtatttgtgagatcgataagagtacaggcgccctgaacgtactgtactctgtgaagggaaaaataactgatggcgatcgccttaaaaggaagcaatttcacgcatctgtgatcgatagtgtgactaaaaaaaggcagcttaaggacatccctgtacaacagattacttacactatggacaccgaagacagcgaagggaacctgaccacttggctgatttgcaatcggagtggcttttcttcaatggaaaaggtcagtaaaagtgtcatctcagcccacaagaatcaggacatcactttgttccctagaggaggagttgctgcctgtatcacgcacaactacaaaaaaccgcatagggcattctgtttcttgccgttatcactggagacaggcctgccatttcacgtcaacgggcatttcgccttggatagcgcccgtcgaaacctgtggcgcgacgacaacggcgttggagtgcgaagcgactggaataacagcttgatgaccgctctgatagctcccgcttacgtggaactcttgattcagctgaagaaacgttatttccccggatccgatccaacgctctcagtactgcaaaatacacccatccacgttgtgaaggataccttgaagaagtttctgagcttttttccagtgaacaggctggacctacagcccgacctgtactgcctcgtcaaagccttatataattgcatccatgaggacatgaagagattactacccgttgtccgggcacccaatatagatgggtctgatctgcatagtgcagtaatcattacatggataaacatgtccacatccaataaaacccgaccttttttcgacaacctgcttcaggatgaactgcagcacttgaagaacgccgactataatatcaccacaaggaagacggtagccgagaacgtgtataggttaaagcatctgctcttagagatcgggttcaatctcgtgtataactgtgatgagaccgctaacctttatcactgcctgatagacgcagacattcctgtgagttatgtcacgcctgctgacataagaagttttctgatgacatttagctccccagatacaaactgccacatagggaagcttccctgccgactccagcagacgaacctgaaactgtttcattctctcaaactcttggtcgactactgttttaaggacgcagaggagaacgagatcgaagtggaaggacttcccctcttaataacactggattctgtcctgcagaccttcgacgccaagcgacctaaattcctgacgacctaccacgagctcatcccctctcggaaggatctattcatgaatacgttgtacctgaagtactcaaatatcttgctcaactgcaaggtggccaaggtttttgacatctccagcttcgcagacctgctgtcctctgtgctgccccgggagtataaaacaaagtcctgtaccaagtggaaggacaattttgccagcgagagctggctgaaaaacgcctggcactttatctctgagtcagtcagtgttaaggaggatcaggaagagactaaacctaccttcgacattgtggtcgacaccctcaaagattgggccctgcttcccggcactaaatttacggtttctgcaaaccaattggtggtgcctgagggtgatgttcttcttcccctgagcctcatgcatatcgctgttttccccaatgctcagagtgataaagtgttccatgctcttatgaaggccggatgtattcaattagccctcaataagatttgcagcaaggattccgcattcgtgccactgctcagctgtcacaccgctaatattgagagtcccacaagcatactgaaagccctgcactatatggtacagacatcgaccttccgcgccgaaaaattggtcgaaaatgactttgaggctttgctgatgtactttaactgcaatctgaatcatctgatgtcccaggacgacatcaagatactgaagtccctgccgtgctacaagtccatcagcggccggtatgtctccattggtaagttcggcacatgctacgtcctgacaaagtccatcccctcggcagaagtggagaagtggactcaaagttcctcaagcgctttcctggaggaaaagatccacctgaaagaattatacgaggttattggctgtgtgccagtggatgatcttgaagtgtatcttaaacatctgctgccgaagatagaaaacttgagttatgatgccaagctcgagcatctcatttatctgaaaaacaggttgtcatccgcggaagaattatccgaaataaaggagcaactgtttgagaagctcgagagtctgctgatcattcacgatgctaacagccgtctcaaacaggcgaaacatttctacgaccgcaccgtgagagttttcgaggtgatgctgccagaaaaactgtttattcctaatgatttttttaaaaagctggagcaactgattaagcccaagaaccatgtgacctttatgacctcttgggtcgagtttctgcgcaatattggcctgaagtatatccttagccagcagcagctgctgcaatttgccaaagaaatatctgtgagggccaatactgagaattggagcaaagagactctccagaacactgtggacatactactgcatcacatttttcaggagagaatggatctactctcaggcaactttctcaaagagttgagtctgatacccttcctgtgtcccgagcgggctccggccgagttcatcaggttccaccctcagtaccaggaagtgaatggcacactgcctctcatcaaatttaacggcgctcaggtcaaccctaaattcaagcagtgtgacgtgttacagcttctgtggacctcctgtcctattctgcctgaaaaagccactcccctgtctattaaagagcaagagggaagtgatcttggaccgcaggaacagctcgaacaggttctaaacatgctaaacgtgaacctcgaccctccgctcgataaagtaataaataactgtcggaacatttgtaatatcacaactctcgatgaagagatggttaagacccgggctaaagtcctgcggtctatttatgagttcttatccgcggaaaaacgcgagtttaggttccagcttcgcggagtagcctttgtgatggtggaggacgggtggaaattgcttaagccagaggaggtggttatcaatctagagtacgagagtgatttcaaaccatacctatacaaactgcctctcgagttaggtacttttcaccagctgtttaagcatctgggtaccgaggacataatttctacaaagcagtatgtggaagttctgtcccggatctttaagaactctgaaggtaagcagctggaccccaatgagatgagaactgtcaagagagtcgtgagtggactgttcaggagtctgcagaacgatagtgtcaaggtgcgaagtgatttggaaaacgtacgcgacctggctctctaccttcccagccaggacggacgcctggtgaagagctccatcctggtgtttgatgatgcccctcattacaaaagcagaatccagggcaatattggggtccagatgcttgttgatctgtcacaatgctatctggggaaggaccatggcttccacaccaagttgatcatgctctttccccagaagctgcggccccgattgttgtctagcattctggaagagcagctggacgaggaaacccctaaggtgtgccagtttggagccctctgctccctgcagggtaggctgcaacttctgctcagtagtgaacagttcattaccgggttaatcaggatcatgaagcatgagaacgacaatgcttttctcgccaatgaggaaaaagcaattagattatgcaaggccttgcgagaaggtttaaaggtttcttgcttcgagaaactgcaaaccacactgagagttaagggctttaatccaatcccacattctcgatctgagacctttgctttcctgaagagatttggtaatgcggtgatcctactttatattcaacatagcgactcaaaggatatcaactttctcctggctctggccatgacactcaagagcgccaccgataatctcatctcggacacctcttacctaattgctatgttgggatgcaacgatatttaccgcattggggaaaagctggattcacttggtgtaaaatatgactcctccgagccctccaagcttgaattacctatgcctggaactccaattcctgccgaaatacactacacattactcatggatcccatgaacgtcttttacccgggagagtatgttggatacttggtggatgctgagggcggagatatatacgggtcttaccaaccgacttacacttatgctatcattgtacaggaagtggaaagagaggacgccgataatagtagcttcttgggaaagatataccagattgacattggttatagcgagtacaaaattgtttcctcactggatctctacaagttcagccggccagaagaaagtagtcagtccagggactcagcgcctagtacaccaacctcacctacagaatttctaacaccgggactcaggagcatcccccccctcttcagcggcagggagtcccacaagaccagcagcaaacaccagtcacctaaaaagctgaaagtcaactctttgcccgagattctgaaggaggtgacatctgtcgtggagcaagcttggaaactgcctgagtccgaaagaaagaagatcattaggcggctctatctgaaatggcacccagataaaaatcctgagaaccatgatatagccaacgaggtttttaagcatttacagaacgaaattaatagactggagaagcaggcgtttttagatcagaatgccgaccgcgcaagccggcggaccttcagcacttcagcatcccgctttcagtcggacaaatattcattccaaaggttctatacttcttggaatcaggaggcaacaagtcacaaaagcgaacgtcaacagcaaaataaggaaaagtgcccaccaagcgccggccagacatactcacagcgtttcttcgttcccccgacatttaaaagcgtcggcaacccagtggaagcccgccggtggctgcgccaggcgcgagctaatttttccgccgccagaaacgatctgcataagaacgcaaatgaatgggtgtgcttcaaatgttacctgtccacgaagctcgctctgatcgcagcagactacgccgtcagaggcaagagtgataaggatgtgaaaccaaccgctctagcccagaaaattgaggaatatagccagcagctagaggggctcaccaacgacgtgcataccctcgaggcctatggggtagattccctgaaaacccgatatcccgatttgctgccgttcccccagatccctaacgatagatttactagcgaagtcgccatgcgcgtaatggagtgcactgcctgcatcataattaaactggagaactttatgcagcagaaagtatag

SEQ ID NO: 206648 - DNA, 13740 bp, synthetic construct
  misc_feature 1..13740: note = Description of Artificial Sequence: Synthetic coding sequence
  source 1..13740: mol_type = other DNA
atggagaccaaggagaaccggtgggtgcccgtgaccgtgctgcccgggtgtgtggggtgccgcactgttgcagcactggcgtcctggactgttcgtgacgtgaaggagagaatcttcgctgaaacaggctttccagttagcgaacagcgcctctggcggggtggaagagagctgtccgattggatcaagatcggcgacttgacctctaaaaactgtcatctgttcgtcaacctccagtctaagggacttaaaggaggaggtcggtttggccaaaccactccacccctggtggacttccttaaggacattttaaggagatacccagagggaggccaaattttgaaggagttgatccagaatgctgaagacgctggcgcaaccgaagtgaagttcctttatgatgaaactcaatatggaacagagactctgtggtctaaggatatggctccataccagggaccagccctgtacgtttataataatgcagtgtttaccccagaagattggcatggcatacaagaaattgcgcggagtcgaaaaaaggacgaccccctcaaagtcgggaggtttggaataggttttaacagtgtttaccacatcaccgacgtgccatgcattttcagcggcgatcaaattggcatgctggacccccaccagacactcttcggtcctcatgaatctggacagtgctggaacctgaaagatgactctaaggagataagtgaattaagtgatcagttcgctccctttgtcggaatattcggatctacaaaagagacctttattaacgggaattttcctgggaccttctttagatttccccttagacttcagcctagtcagctcagcagcaatctgtacaataagcaaaaggtgttggaactcttcgaatctttcagggctgacgcggataccgtgcttctgttcctcaaaagcgtacaagacgtaagcctctatgttagagaggctgacgggaccgaaaaactcgtgttcagagttacttccagcgaatccaaagccctcaagcatgaaagaccgaacagcattaaaatcctcggtactgccattagcaactattgcaaaaagaccccttccaataacataacatgtgtgacttaccatgtgaatattgtgcttgaagaggaatctaccaaagatgctcagaaaacgagttggctggtgtgtaatagtgtgggggggcgggggatatcatccaaattggattctttggccgatgaactgaagttcgtcccaatcatcggtatcgctatgcccctatcaagccgcgatgatgaggcaaagggtgctacctccgatttttcggggaaagccttttgcttcctccctttacctccaggcgaagagtcatctacaggcttgccagttcatatcagcgggtttttcggtttgactgacaatcgccgcagcattaagtggcgagagctggaccaatggcgggaccccgctgcactgtggaacgaattcttagtgatgaacgtggtccccaaggcttatgccacactcattctggatagtataaaaaggctggaaatggagaaatcttctgactttcccctgtctgtggatgtgatatataagctgtggcccgaggccagtaaagtgaaggtgcactggcagcctgtgctcgagcccttgttctccgagctgctacaaaacgccgttatatattctatttcctgtgattgggtaagactggagcaggtctatttctctgagttggatgaaaatctggaatacacaaaaacagtgctgaactatctccaatcctcaggcaaacagattgcgaaggtgcccggcaacgtcgatgccgctgtacaactgactgcggcgagtggcaccactccggtgagaaaggtgacccctgcatgggttcggcaggtactccgcaagtgcgctcatctaggatgcgctgaggagaaactgcacctcttggagtttgttctgtctgatcaagcatactccgagctcttgggcctggagctgctgccactccagaacgggaactttgtcccattctcatcatctgtatccgaccaggacgtcatctatatcacatccgcggagtatcctcgtagcctgtttcccagcctggagggcaggttcattctcgacaacctcaagccacatttagtagccgccttaaaggaggcggcacagacacggggacggccttgtacacagctacagttgctcaatccagaacgctttgcaagactgatcaaagaagttatgaacaccttttggcccgggagagaactgattgtacagtggtaccccttcgacgagaatagaaaccatccatcagtgagctggctgaagatggtgtggaagaacctgtacattcatttctcggaggacctgaccctatttgacgaaatgcccctgatcccgaggaccatactcgaagaggggcagacttgcgtcgagttaatccggctgcgaattcctagtctcgttattctggacgatgagagcgaagcccaactgcccgagtttctcgccgatatagtgcagaagctgggcgggtttgtactcaagaagcttgacgcctctatacagcacccccttatcaaaaaatacatccattcccctctgcccagcgctgtgctacagataatggaaaaaatgccattgcagaaactctgcaaccagatcacctcactgctgccgacacacaaagacgccctccgcaaattcctcgcctccttgacagacagctctgaaaaggaaaaaaggattatacaggagctcgctatcttcaagcgcattaatcacagttctgaccagggtatctccagctatactaaattaaaggggtgcaaagtgttgcaccacaccgcaaaattacctgcagatctgcggctctctatcagcgtgatcgatagctcagatgaagcgacaattagactcgcaaacatgcttaagatcgagcaactgaagaccacatcatgcctcaaacttgttctgaaagatattgaaaacgctttctacagccacgaagaggtcacacaactgatgctttgggttctggaaaatctcagcagtctaaagaatgagaaccctaatgtcctggaatggttgacgcctctgaagttcattcagattagtcaggaacagatggtgtcagctggagaactgttcgatccagacatcgaggtcctaaaagatctcttttgtaatgaggaggggacgtactttccaccatccgtatttacatcccccgacatcctgcactccctaagacaaatcggactcaaaaatgaggccagtctgaaggaaaaagatgtggttcaggtggcaaagaaaatcgaggctctgcaggtaggagcatgtcccgatcaagacgtgctactgaagaaggccaaaacactgctcctggtattgaataagaatcataccctgctccagtcaagcgaaggtaagatgaccctgaagaaaattaaatgggtgccagcctgcaaagaacgccctcctaattaccctgggtctctggtgtggaaaggcgatctttgcaacctctgcgcacctccagacatgtgcgacgtgggtcacgcgattctgattggaagttcactgcctctggtcgagagtatccatgtgaatctcgagaaggcgctgggtatttttacgaagcccagtttgagcgcggttctgaaacactttaaaatcgtggttgattggtacagctcgaagaccttttccgatgaggactactatcaatttcagcacattctgctcgaaatctatggatttatgcatgatcacctcaatgaaggaaaagattccttcagggccctgaagttcccatgggtgtggaccggcaaaaagttctgtcctctggcccaagcggttattaaacctattcacgatctggacttgcaaccctaccttcacaacgttcctaagactatggccaagttccatcagttgttcaaggtttgcggctctattgaagaactgacgagcgaccatattagtatggtaattcagaaaatctatctcaagtctgatcaagatctgtcagagcaggaatcaaaacaaaatctgcatttgatgttaaacataatccgatggctgtactccaatcaaattccagcctcccccaatacaccggtgccaattcatcatagtaagaacccatcaaaactgattatgaagcctatccatgaatgttgttattgtgacataaaggtggatgacttgaatgacctcctagaagactcagttgagcctatcatactggtgcacgaagatatcccaatgaagacagctgagtggttgaaagtcccctgcctcagcacgagactgattaaccccgagaatatggggttcgaacaatccggacagagggagcccttgaccgtaagaattaaaaatattctggaagaataccccagtgtcagtgatatctttaaagaactcctgcagaacgccgatgacgctaatgcgacggaatgctctttccttatcgacatgcgtcggaacatggacattcgagaaaatctgttggaccctggcatggccgcctgtcatggtccggcactctggtcatttaataatagccaattcagcgacagcgatttcgtcaacatcacaaggctaggtgaatcgttgaagagaggtgaagtcgataaagtgggcaagtttgggctgggatttaactctgtctatcacatcactgatatacccattataatgtctagggagtttatgatcatgttcgacccgaatatcaaccacatctccaagcacattaaggacaagtcaaatcccgggattaaaatcaattggtccaaacagcagaagaggctgagaaaatttcccaaccaattcaagccgttcatcgatgtctttgggtgtcagctgcctctaactgtggaagcaccttacagctataatgggaccctcttcaggctctctttcaggactcagcaggaggcaaaggtgagtgaggtgagcagtacgtgttataataccgctgatatatattctctggtggacgagttcagtctgtgtggacatcgccttataatctttacacagagcgttaagagcatgtatctgaagtaccttaaaattgaagaaaccaaccccagtctagcccaggataccgtcattattaagaagaagtcctgtagttctaaggcccttaacacaccagtgctctccgtgctcaaggaggcggcaaagttgatgaagacatgcagctcttccaataagaaactccccagtgatgaaccaaagtcatcttgcatactgcaaataaccgtcgaggaattccaccacgtattcaggcgtatcgctgacctccaaagtcctctattccgcggccctgacgacgaccctgcggctctctttgagatggcaaaatccggtcaatcgaaaaaacctagtgatgaattatctcagaaaaccgttgaatgcacaacctggctgctgtgtacatgtatggacacgggggaggctttaaagttctcactatccgagtcaggaaggcggttgggactcgtcccctgtggagctgttggcgtccagctgagcgagatccaggaccagaagtggactgtgaaaccacatatcggcgaggtgttttgttacctaccactgagaatcaagacgggactccctgtccacatcaacggatgttttgcagtaacgtccaatagaaaagaaatttggaaaaccgacacaaaaggccgatggaacactacatttatgaggcacgtcatcgttaaggcatacctccaggtgctgtcagtgcttagggatctggcaacctccggcgagctgatggattacacatactacgctgtgtggcccgatcccgatttagtgcacgatgattttagcgtgatttgccagggcttctacgaggacatcgctcacggaaaggggaaagagctcacgaaggtgttttccgatggtagcacctgggttagtatgaaaaatgttagattcctggacgatagcatccttaagaggagagatgtgggctctgcagccttcaagatctttttgaagtatttaaagaaaaccggtagcaagaatctatgcgccgtagagttaccatcaagtgtgaaactcgggttcgaggaggccggttgcaagcagatactattagaaaatacatttagtgagaagcagttcttctccgaggtcttttttccgaatatccaggagattgaagcagagctgagagatccactgatgatcttcgttcttaatgagaaggtcgacgagtttagcggagtgcttcgggtcaccccgtgcattccttgcagcttggaggggcacccgctggtcctgccgtcacgattaattcatccagaggggcgggtggctaagttgttcgacattaaagatggccgctttccttatggctcaacccaggactatctgaacccaattatccttatcaagctggtgcagttaggcatggcaaaggacgatattctctgggacgacatgttggagagagccgtaagcgtcgctgagattaataaatcagaccacgttgctgcctgcttgaggtcctctattttgctgtctcttatcgatgagaagctaaaaatccgagaccctcgtgcaaaggacttcgctgcaaagtaccaaaccattcgttttcttccattcctgacaaaaccggcaggcttttcactggactggaagggcaattcttttaagccggagacgatgttcgcggcgaccgacttgtatactgccgagcaccaagatattgtgtgcctcctgcagcctatccttaatgagaattcacactcttttcgcgggtgtgggtccgtaagcttggctgtcaaagagtttctggggctcctgaaaaagccaacagtggacttagtgatcaaccagctgaaagaagtagcaaagtctgttgatgacggtatcacactgtatcaagagaatatcactaatgcctgctataaatacctgcatgaggctctcatgcaaaacgaaatcacaaagatgtccattatcgataagttaaaacctttttctttcatactggtggaaaatgcgtacgtcgattcggaaaaggtttcatttcatctcaattttgaggctgccccctatctgtatcagttgccgaacaagtacaagaataattttagggagctgtttgaaaccgtgggggtccgccaatcgtgtactgtggaagacttcgcgttagtgctcgagtcaattgaccaggagcgggggacaaaacaaattacagaggaaaactttcagctgtgccggagaataattagtgagggcatttggtcactgatccgcgaaaagaaacaagagttctgcgagaagaactatggcaaaattctactgcctgacacgaacctcatgctgttgcccgctaagtcattgtgttacaacgattgtccttggattaaagtgaaagacaccaccgttaaatactgccacgcagatatacctcgcgaggttgctgtgaagctgggggccgttccaaagagacataaggcgttggaaagatacgcgtccaacgtgtgctttacaacactcgggacggagttcggccaaaaggagaagctaacttccaggataaagagcatactgaacgcttatccatccgagaaagagatgttaaaggaactcttgcagaatgctgatgacgccaaagccacagagatctgttttgtttttgaccctaggcagcacccagtcgaccggattttcgatgataaatgggcccctctgcaggggcctgccctatgtgtgtataataatcagccattcacagaggacgacgtcaggggtatccagaacctagggaagggtaccaaagagggcaacccatacaagactggacagtatgggattggatttaacagcgtgtatcatataacagactgtccttctttcatctccgggaatgacatcctgtgcatttttgatcctcacgctcgctacgctcctggtgccacttctataagcccaggccgcatgttccgcgacctggatgcggacttcaggacacagtttagtgacgtcctggatctctacttgggaacacattttaaattagataactgcacaatgtttcggtttccactgaggaacgctgagatggccaaggtgagcgaaatctcatcagtgccagcctctgatcgtatggttcagaacctgctcgacaagctgaggtccgacggggccgaactgctgatgttcttaaatcatatggagaagatttcaatctgcgagatcgataaaagtacaggagctctaaacgtcctgtattcagtcaaagggaagattacagatggagataggctgaagaggaagcagttccacgccagcgttattgactccgttaccaagaagcgacagctgaaagacattcccgttcaacaaataacttacacaatggataccgaggacagtgaaggcaacctgacgacttggctcatttgcaacaggtccgggttcagttccatggaaaaggtatctaaatccgtcatctccgcccataaaaatcaggatattacattattccctcgaggcggcgtggcagcatgcatcacccataattataagaaaccccacagagccttttgttttctgcctctgagcctggagacaggactgcccttccacgtaaacggacacttcgccctcgattctgcgaggcgcaacctgtggagggacgacaatggtgtcggcgtacggtccgactggaacaatagcctgatgaccgctctcatcgctccagcctacgtggagcttctgatacagttgaagaagcgctattttccgggatctgatcccactctgtctgtgttacagaatacccccatccacgttgtcaaagatacactcaaaaagttcctgtccttctttccagtaaatcgactcgatttacagccggacctttactgcttggtgaaggctctttacaactgtattcacgaagacatgaagcgactcctgcctgttgtgagagctcccaacatcgatgggtccgacctccatagcgccgtcatcattacatggatcaatatgagcacctcaaataagacccgtccattctttgacaacttgctgcaggacgagctccagcacttgaaaaatgccgattataacattaccacccgcaagaccgtagctgagaacgtgtaccggctgaaacacttgcttcttgagatcggctttaatttggtgtacaactgcgatgagacagctaacctgtaccattgcctcattgatgcggacatacctgtcagttacgtcactcccgctgacatcagatctttcttaatgaccttctctagtcccgatactaactgccatatcggtaaactgccttgccgcttgcaacagactaacttaaaactgtttcacagcctcaagttgctggtcgattattgtttcaaggacgcagaagagaacgagattgaggtagaaggtctgcctttgttgattacactggattccgtcttgcagacattcgacgcgaaaagaccaaagttcctcaccacataccacgaactgattccatctcgtaaggatctctttatgaacacactctacttaaaatactctaatattctccttaactgcaaggttgccaaagttttcgacatctcatcctttgctgatttgctttcttccgtgctgcctcgcgagtataaaaccaaaagctgtacaaagtggaaagataactttgccagcgaatcttggcttaaaaacgcatggcacttcataagtgaaagcgtctccgtcaaagaggaccaggaggaaacaaaacccaccttcgacatcgtggtggataccctgaaggattgggccttgcttccagggactaaattcaccgtttcagctaatcagctggttgtgcctgagggagacgtgctcttgcctcttagtctcatgcatattgccgtttttccgaacgcccagtcagataaagttttccacgcgctgatgaaagccggttgtattcagcttgcgctcaacaaaatttgttctaaagactccgctttcgttcccctgctgtcatgccacactgccaatatcgagtcacctacttccatcctgaaagcacttcattacatggtacagacaagtactttccgcgctgaaaagctggtagaaaacgatttcgaggcgctgttgatgtattttaattgcaacctgaaccatttgatgtcgcaagacgacatcaagatcttgaaatctctgccatgttataaatctatctctgggcgttacgtctctattgggaagttcggcacatgttatgtgctaactaaatctatcccgagcgccgaagtcgagaagtggactcaaagcagctcttctgctttcctcgaagaaaagatccacctcaaggaactgtacgaggtaatcgggtgcgtgcctgttgatgacctcgaggtctatctcaagcaccttttacccaaaatcgagaacctgagttacgatgctaaacttgagcacctgatctatttgaagaatcgcctctcgagtgcagaggaactgagcgaaatcaaagagcagctattcgaaaagttggagagcttgctcattatccatgatgcgaactcaaggctgaagcaggccaagcacttttatgacagaactgttcgcgtgttcgaggtgatgttaccggagaagctattcattcccaacgatttctttaagaaactggagcagctcatcaagcctaaaaaccacgtgacctttatgacctcctgggtggagttccttaggaatatagggctgaagtatattctaagtcagcagcagctcctccagttcgccaaggagatctcagtgagagccaacaccgagaactggtcaaaagaaacattacaaaacacggttgacatactgctgcaccatattttccaggagcgaatggatctactttcaggtaatttcctgaaggaactgtctcttatcccatttctgtgcccagagagagcacccgcagagttcatcaggttccatcctcagtaccaggaagtgaatggaacactgccactcattaaattcaacggagcccaggttaaccctaagttcaaacaatgcgatgtcctccagctactatggacttcttgtccaattctgcccgagaaggcaacgcccctgtcaataaaagaacaggaaggttctgacttgggcccccaggagcagctggagcaggtgcttaatatgctcaatgtaaacctggaccccccgctagacaaggtcataaacaactgtcggaatatttgcaacattactactcttgacgaggaaatggtcaaaacaagagctaaggtccttcgttcaatttatgaatttcttagcgcagagaaacgcgaatttcgcttccaactccgtggggtcgcctttgtgatggttgaagatggttggaagctcctgaaacctgaggaggtggttatcaatcttgaatatgagtccgattttaaaccatacctgtacaaattgccactggagttgggaacttttcatcagttatttaagcacctggggactgaggatataatttctaccaaacagtacgtagaagtgctgtccaggatttttaagaatagcgagggcaagcagctagacccgaatgaaatgcgtactgtaaagagggtggtgtctggcctgttcagatccttgcagaatgatagtgtcaaggttcggagtgacctcgagaacgtaagagatttggccctttatctcccctcacaagatgggagactggtgaagtccagtatcctcgtctttgacgacgcccctcattacaaaagtcggatccagggaaacattggcgtgcagatgctagtcgacctgtctcagtgttatctcggtaaagaccatggtttccataccaaactcattatgctattccctcagaagctgcgtcccagactactgtcctcgattctggaagaacagctcgacgaggaaacacccaaggtgtgccaatttggagctctctgtagcttacagggcagactccagctgctgttgtcaagcgagcaattcattaccggtctgatcaggataatgaagcatgagaatgacaatgcctttctggcgaacgaggagaaggctattcggctctgcaaagctttgcgcgagggcttgaaagtatcctgcttcgaaaaactgcagacgacactgcgcgtgaagggatttaaccctattcctcactcccgctctgagacatttgctttcctgaagagatttgggaacgctgtgatcctcctgtatattcagcactcagatagcaaagacattaatttcctgctggcactcgctatgaccctgaagagcgccaccgataatctcataagcgacacaagttatttgattgcgatgttaggctgtaacgatatctatcgaattggggaaaaacttgacagcctgggtgtcaaatacgattcgtccgaaccttccaaactggaactaccaatgccagggacccccatccccgccgaaattcactatacgctcttgatggaccctatgaacgtattttatcccggagaatatgttgggtacctggtggacgcggagggcggcgatatatacggaagctatcagccaacctatacctatgctataattgttcaggaggtggagcgggaagatgctgataactcctcgtttctggggaagatctaccagatcgacatcggatattcagagtataagatcgtgtcatccttagacctctataagttctctcggcccgaggagagttcacaatcccgggacagtgcaccatccacacctacctctcctacggaatttcttacccccggacttaggagcatccctcccctcttctcaggccgagaaagtcataaaacttcaagtaagcaccagagcccaaagaagctcaaagtgaatagtctccccgaaattctgaaagaggtcactagcgtggtggaacaagcctggaaactgccagaatctgagagaaaaaagattatcagaagactatatttgaaatggcaccccgataagaacccagagaaccacgatatcgccaatgaagttttcaagcacttgcagaacgagatcaatcgcctggaaaaacaggcctttcttgatcagaatgccgatcgagcgagtcgcaggaccttcagtacttccgccagccggtttcaatctgataagtatagcttccaacggttttacacgtcatggaaccaggaggcgacctcccataagtcggagagacagcaacagaataaagagaaatgtcctcccagtgccgggcagacatatagccagagattcttcgtaccaccaacctttaaatcagtcggtaatcccgtggaagcaaggcggtggctccggcaggcccgtgccaatttcagcgccgcgcgcaatgaccttcataagaatgccaacgaatgggtgtgttttaagtgttatctgtccactaaactggctctgatcgccgcggactatgctgtaagggggaagtccgacaaggacgtcaaaccgacggccctcgcccaaaagattgaggagtatagccagcagctggaggggttaacaaacgatgtgcatacgctcgaggcctatggagttgattcgctcaagacacggtacccggatctactgccgttcccccagatacctaatgaccgctttacctctgaggtcgccatgcgggtaatggagtgcacagcctgtatcattataaaactggagaactttatgcagcagaaagtctag

SEQ ID NO: 206649 - DNA, 11490 bp, synthetic construct
  misc_feature 1..11490: note = Description of Artificial Sequence: Synthetic coding sequence
  source 1..11490: mol_type = other DNA
atgaacaccttctggcccggccgggagctgatcgtgcagtggtacccatttgatgaaaaccgcaaccatccttccgtttcttggctcaagatggtgtggaagaacctttatatccacttttccgaggatctcacacttttcgatgagatgcccttgattcctcgtaccattctggaggagggacaaacttgcgttgagttaattcgtctgcgcatcccatcactagtcatcctggacgatgaaagcgaagctcaacttccagaatttctggcagacattgttcaaaagttgggcgggttcgtcctgaagaagttggacgcctcaattcagcaccctctgattaaaaaatatatacactctccactcccatcagcagtcctccaaatcatggagaagatgcccctgcagaaactgtgtaaccaaattacttccctcctccctactcataaggacgccctgaggaagtttctcgcctccctcacagattctagcgaaaaagaaaagcggataattcaggaactggccatttttaaacggattaatcactctagtgaccaaggcatcagctcttatactaaactgaagggatgcaaggtcctgcaccacaccgctaagttgccagcagacctgcgattgtcgataagcgtaattgactccagcgacgaagccactatccggttagcaaatatgctgaagattgaacagctgaaaactacaagttgcctaaaactcgtactgaaggacattgaaaacgccttttatagccacgaagaagtgacccagctcatgctgtgggttttagaaaatttgtcttccctgaagaacgagaaccccaatgtattggaatggctgaccccgctgaagttcatccaaatctcgcaggagcagatggtctctgcgggggagttattcgatccagatattgaggtcctgaaagatttgttctgcaatgaagagggaacttatttccctccaagcgttttcacctcccccgacatcctacacagtttgaggcagattggtctcaagaatgaggcgagtctgaaggagaaggacgttgtccaggtcgccaaaaagattgaggcgctccaggttggagcgtgccctgatcaggacgtcctcctgaagaaggcaaagacgctcttgttggtcctgaacaaaaatcacaccctgcttcaatcttctgaaggtaaaatgacgctgaagaaaatcaagtgggtgccagcatgcaaggaacgaccaccaaattaccctggctctctggtgtggaagggcgatctatgtaacctgtgtgcccctcctgatatgtgcgatgtgggacacgccattctcataggcagcagcctacctctggtggagtctattcatgtgaacctcgagaaagcactcgggattttcactaagccatcactgtctgccgtgctgaagcacttcaaaattgtcgtcgactggtatagttcgaaaactttctcggacgaggactattaccaattccagcacatcctgttggaaatctatgggttcatgcatgatcaccttaacgaaggaaaggactcatttagagcgcttaaattcccttgggtctggacaggcaaaaaattttgtccgcttgcacaggccgtaattaagccaatacacgatcttgacctacagccatacctccacaacgtccccaagactatggctaaattccatcagctgttcaaagtctgcggctctatcgaagaattaaccagtgatcatatttccatggtgatacagaagatctatctgaaatcggatcaggacctatcagagcaggaatccaagcagaatctccacctgatgctgaatattatccgatggctttatagcaaccagattccagcaagcccaaacacgcccgtgccaatccaccacagcaagaacccttcaaagctcataatgaagcccatccacgagtgctgctattgcgatattaaggttgatgacctcaatgatcttctcgaggattccgtagaaccgatcatactcgtgcacgaggacatacctatgaaaactgcggaatggcttaaggtgccttgccttagtacgagactgatcaatccagagaacatgggatttgaacagagcggccaacgagaaccacttacagtgcgcattaaaaacatactggaggagtacccctctgtcagcgatatcttcaaagagcttctgcagaatgcggatgacgccaacgccactgagtgctcgttcctcatcgatatgaggcggaacatggacattagagagaaccttctggaccctggcatggctgcctgccatggtccagctctgtggtccttcaataattcacagtttagcgactccgacttcgtcaacatcaccaggctgggggaaagtctgaagaggggagaggtggataaagttgggaaattcgggctgggattcaatagcgtgtatcatattaccgatatcccaatcatcatgtcaagagagttcatgatcatgttcgacccaaatataaatcacattagcaagcatatcaaagacaaatccaacccagggatcaagataaattggtcaaaacaacagaaacgcctgcgaaagtttccaaatcagttcaagccctttattgacgtcttcggctgtcaactgccactcaccgtggaggctccatatagctacaacggcacgctcttcagattgagtttcagaactcagcaagaggctaaggttagcgaggtgagcagtacctgttataacacagcagatatctatagtctggtggatgaattttctctgtgcggtcaccgactgattatcttcacacaatccgtgaagtcaatgtacctcaaatacctcaagatcgaggagactaacccaagcctcgcacaagacacagttattatcaaaaaaaaatcatgtagcagtaaagcattgaacacaccagtcctgagcgtgctcaaggaggctgccaagctgatgaaaacttgcagtagcagtaataagaagttgccaagcgatgagccaaagagcagttgtatactgcagattaccgtggaggagttccaccatgtttttaggagaattgccgacctccagagtcccttgtttagaggcccagacgacgaccctgcagcactattcgagatggcaaaatctgggcagtctaagaagcctagcgacgagctctcacaaaagactgttgagtgtacaacgtggctgttgtgcacttgtatggacacaggagaggcgctgaagttttctctgtcggaaagtggaaggcgcttagggctggtgccgtgtggtgcagtgggtgttcaattgagcgagattcaggaccagaagtggactgtgaagccccacataggcgaggtgttctgttaccttcccctccggattaagaccggactgcccgtccacattaatggatgcttcgctgttacctcaaaccggaaggagatttggaaaaccgataccaagggccgatggaataccacgttcatgagacacgttatcgtcaaagcatacctgcaggtcctttccgtgcttcgtgacctcgctaccagcggcgagctgatggactacacatactacgcagtgtggcccgaccccgatcttgttcatgacgatttctccgtgatctgccagggattctacgaagatatcgctcatggcaaagggaaagagttaacaaaggtcttctcggatggaagtacgtgggtgtcaatgaagaacgtcagattcctcgacgactccattctcaagcggagagacgttggcagcgccgcgtttaagatctttctcaagtacctgaagaaaaccggatctaaaaatttgtgcgccgtcgagcttcctagttccgtaaagttaggcttcgaggaagcaggatgcaagcagatactgcttgaaaacactttttcagagaagcaatttttttccgaagtgtttttcccaaacattcaggagattgaggcagaattaagggatcctttgatgatttttgtgctgaacgagaaggtggacgagttttccggcgttttaagggtgactccatgtattccctgctctctggaggggcatccgttggtgctgccgagccgactcatccaccccgagggccgcgtggccaaattgtttgatatcaaagatgggagatttccttacggtagtacacaggactatttaaaccccataatactgatcaagttggtgcagctgggaatggctaaagatgacattctgtgggatgatatgttagagagggcggtctccgtggccgagatcaataagtcggaccatgtggcagcctgcctgaggagctctatcctgttatctctaatcgatgagaagctaaagatcagagatcctagggcgaaagatttcgcagccaagtatcaaactataaggtttctgccatttctgaccaaaccagctggcttcagtctggactggaagggcaattctttcaaaccagagacaatgttcgccgcaactgatctctacaccgccgagcaccaggacatcgtttgtctgttgcagccgatcctgaacgaaaattcccatagctttcgtgggtgcggaagcgtctccctggccgtcaaagagtttctgggtctgctcaagaagcctacggtggatctggtgatcaaccagttgaaagaagtggccaagtctgtggacgacggtattactctttaccaggagaacatcaccaatgcctgctataagtatctgcatgaagctctgatgcagaatgaaatcactaaaatgtctatcatcgacaaactgaagcccttttccttcattctggtggaaaatgcttatgtcgattctgagaaggtttcttttcacctgaatttcgaggcagccccttacctttaccagcttccaaacaaatacaagaataacttccgagaattgtttgagacggtgggagtgaggcaaagctgtacggtcgaggacttcgccctggtgctggagtctatcgatcaggagcgtgggacgaaacaaatcacagaggagaactttcagttgtgtcggcggataatcagcgaaggcatttggtctctgattcgtgagaagaaacaagagttctgtgaaaagaactatggaaaaatcttgctccccgacactaaccttatgcttctgccagccaagtccttgtgttacaacgactgcccctggattaaagtgaaagatactactgttaagtactgccatgccgacatcccaagggaggtggccgtgaagctgggcgccgtgccaaagcgccataaggccctggaaaggtatgcttctaatgtttgcttcacaaccctcgggaccgagtttgggcagaaagagaagctcaccagccggattaagtcaattctgaatgcgtacccttctgaaaaggagatgctgaaagagttgctgcagaacgccgatgatgctaaggcaacagaaatttgcttcgtgtttgacccacgtcagcacccagtggaccgcattttcgatgacaagtgggcaccactccaggggccggccctgtgcgtgtataataaccagccctttaccgaggacgatgtaaggggcattcagaatttgggtaaagggaccaaggaaggaaatccttacaaaacgggccaatatgggatcggcttcaattctgtgtatcatattacggactgcccctcttttatcagtggtaacgacatcttatgcatcttcgatcctcacgcccggtacgcacccggagccacatcaatctctcccgggaggatgttcagggatttggatgctgatttccgcacacagttttcagatgtgctggacctgtatttggggactcatttcaagctagataactgtacgatgtttagattccctctacgcaacgccgaaatggcgaaagtgtcagagatcagcagtgtgcccgcctccgaccgtatggtgcaaaatttgctggacaagctcaggagtgacggggcagagctcctcatgtttttgaatcacatggaaaagatcagcatttgtgagatcgataaaagtactggcgctctgaacgtcctgtactcagtcaaggggaagatcactgatggcgatcgtctcaagagaaaacaattccatgcttccgtaattgattcggtcacaaaaaagagacagctgaaggatatcccagtgcaacaaatcacgtacacaatggacacggaagatagtgagggaaacttaaccacctggctgatatgtaaccgttccggcttctcctcgatggagaaggtgagtaagagcgtgatttccgcacacaagaaccaggatattaccctctttccacgtggtggtgttgctgcctgcatcacacacaactacaagaagccacacagagcattttgtttccttcctctcagtttagagacaggactgcctttccacgtcaatgggcattttgcattggacagcgcgcggaggaatctgtggcgtgacgataacggtgtgggggtgagatccgactggaataattctctgatgactgccctgatcgcccctgcctacgtagaattactcatccagctcaaaaagcgttacttccctggtagcgatcccactttatctgtattacagaacacacccattcacgtggtgaaagacactctgaaaaaattcctgtcttttttccctgtcaaccgcttggatctgcagcctgacctgtattgcttagtaaaggcactgtataactgtatccatgaagatatgaagagacttctgcctgtggtcagagcgcccaatatagatgggtcagacctgcactccgccgtgatcatcacatggatcaacatgagcacgtccaacaagacacgtccgttcttcgacaacctgttacaagacgagctgcagcacctcaaaaatgctgactacaacatcaccactcggaagacagttgctgagaacgtgtatcgacttaagcacctgctgctggaaattggcttcaatctggtttataattgcgacgaaaccgccaatctttaccactgtctgatcgatgccgacatccctgtgtcttacgtgaccccagctgatatacgctctttcctcatgacattcagctcgcccgacactaactgccatattggcaagttgccatgccggctgcaacagaccaatcttaagctcttccattcccttaagctgttggtcgactattgtttcaaagatgccgaagaaaacgaaattgaagtcgaagggctgccattactcattactttggacagcgtactgcagacttttgacgccaaaaggcctaaatttttaaccacataccatgagctaatcccctcaagaaaggatctcttcatgaataccctatacctcaagtattccaacattctgctaaactgtaaagtcgcgaaggtgttcgatatctcttcctttgccgatctcttgtctagcgttttacctagggagtataaaactaaatcatgcaccaagtggaaagacaattttgcatctgaaagctggctgaagaacgcatggcacttcatatcagaaagtgtgtcagtcaaagaggatcaggaagagactaagcctacatttgatattgtggttgatacattaaaagattgggctcttctgcccggcaccaagttcactgtcagcgctaatcagttggtggtgccagagggcgacgttctcttgcccctgagcctgatgcatattgctgtctttccaaatgcccagtctgataaggtgttccacgcactgatgaaggccggatgtatccagttggctcttaacaagatctgcagtaaggactctgccttcgtgccgctgttgtcctgtcatacagccaacatcgagagccccacctccattctcaaggccctccactatatggttcagacttcaacctttcgggccgagaagcttgtcgagaacgacttcgaagccctcttgatgtacttcaattgtaacttgaatcacctcatgagccaggacgatatcaagatcctaaaatcacttccctgctacaagtcaatttccggcaggtacgtgtccatcggcaaatttggaacctgttacgtgctcacaaaatcgatcccctcagctgaggtggagaaatggactcaaagttcttcaagtgctttcttggaagaaaaaattcacctgaaggagctctacgaggtgatcggctgtgtaccagttgacgacctagaagtttatctcaagcatcttctgcctaagattgagaacctgagctacgacgcaaaactcgaacaccttatttatctcaagaaccggctgtcatcggcagaagagctgagtgagatcaaagagcagctattcgaaaagctggagtccctgctgattatccacgacgccaacagccgcttaaagcaggccaaacacttctacgaccgtactgtgagagtctttgaagtgatgctccccgaaaagctgttcatcccgaatgacttttttaaaaaactggaacagctgattaaacccaagaatcatgtgacgttcatgaccagttgggtggagttcctgcggaatatcggtctgaaatatatcctgagccaacagcagttgcttcagttcgccaaagaaatctccgttcgggccaatacagaaaactggtccaaggaaacactgcagaacactgtcgatatactgctacaccacatctttcaggaaaggatggaccttttatcaggcaattttttaaaagagttgagtttaattcctttcctctgtcccgaaagggccccagctgagtttatcaggtttcatcctcagtatcaagaggttaacggtacccttccactcataaaattcaatggagcacaggttaatccaaagttcaaacagtgtgatgtgctgcagctgctttggacatcttgcccaattctgccagagaaggctaccccgctgagtataaaggagcaagaaggctctgacttaggaccccaggaacagctggaacaagtgctcaacatgctcaacgtcaatctcgatcctccgctcgacaaggtgatcaacaattgtaggaacatctgtaacatcaccactctggatgaggagatggtcaagacgcgggccaaggtgctccggagcatttatgaatttctgtccgctgaaaagcgggagtttagatttcagctccgaggggtcgcattcgtgatggttgaggatggctggaagctgttaaaacccgaagaggttgtgattaatctggaatatgaaagcgatttcaagccatacctatataagcttccattagagcttggcacctttcaccaactgttcaagcacctgggcacagaggatataatctccactaagcaatatgtcgaagtactgtcaagaatcttcaaaaattcagagggcaagcagttggatcctaacgagatgcgaacagtgaaacgtgtcgtgtccggcctgttccgctcactgcagaatgactctgtgaaggtgcggtcggacttagagaacgtgcgcgacctggccctctatttaccctctcaggacggcagactcgttaaaagctctattctggtattcgacgacgccccccattataaaagccgtatccagggcaatatcggggtccagatgttggtggatttaagtcagtgctatcttgggaaggatcacggcttccataccaagcttatcatgctgtttcctcaaaagctgcgcccacgtctcctgtcttcaattcttgaggagcagcttgatgaggaaacccccaaagtatgccagtttggtgctctctgctccctacagggccggctgcagcttctactcagcagtgagcagtttattaccggactcatcagaatcatgaaacacgagaacgataatgccttcctggccaacgaggaaaaagcaatacgtttatgtaaggcccttagagaggggctaaaagtgagttgttttgagaagcttcagaccacactgagggtcaagggctttaaccccataccacactctcggtcggagacattcgcgttcctaaaacggtttggtaatgcggtgatactcctgtatattcagcattcagatagtaaagacattaacttcctcttagctctggccatgacactcaagtctgccaccgacaatctaatctctgatacaagctatttgattgcaatgcttggttgcaacgatatttatcgaataggagaaaaacttgattccctcggcgtgaagtacgactcttcagagccttctaagctcgaattgcctatgcctggaacacccatcccagctgaaatccactacaccctgctcatggaccctatgaatgtgttttatcctggggagtatgtgggctacctggtggatgctgagggaggggatatatacggttcctaccagcctacatacacatatgccataatagtgcaggaagtggaacgggaagacgctgacaactcatcttttctgggtaagatctaccagattgacattgggtacagtgagtataaaatcgtgtcttctctggacttgtataagtttagccggcctgaagaaagcagtcagtcacgagacagtgcgccctccactcccacatcacctactgaatttctcacacctggtctgaggtctatcccgcctctctttagtgggcgtgagtctcacaagacttcctccaagcaccaatcacccaagaaattgaaagtgaattccctgcccgagatcctcaaggaggtgacatccgtggtggagcaggcttggaaactgcccgaaagtgagcggaagaagatcatacgccgactgtacctgaagtggcaccccgataaaaatccagagaaccacgatatagctaacgaggtgttcaagcatctgcagaacgagataaaccggttggagaagcaggccttcttggatcagaacgctgaccgagccagcaggcggaccttcagtacttcagcctcacgattccaatcagacaagtacagctttcagcggttttatacttcctggaaccaagaggccacatcgcataaaagcgaacgccaacagcagaacaaagagaagtgtcctccaagcgccggtcagacctattcacagagatttttcgtaccacccacctttaaatcggtgggaaatcccgtggaagcccgcaggtggctgagacaggcgcgcgcaaatttttctgccgcaagaaacgacctgcacaagaacgcaaacgagtgggtctgctttaagtgctacctgagcactaagctggccttgatcgccgccgactacgcagtaaggggtaaatccgacaaggatgtcaagcccaccgcactggctcagaagatcgaggagtactctcagcagctggaggggctgaccaacgatgtgcacacactggaggcgtacggggtggacagcttgaagacccggtatcccgacttactgccctttccccagattccaaatgatcgatttacctctgaagtagccatgcgcgtgatggagtgcaccgcttgtattattatcaagctggagaatttcatgcaacagaaggtctag

SEQ ID NO: 206650 - DNA, 7332 bp, synthetic construct
  misc_feature 1..7332: note = Description of Artificial Sequence: Synthetic coding sequence
  source 1..7332: mol_type = other DNA
atggccgccgaggagggcgtggccagcgccgccagcgccggcggctcctggggcactgcagcaatggggcgagtgctcccgatgcttttagtgcctgtgcccgcagaagccatgggccagttgggatcacgagctcagttacggactcaaccggaagccttgggaagtctcaccgccgctggctcactccaggtgctgagcctgacaccagggagtcgcggcggcgggcggtgttgtctcgagggaccattctggcacttcctgtgggaggatagccggaattcatcaacacctacagagaagcccaaactacttgctcttggggaaaactatgaattgttgatttacgagttcaacctgaaagacggacgatgcgacgccactattttatactcctgttcacgcgaagccctccagaaactgatcgatgaccaggacataagcatctcactgctcagtctgcgaatccttagtttccataataacacttcattgttatttatcaataaatgcgtgatactgcatattattttccctgagcgcgacgctgcaattcgggtgttaaactgctttaccctgcccctgccagcccaggcggttgacatgatcatcgacacccagttgtgtcgggggatattgttcgtgttgtcatccctcgggtggatctatattttcgatgtcgttgatggtacgtacgtggctcacgtggatctggccctccacaaggaggacatgtgcaatgagcagcagcaagaacccgccaaaatctcctcttttaccagcctgaaggtgagccaggatctagacgtcgccgtaatcgtgagttcatcaaatagcgcagttgccttgaacctgaacctttatttcaggcagcatcctgggcacctgctctgcgaacggatcctggaggaccttcccatacaggggccgaagggggtcgacgaggacgacccggtgaacagcgcatataatatgaagctcgctaaattctcatttcaaatcgatcgttcatggaaagctcagttaagctcccttaacgaaaccattaaaaattctaagctggaagtcagctgttgtgccccctggtttcaggatattctgcacctggaatcaccagagtcagggaatcactccaccagcgtccagtcctgggcctttattcctcaggacattatgcacggtcaatacaacgtgcttcagaaagaccatgccaagacctccgatccaggccgctcatggaagataatgcacataagcgaacaagaggaaccaattgaacttaagtgtgtctccgtgaccggatttacggctctattcacctgggaggtcgagaggatgggctacacaatcaccctgtgggaccttgaaacccagggtatgcagtgttttagcctgggtaccaaatgcattccggtcgactcctctggagaccaacagctgtgcttcgtcttgacggaaaatggactgagtctgattctcttcgggctaactcaagaggaatttttaaaccgtctgatgatccatggcagcgcctcgactgtggacaccctatgccacctgaatggctgggggagatgcagtatccctatacacgccctggaggctggaattgaaaatcgccagctggacacagtgaactttttcttgaagtcaaaagagaacctgtttaatccctctagcaaatcgagcgtgtcagatcagttcgaccacctcagctctcacctttacctccgcaatgtagaagagctcatcccagccctggatctgctgtgtagtgcaataagggagtcctactcagagcctcagtctaagcacttttcagagcagttattgaacctcactctgtcatttctgaataatcaaatcaaggaactgttcatccatacagaagaattggatgagcatctccagaagggagtaaatattcttacttcttacattaatgagctgcgcacctttatgattaaattcccctggaagctcacagatgctatagatgagtacgacgtgcacgagaatgttcccaaggtaaaggagagtaatatttggaaaaagctgtctttcgaagaggtcatagccagcgcaatcttaaacaataaaatccctgaagcccaaacgttttttcgcattgattcacattctgctcagaagctggaagaactgattggaatcggcttaaatcttgtgttcgacaatctgaaaaagaacaatatcaaggaagctagtgagttgctcaagaacatggggttcgacgtgaaaggccagttactgaagatatgcttctacacaaccaataaaaacatcagagactttctggtggaaattctgaaggagaagaactacttttctgaaaaggagaaaagaacaattgactttgtgcatcaagtggagaaattatatctgggtcactttcaggagaacatgcagattcagagtttcccaagatattggattaaagagcaggacttcttcaagcataagtctgtgctcgactccttcctgaaatatgactgcaaagacgaattcaataagcaggaccaccgaattgtgttgaattgggcactgtggtgggatcagcttactcaagaaagcattctgctgcctcgaatttcaccggaggaatataagtcatacagcccggaggctctttggagatatctaaccgcacgccacgactggctcaacattatcttgtggattggagagttccagacccagcacagctacgcttcattacagcagaataagtggcctcttctgaccgtggatgtgatcaaccaaaatacttcctgtaataattatatgcgaaacgagattctcgacaagctcgcccggaacggagtcttcctggcttctgaactggaagactttgagtgttttcttttgcgactgtccagaataggtggcgtgattcaggatacattgccagtccagaattacaaaaccaaggaagggtgggacttccacagtcagttcattctctattgcctggaacactcgctgcagcacctgctctatgtgtacctggactgttataagttgtccccagaaaattgtccatttctggagaagaaggagctgcacgaggctcacccctggttcgaatttttggttcaatgccggcaggttgccagcaacctaaccgacccaaagctgatttttcaggcaagtctggctaacgcacagatcctcatcccgacaaatcaagcatccgtttcgagcatgttgttggagggacacactcttctggctctggccacaaccatgtattccccggggggagtaagccaggtagtacagaacgaggagaatgaaaattgcctaaagaaggtggaccctcagttattaaaaatggctctgaccccatatcctaaactgaagaccgccctgttccctcagtgcaccccccccagtgtgctgccgtccgacattaccatttaccacctgatccagagcctctcaccatttgacccttcaaggttatttggatggcagagtgcaaacacattggcaattggggacgcttggagtcaccttcctcacttctcgtcacccgatctggtaaataaatacgccatcgttgagaggctgaactttgcatattatctgcataatggaaggcctagttttgcctttggtacgtttctggttcaggaactgataaaaagtaagacccccaaacaattgatccaacaggtgggtaacgaagcgtatgtgatcggcctgtcctctttccacataccttccattggtgccgcctgcgtatgcttccttgaacttcttggtctggacagtctgaaactgcgggtggacatgaaggtcgcaaacattatcttgagctacaagtgcaggaacgaggacgcacaatacagttttatcagagagtctgttgctgagaaactgagcaagctggccgatggcgaaaagactacaaccgaagaactgcttgtgctgcttgaggaaggaacctggaatagcatccaacaacaggaaatcaaacggctgtctagcgagagcagttctcagtgggcgttggtagtccagttctgcagacttcacaacatgaaattgagtatatcatatctgagagaatgcgccaaagccaatgactggttgcaattcatcattcactcgcagctgcacaactaccacccggccgaggttaaatcactaatccagtacttctctccagtcatccaagatcacctgcggctggctttcgaaaacctccccagtgtgccaacctctaaaatggactcagaccaggtttgtaacaagtgcccacaggaactgcaaggaagcaagcaggagatgactgacctttttgaaatcttgttacaatgttccgaggagcctgattcatggcactggcttttggtggaagcggtgaagcagcaggctcccatcctgagcgtcctcgcatcctgcctccagggagctagtgcaatctcttgcttatgcgtttggatcattacttctgtcgaggacaacgtagccaccgaagctatgggacacatacaggattctacagaggaccacacgtggaaccttgaagatctgtcggtcatatggagaaccctactgactcgacagaaaagcaaaactctgatccgcggctttcagctgttctttaaggacagtcccttgctgctggtgatggaaatgtatgaactgtgtatgttttttcggaattacaaggaagcagaagcgaaactcttggagtttcagaaatccctcgagacactgaacaccgcggccaccaaggtacatccagtcataccagccatgtggcttgaggatcaggtgtgcttcctactcaaattaatgctgcagcaatgtaagacacaatacgagttgggaaaactgctgcaactgttcgtggaaagagaacacctgttctctgatggcccagatgtcaagaaactatgtattctatgccagatcctgaaggatacatctattgccatcaatcataccatcattacctcatattctatcgaaaatctgcagcacgaatgtcggtctatccttgaacggcttcaaacggatggacaattcgcccttgcccggcgagtggccgagctggctgagctgccagtggacaacttggttatcaaagagatcactcaggaaatgcagacactgaagcatattgagcagtggagtctgaaacaggcaaggatcgacttctggaaaaagtgccatgagaacttcaaaaagaattctatctcttcaaaggctgccagttccttctttagcacccaagcccacgtggcgtgcgaacaccctacaggctggtcttctatggaagagcgacacctcctcctaacattggccggccactggctggcacaggaggatgtcgttcccctggataagttagaggagctcgagaaacagatctggctgtgcagaattacccagcacactttaggtcgcaaccaagaagagaccgagcccagattcagccggcagatcagtaccagcggagaactttctttcgactccctggcatctgagttctcctttagcaagctggcggcccttaatacttccaagtatctggaactcaactcactgccatctaaagagacatgcgagaacagactcgattggaaggaacaggagtctctgaacttcctgattggcagactgttagacgacgggtgcgtgcacgaggccagtcgtgtatgtcgctatttccatttttacaacccagatgtggccttggtgcttcattgtcgtgcactggccagtggtgaggccagtatggaagatcttcacccagagatccacgccctgctgcagtcggctgaacttctggaggaagaggctcccgatatccctctcagaagagttcactccaccagcagcctggactcccaaaagttcgtgacggtcccatctagtaacgaggtcgttactaacttagaagtcctcactagcaagtgtctccatggcaaaaactactgccgacaagttctctgcctctacgatttagccaaggagttgggctgctcatacactgatgttgccgctcaggatggggaggcaatgctacgtaagatcttagcctcacagcagccggatagatgcaagagagcacaggcatttatctctacacaggggctgaagcctgacacagtggctgagctcgttgctgaggaagtaacccgggaactattgacaagctcacagggaaccggccacaagcagatgttcaatcccaccgaggaatcacagacattccttcagctcaccaccctatgccaagataggactttagtgggcatgaaactcctggacaagatttcgtccgtgccgcacggtgagctgagctgtactacggagctgctgatcttggctcaccattgttttacattgacttgccacatggaaggaatcattagggtgttgcaggccgcccatatgttgaccgacaatcatctcgctccgtccgaagagtatgggctagtagtgcgtcttctcacaggcatcggcagatacaatgagatgacttatatcttcgacttactgcacaagaaacactacttcgaggtcctgatgaggaaaaaactggatccatctggcacccttaaaactgcactactagactacatcaaaagatgcagacctggtgattccgaaaagcataacatgattgctctgtgcttctctatgtgcagagagattggcgagaatcatgaggccgcagcccgcatccagctgaagctgatcgaaagccagccttgggaggattcactgaaggacggccatcagttgaagcagctgcttctgaaggctctgactctcatgttggacgccgcagagagctacgctaaggattcctgcgtgaggcaggcccagcactgccagcgcctgaccaaattaatcaccctgcaaatccatttcctgaacaccggccagaatacgatgttgattaacctcggaagacacaagctgatggattgtattctcgctcttccacgattctaccaagcctcaatcgttgctgaggcctatgatttcgtgcctgactgggcggagatcctttatcagcaggtgatcctcaaaggtgacttcaactatttagaggagtttaagcagcagcggttactgaaaagctctatttttgaggagatttctaagaagtacaaacaacatcagccgacagatatggtgatggagaatctaaagaagctgcttacctattgcgaggacgtgtatctctattataaactggcatacgaacacaagttctatgagattgtgaatgttctgctgaaagaccctcaaacgggctgttgtctcaaggacatgcttgccggctag

SEQ ID NO: 206651 - DNA, 6993 bp, synthetic construct
  misc_feature 1..6993: note = Description of Artificial Sequence: Synthetic coding sequence
  source 1..6993: mol_type = other DNA
atggccgccgaggagggcgtggccagcgccgccagcgccggcggctcctggggaaccgcggcaatgggtcgcgtgcttcctatgctgctcgtgcctgtccccgccgaggcgatgggccaactgggaagtcgggctcagctccgtactcagcccgaggctctggggagtctcacagccgcagggtcgctccaagtgctctccctgacacccggtagtcgggggggagggcggtgttgtctcgaaggacccttctggcactttctgtgggaagatagccgcaattccagcactcctacagaaaagcccaagctactcgcgctgggagagaactatgaactcctgatctacgaattcaacctgaaggacgggcggtgcgatgcaaccatcttatattcttgtagccgggaggcgcttcagaaactgatcgacgaccaggacatcagcatctcgctcctgagccttcgaatattatcttttcacaacaataccagtctcctcttcattaacaagtgtgtgatcctccacattatttttcccgaacgtgatgcggccatcagggttctaaactgctttactctcccactcccggctcaagccgtggatatgatcattgacacgcagctgtgcagaggcattcttttcgtactcagtagcctcgggtggatttatatatttgatgtggtggacggcacatacgtcgcacacgttgacctggcactccacaaggaggacatgtgcaatgagcagcagcaagagcctgctaagatctcctccttcacaagccttaaggtctcccaggacctggatgtggccgtcatcgtaagtagtagcaatagcgctgtcgctctgaaccttaatctctatttccgacagcatcctggacacttactctgtgagcgtattctggaggacctgccaatacagggccccaaaggagtagacgaagacgatcctgtgaatagtgcgtataacatgaagctggccaagttctcttttcaaatcgatcgctcttggaaggcccagctctcgtctctgaacgagaccattaaaaattccaaactggaggtgtcctgttgtgctccttggtttcaggatatcctacacttggagtcacctgagtccgggaatcatagtacaagtgtccagtcttgggcttttattccccaagatattatgcatgggcagtataatgtcctacagaaggaccacgccaagacatctgatccaggaaggtcttggaagattatgcacatcagtgagcaggaggaaccgattgaactcaagtgtgtcagtgtcactgggtttaccgctttattcacctgggaagtcgaacgaatgggttataccattacattgtgggatcttgaaacacaaggaatgcagtgcttctctctcgggactaaatgcatacctgtggactcttcaggcgatcagcagttatgctttgtcctaactgaaaacggtttgagcctcattctgttcggcctcacacaggaggagtttctcaatcgactgatgattcatggatctgccagcactgtggatacattgtgccacctcaacggatggggacggtgcagtatacctatacatgctctcgaagccggcattgaaaaccgccagcttgacacagttaattttttcctaaaaagtaaggagaatctgtttaatccctctagtaagagctcagtcagtgatcagttcgaccatctctcgtctcacttatacctgaggaacgtcgaggagcttatacctgctctcgaccttctctgctctgctatcagagagtcctattctgaacctcagagcaagcactttagtgaacagctcctgaacttgacacttagctttctcaacaatcagattaaggagctttttatccacaccgaagaactcgatgaacatctccaaaagggagttaacattttgacctcctatattaacgagcttcgcacgtttatgataaagtttccctggaagctcacagacgcaatcgatgaatatgatgttcacgagaacgttcctaaagtcaaggaaagcaacatctggaagaaactgagttttgaggaagtgatcgcctcagcaattttaaacaacaaaatacccgaggcacagacatttttccgaattgactctcatagtgcccaaaaactcgaggaacttatcggcattggactgaacctcgtgtttgacaacctaaagaaaaacaatatcaaggaggcctcggagctgctcaagaacatgggattcgatgtgaaaggccaattgctgaaaatttgtttctatacaaccaacaaaaacatccgcgactttttggtggaaattcttaaagagaagaactattttagcgagaaagagaaacggaccattgactttgttcaccaggtggaaaaactctatcttggtcattttcaggaaaacatgcagatccagtctttccctagatactggattaaagagcaggactttttcaagcataagtccgtgcttgattcgtttctgaagtatgattgtaaggatgagtttaataagcaggatcatcgcatagtcctgaactgggcactttggtgggatcagcttacacaagagagcattctgctgcctcgtatatcccccgaagagtataagtcctattcccccgaggcattgtggaggtacttgaccgccaggcatgattggttgaatatcatcctgtggataggcgagttccagacgcaacactcatacgccagcctgcagcaaaataaatggccgctgctcaccgtcgacgttatcaaccagaatacctcatgcaacaattacatgcgcaacgagatactggataagctcgcccggaacggcgtcttcctggcctcagagcttgaagactttgagtgtttcctgctccgtttatccaggataggtggtgtcattcaggacaccctgcccgtgcagaactacaaaaccaaagaagggtgggatttccatagccagtttatattgtattgtctggaacacagcctgcaacatctgctgtatgtatatctggattgctacaagttgagcccagagaactgtcctttcctggaaaaaaaagagcttcatgaagcacacccatggttcgaatttctggtgcaatgtcgccaagtagcctcaaatttgacagaccccaagttgatcttccaagccagtctcgctaatgcacaaattttgatcccaacaaaccaggcttccgtgtctagtatgctattagaaggccacaccctgttagccctggccaccacgatgtatagccctggtggagttagccaagtcgtgcaaaatgaagagaacgaaaactgccttaagaaagtggatccacagctgctcaaaatggcactaactccctatccaaaactgaagacagctctctttcctcaatgcaccccgccttctgtgctgccatcggatataaccatttaccatttgatccagagcctctccccattcgatccaagcagacttttcggctggcaaagcgccaacactttggccatcggagacgcttggagtcatctcccgcattttagtagccccgatctggttaataagtacgccattgtcgaaagacttaacttcgcttactacttacataatggtagacctagcttcgctttcgggacttttctggtgcaggaactgattaagtctaaaacacctaagcagttaattcaacaggtcggaaacgaggcttatgtgatcggtttgagcagttttcatatcccgagtatcggagctgcctgtgtttgttttctcgaattgctcggactggactccctgaagctgcgggtcgacatgaaagttgccaatattatcttgtcgtacaagtgcagaaacgaagacgcacagtactcatttatccgagagtctgtcgccgaaaaactgtccaagctggccgatggggagaaaactacaactgaggagttgctggtcctgctggaagagggaacgtggaattcaatccagcagcaggaaatcaaacgtcttagcagcgaatcgtcaagtcaatgggcccttgttgtgcaattttgccgtctccataatatgaaactctccatctcttacctccgagagtgcgccaaggccaatgattggttgcaatttataatccacagtcagcttcacaattatcacccagccgaggtcaaaagcttgatacagtatttttccccagtgatccaggaccacctccgcctcgcctttgagaacttgccctctgtgccgacctcaaagatggactctgaccaggtgtgcaacaagtgcccgcaggagctgcagggatcaaagcaggagatgactgacctctttgagattctcctccaatgtagcgaagagcccgattcttggcactggctgttagtagaggcagtgaagcaacaggccccaattctctccgttctggcatcgtgtctgcaaggagcttcggcaatcagttgcctatgcgtgtggattatcacctctgtcgaagacaacgtcgctaccgaagcaatgggacatattcaagactctactgaagatcatacctggaacttagaggatctcagcgtgatctggcgaacactgcttactcgccagaagagtaagaccctcattcgcggctttcagctatttttcaaggactcacctctcttgctagtgatggagatgtacgaactgtgcatgtttttccgcaactataaggaagccgaggcaaagttgctggagttccagaagtcgttggaaacacttaacacagctgccaccaaggtgcacccagttatcccggccatgtggctggaggaccaggtgtgctttctcttaaagctgatgctacaacagtgcaagacgcaatatgaattgggcaaactgcttcaactcttcgtggaacgggagcaccttttttccgatggaccagatgtgaaaaaattgtgcatcctctgccagatactgaaagacaccagcatcgccataaatcacaccattatcacttcatatagcatcgaaaacctacagcatgagtgccgctctatcctagaaagactgcaaacagatggccagtttgcgctggcaaggcgcgtggccgagctcgctgaactgccagtggataacctcgtgataaaagagatcacacaggagatgcaaacactgaaacacatcgagcagtggtccctcaagcaggcacggatagacttttggaaaaaatgtcacgagaactttaagaaaaacagcatcagtagtaaagcagctagtagtttctttagtactcaggcacacgtggcttgtgagcatcctaccgggtggtcaagcatggaagaaagacatttgctcctcacattagccggacactggctggcgcaagaagacgtcgtgcccctagataaactggaagaactggagaaacagatctggctctgccggataactcagcacaccctgggtcgcaaccaagaggagacagagccccgtttttctcgccaaatatcaacctcaggggagttgagcttcgactcgctcgcctccgaattttctttttccaaattagccgcacttaacacctccaaatatctggagttaaattctttaccgtccaaggagacttgcgagaatcgtctggattggaaggagcaggagagtctgaattttttgattggaaggctcctggatgacggttgtgtgcacgaggctagtagagtttgtagatattttcacttttacaacccggacgttgctctcgtgctgcactgccgagcgttagcctccggcgaggcaagcatggaggatctgcatcccgagattcatgctctcctgcagagtgcggaactgctagaagaagaagcgcccgacatccccctcagacgcgttcactctagacataagcaaatgttcaacccaactgaagagagccagacatttctgcaactgacaaccctctgccaagataggacactggtggggatgaagttattagataagattagttctgtccctcacggagagttgtcgtgtaccacagagttgctgattcttgcgcatcattgctttactctgacctgtcacatggaggggattattagggtcctccaggccgcccatatgttgacagataaccacctagctcccagtgaggagtatgggctggtggtgcgccttctaaccgggattgggcggtacaacgagatgacgtacatattcgaccttctgcataagaaacattactttgaggtgttgatgcgtaaaaagctcgacccctcaggcactctaaagaccgccttactcgattacatcaaacgatgtcggccaggtgattccgagaagcataacatgatcgctttgtgcttctccatgtgcagagagattggggaaaaccacgaggccgccgcaagaattcagcttaaactgatagagtcacaaccgtgggaggatagtcttaaagacggccatcagctcaagcagttgttactgaaggccctgacactcatgcttgacgctgcggaatcgtacgcgaaagactcttgcgtccgccaagcccagcattgccagagactcacgaaactcattacattgcagatccacttcctcaacaccgggcagaatacgatgctgattaaccttgggaggcacaagctgatggactgtatactggccctgcctcgcttctaccaagcatccatagtagccgaggcgtatgatttcgtgcccgactgggcagagatcctgtatcagcaggtaattctgaagggagacttcaattatctggaggagtttaagcagcaacggctgctgaaaagtagcatctttgaagaaatctcgaaaaagtacaaacagcaccagccaaccgacatggtgatggaaaatttgaagaagcttttgacttattgcgaagatgtatacctatactacaagctggcctacgagcacaagttctatgaaatagtcaatgtcttactgaaggatccacagaccgggtgttgtctgaaagatatgctagctgggtag

SEQ ID NO: 206652 - DNA, 6240 bp, synthetic construct
  misc_feature 1..6240: note = Description of Artificial Sequence: Synthetic coding sequence
  source 1..6240: mol_type = other DNA
atggccgccgaggagggcgtggccagcgccgccagcgccggcggcagctggggtaccgccgccatgggacgagtgctgccaatgctgctggtgcccgtacccgccgaggctatgggccaactgggctctcgggctcagctgcggacgcaacctgaggccttaggctcgttaacagccgcgggatcgctccaggtgttgtcactcacacctggctccaggggcggcggccggtgttgtctggagggtcctttctggcattttctgtgggaggatagtcggaactcatcgacgccgactgagaaaccaaaacttttagcactcggtgaaaactatgaattgctgatttacgaattcaacctcaaggatggccgatgtgatgctacaatcctgtatagttgcagccgggaagctttacagaaactgatcgacgatcaggacatttcaatttcccttcttagtctgcggatcttaagttttcacaataacaccagtctgctgtttattaacaagtgcgtgatcctacacattatttttcctgagcgagatgcagcgatcagagtcctcaactgctttaccttacccttaccagcccaggcagtcgacatgatcatcgacactcagctctgcaggggaattctattcgtgctctcatctctcggttggatatacatcttcgacgtcgttgacggaacatatgttgcccacgtcgacctggctctgcataaagaagacatgtgtaatgagcaacagcaggagcctgccaaaatctcctcttttaccagcttaaaagtctctcaagatttagatgtggctgttatcgtgtcctctagcaacagcgcagttgctttaaaccttaacctctactttcgacagcaccctggtcatcttttgtgtgagaggatcctcgaagatttgccgattcaggggccaaagggggtggacgaagacgatccagttaattcagcatataacatgaagctcgccaagtttagtttccaaattgacagaagctggaaagcacagcttagctcgttaaacgagactatcaagaactctaaattggaggttagttgctgcgctccctggtttcaagatattctgcacttggagtctcccgagagcgggaaccacagcactagcgtgcaatcctgggcctttatcccccaggacattatgcacggacaatacaatgttctgcagaaagaccacgccaaaacatccgatccgggacgtagctggaaaattatgcacatctccgagcaggaagaaccgattgaactgaagtgcgtctcagtgactgggttcactgcccttttcacatgggaagtggagagaatgggttatacaatcaccctctgggacctggaaacccagggtatgcagtgcttcagcctaggcaccaagtgtatccccgtggacagcagcggagaccagcagctctgcttcgtgctgaccgagaatggcctgtcattaattctgtttgggcttacacaggaggaatttttgaatcggctcatgattcatggaagtgcttccacagtggacaccctatgccatctcaacgggtggggccgttgctccatccctattcatgcattagaagccggtatcgagaacagacagctggatacagtgaatttttttttgaagtctaaggagaatctcttcaaccccagctcaaagagctctgtcagtgatcagttcgaccatctcagctcccatctctacctccgcaacgtcgaagaactcattccagctctggatctgctctgttccgctatcagagaaagttattccgagccccagagtaaacactttagtgagcagttactcaacctaacgctctctttcctgaacaatcagatcaaagagctgtttatccacacagaggagttggacgagcatctgcaaaaaggggtaaacattctcacgagctatatcaacgagctaagaacgttcatgatcaaattcccttggaaactcaccgacgccatcgatgagtatgacgtgcacgaaaatgtgcccaaagttaaggagtctaacatttggaagaagctctcatttgaagaggtgattgcaagtgctatcttaaataataagattccagaggcccagacattttttaggatagactcacacagtgcacagaagctggaggaactgattggaattggtctcaatctggtgtttgataacctcaagaagaataatataaaagaggcaagtgagctgctcaaaaatatggggttcgacgtcaaaggccagctcctaaagatttgtttctacacgaccaacaaaaatatcagggacttcctcgtggagattctgaaggagaagaactacttttctgagaaggaaaagagaacaatagatttcgtgcaccaggtcgagaagctttatttggggcatttccaagagaacatgcagatccagagtttcccgcgctactggataaaggagcaggacttttttaaacataagtcagtgttagatagcttccttaaatacgactgtaaagatgaatttaataagcaggaccaccggattgtgcttaattgggcactgtggtgggaccagttaacgcaggagagcattctgctgccaagaatcagtccagaggaatacaagtcatactcacccgaggctctgtggagatacctgactgccaggcacgactggctgaacatcattctctggataggcgaattccagacacagcattcctatgcctctttgcagcagaataaatggccattactgacagttgacgtgattaaccagaataccagttgtaataactacatgaggaacgagatcttggacaagctggcccgaaatggagtgttcttggcatctgaactggaggattttgaatgtttcctgcttagattgtccagaatcggaggcgtgatccaggataccctccccgtacagaattataaaacaaaggagggctgggacttccacagccagttcattctgtactgtctcgagcactctttgcagcacttactgtacgtgtaccttgattgctataagctgtcccctgagaactgccccttcctagaaaagaaggaactgcacgaggcacacccatggttcgagttcctggttcagtgccggcaggttgcttctaatctgacagatccgaaactcattttccaggcttcgctcgcaaacgctcagattctgattcccacaaatcaggcgtccgtgtcctccatgttactagagggacacacattgctggccctggccaccaccatgtacagcccgggaggcgtctcacaggtggtgcagaacgaagagaacgaaaactgcttgaaaaaggtggacccccagctcctgaaaatggcattgacgccctatccgaaactgaagaccgcactcttcccacagtgcaccccgcctagcgtgctgccctccgacatcactatctatcatctcatccagtccctttctccatttgaccccagccgcctgtttgggtggcagtcagccaatacactggcgatcggggacgcttggagccatctccctcacttcagctcacctgatctcgtcaacaaatacgccatcgttgagcggcttaactttgcatattacttacataacggccgcccgtcttttgcctttgggacctttctggttcaagagttgatcaaatccaagacgcccaagcagctaatacagcaggttggcaatgaagcatacgtcattggactgagtagttttcacataccatcaattggggcagcatgtgtgtgcttcctcgaacttctgggtctcgactccctgaagctgcgggtggatatgaaagtcgccaatattatcttgtcctacaaatgtcgaaacgaagatgcgcagtactcttttatcagagagagtgtggccgagaaattgtctaaattagccgatggcgagaaaacaactacagaagaattgcttgtgttgctggaggagggtacctggaattcaatccagcagcaggaaatcaaacgcctgagctctgagagctcatcacaatgggcccttgtcgtgcagttttgccgcctgcacaatatgaagttgtctataagctatctacgggagtgtgccaaagctaacgactggctccagttcatcatccatagccagttacataactatcatcccgccgaggttaagtctttaattcagtacttcagtccggtgatccaggatcatctgagattggccttcgaaaatttgccttccgtccctactagtaaaatggactccgaccaggtttgcaacaaatgtcctcaggagctgcagggaagtaagcaggagatgacagacctatttgagattttgctacagtgttccgaggagcccgattcctggcactggttgctcgtggaagcggtgaaacagcaggctcccattttgtctgtgctagcctcctgcctccagggggccagtgcaatttcttgcctgtgtgtttggataatcacctctgtggaggataacgtggccaccgaggcaatggggcatattcaggattccaccgaagaccacacttggaatctcgaggatctgtctgtgatctggcgcactttgctcactcgacagaaatctaaaacgctcatcagggggtttcagctttttttcaaggatagcccactcctccttgtaatggaaatgtacgagctttgcatgtttttcaggaactataaagaggctgaagccaagttactggagttccagaaatccctcgaaaccctcaataccgccgctaccaaggtgcacccggtcatcccagctatgtggctcgaagaccaagtctgcttcctgctcaagcttatgctacagcaatgtaagacacagtacgagctcgggaaactcctgcagctgttcgtggaacgcgaacacctcttcagtgacggacctgatgtgaaaaagctgtgtatattatgccagatcctgaaagatacatctatcgcaataaaccacaccattattacttcttactccattgaaaatctgcagcatgagtgcagatccattctcgagcggcttcaaacagatggacaattcgccctggcccggcgggtggccgagttggccgaattgcccgtggacaaccttgtgataaaagaaatcacgcaagagatgcagacgctcaaacacatcgaacagtggagcctgaaacaggctcgcatagacttctggaaaaaatgccacgagaatttcaaaaagaactccatttcctccaaggccgcctcctcctttttctccacccaggcccatgtggcatgcgaacacccaacagggtggtcctccatggaggagaggcacctgctcttgacattggccggccactggctcgctcaggaagacgtggtgcccctcgataaacttgaagagttagagaagcaaatttggctctgtagaattacacagcacacacttggaagaaaccaggaggaaaccgaaccccgctttagtagacagattagcacttctggggagctttcctttgactctttggccagcgagttttccttctcgaagcttgctgccctgaacactagcaagtatctggaactcaatagtctgcctagtaaggagacctgtgaaaacaggttggactggaaagagcaggaaagtctgaattttcttattggccggctgcttgacgacggctgcgtgcacgaggcaagtcgagtctgtcggtattttcacttttacaacccggacgtggctctcgtgttacattgccgggcactcgcatcgggtgaggcttcgatggaggatctgcatcccgaaatccacgcccttctgcagtcggctgagctcctcgaggaggaggcccccgatatccctctaaggcgtgtgcattcgacatctagcctcgactctcagaaatttgtgactgtcccgagcagtaatgaagtggtgacaaacttggaggtcctcactagtaagtgtttgcacgggaaaaattactgccggcaggtcttgtgcctgtacgatctagctaaggaactggggtgcagctacacagacgttgctgcccaggatggcgaggctatgctgcggaagatcctcgcctcccagcagccagatcggtgtaagagggctcaagcctttattagtactcagggccttaaaccagataccgtcgctgagctcgtggccgaggaggtgaccagggagctcctgacctcctctcagggcaccggcgccttaccgccaggagattcccagccgctctag

SEQ ID NO: 206653 - DNA, 2001 bp, synthetic construct
  misc_feature 1..2001: note = Description of Artificial Sequence: Synthetic coding sequence
  source 1..2001: mol_type = other DNA
atggagcaggagccccagaacggcgagcccgccgagatcaagatcatccgagaagcatacaagaaagcgttcctttttgtgaacaaaggcctgaatacggacgaactcgggcaaaaggaagaggctaagaattattacaagcagggtatcggccatcttctgagaggtatcagcatcagttctaaagaatccgagcacaccggcccggggtgggagtcagcccggcaaatgcagcagaagatgaaggagactctgcaaaatgtaaggactagactggagattttagagaaggggctagcaaccagtctgcagaatgacttacaggaggtgcccaaactgtaccccgagttccctcccaaggacatgtgcgagaagttgcccgaacctcagtccttttctagcgctcctcagcacgcggaggtcaatggaaacaccagcacgccctccgctggtgctgtggctgcccctgcttctttatctttgcccagtcagtcatgccctgccgaggccccaccagcttacactcctcaggcagccgaaggccattacacagtatcatatggaaccgactccggtgaatttagctctgtaggcgaggaattctatcggaaccatagtcagcccccacctctagagacgctcggactggacgccgacgagctgatccttataccaaatggcgttcaaatcttctttgtgaacccggcgggagaggtgagcgctccctcctacccaggttatctcaggatcgtgagattcctggataatagtctggatacggtcctgaacagaccgccggggttccttcaggtttgcgactggctgtatccattagtgcccgataggagcccggtgttgaagtgtaccgctggagcttacatgttccctgacactatgctccaggctgccggctgttttgtcggcgtggtgctcagcagcgagcttcctgaggatgacagagaactgttcgaggatttgctgcgacagatgtccgacttgaggctgcaagccaattggaaccgcgccgaagaagaaaatgagtttcagataccaggaaggacccggcctagttctgaccagctgaaggaagccagtggtactgacgtaaagcagctggaccagggcaacaaagacgttcggcacaaaggtaagcgtggcaaacgcgctaaagatacgtcctcagaagaagttaacctttcacacatcgtgccatgcgagccagtcccagaggaaaagccaaaagaactcccagagtggtccgagaaggtggctcacaacatcctgagtggcgcctcttgggtatcgtggggactggtaaagggcgctgagataaccggcaaagcaatccaaaaaggtgcctcaaagctgcgtgaacggatccagcccgaagagaagcccgttgaggttagtccagcggtaaccaagggtctgtacatcgcgaagcaggccacaggaggagcagcaaaagttagccagttccttgtagacggtgtctgtaccgtggctaattgcgttggaaaagagctagctcctcatgtgaaaaaacatgggagtaagctggtgcccgagtctttgaaaaaggacaaggatggtaaaagccccctcgatggtgctatggtggttgccgcatcttctgtacagggcttctctactgtttggcagggactagaatgtgccgccaaatgcatcgtgaacaatgtcagtgcggagacagtgcaaaccgtgagatataagtatggatacaacgccggagaggctacccaccacgccgtagactccgccgttaatgtgggtgtgaccgcctacaacatcaacaatatcggtattaaggccatggtgaagaaaacagcaacacagacaggccatactttgctggaggattaccagatcgtagataactcccagagggagaatcaagagggcgctgccaacgtgaacgtgcgcggtgagaaagacgagcagactaaggaggtcaaggaagccaagaaaaaagacaaatag

SEQ ID NO: 206654 - DNA, 2001 bp, synthetic construct
  misc_feature 1..2001: note = Description of Artificial Sequence: Synthetic coding sequence
  source 1..2001: mol_type = other DNA
atggagcaggagccccagaacggcgagcccgccgagatcaagatcatccgagaggcgtataagaaagcgttcctgtttgtcaataaaggcttaaacacagacgagctgggccagaaggaggaggctaaaaactactataagcaggggattggccatctcctaagggggatcagtataagtagtaaggagagcgaacacactgggcctgggtgggaaagcgcaaggcagatgcagcaaaagatgaaggaaacgctgcagaacgtcagaaccagattggagattttagaaaaagggctagctactagcctgcagaacgatctgcaggaagtgcccaagttgtatcccgagtttccgccaaaagacatgtgcgaaaaactacctgagccccagagctttagcagcgcaccccaacacgccgaggtgaacggtaacacttctaccccgtccgcgggcgccgtcgcagctcctgcgagcctcagcctgccatcccagtcatgtccagctgaagccccccccgcttacactcctcaagcggccgagggacactacaccgtgagctatggcacagatagcggggaattctcaagcgtgggcgaagagttttacagaaatcactcccagcccccccctctggagaccctcggactggacgccgatgaactgatcctgatcccgaatggcgtgcagattttcttcgtcaacccagccggagaggtgagcgcacccagttatccggggtacctccggatagtacggtttctcgacaactctctcgataccgtgctgaatagaccaccaggcttccttcaggtgtgtgactggctgtaccctttggtccccgacaggtcccctgtgctgaagtgtacggcaggggcatacatgttccccgataccatgctgcaagctgccggttgttttgttggtgtggtgctgtcctcagagcttccggaggatgaccgcgaactgtttgaggatctactgcgacagatgtcagatctccgccttcaagcaaattggaacagggctgaggaggagaacgagttccagatccccggtcgcacaagacctagctcggatcagctgaaggaggccagcggaacagatgtaaaacagctggatcaggggaacaaggacgtccgccacaaggggaaaaggggcaagcgggcaaaggacacgagctccgaggaggtgaacctgtcccatatcgtcccatgtgagcccgttcccgaagaaaaaccaaaagagctccctgaatggtcagagaaggtggctcacaatatcctctccggcgcatcttgggtcagctgggggcttgtgaagggcgcagagattaccggtaaagctattcagaagggcgcctcgaagctgagagagaggattcagcctgaggagaagccggtggaggtctctccagcagtgacaaagggcctgtacattgccaaacaggctaccggtggtgctgcaaaagtatcccaatttttagtggacggcgtgtgcaccgtggctaactgtgtagggaaagagctcgctcctcacgttaaaaaacacggatctaagctcgttcctgaaagtctaaagaaggacaaagacggtaagtcccctctggacggggctatggtggtggcggcctccagtgttcaaggattttctaccgtgtggcaggggctcgaatgcgccgctaaatgtatcgtcaacaacgtctcggctgaaactgtccagactgttcggtataaatatggatataatgcaggcgaggccactcaccatgcagtcgactcagccgtgaatgtcggggtcactgcatacaatatcaacaacatcgggatcaaggccatggtcaaaaaaactgcaactcagactgggcatacactgcttgaggattatcagatcgtggataacagccagagggagaaccaagagggggcagctaatgtgaacgtgagaggtgaaaaagatgagcagactaaggaggtcaaagaggccaaaaagaaagacaagtag

SEQ ID NO: 206655 - DNA, 2001 bp, synthetic construct
  misc_feature 1..2001: note = Description of Artificial Sequence: Synthetic coding sequence
  source 1..2001: mol_type = other DNA
atggagcaggagccccagaacggcgagcccgccgagatcaagatcatccgtgaggcatataagaaggcattcctctttgttaataagggtctgaatactgatgagctgggccagaaggaagaggctaaaaattactacaaacaggggattggccacctgctccgcggaatttctatatccagcaaggagtctgagcatacaggccctggttgggaaagcgccaggcagatgcaacaaaagatgaaagagacgctccaaaacgtgcggacccggctggaaattctcgaaaagggtctcgcaacctctttgcagaacgacctgcaggaggtgccgaagctgtatcccgagtttccacccaaggatatgtgcgagaaattaccagagccccaatctttctcctctgcacctcagcatgccgaggttaacggaaacactagcaccccttctgctggagcagttgcggcacccgcaagcctatctctgccttctcagtcgtgccctgccgaagcgcctcctgcgtatacccctcaggctgccgaaggtcattacaccgtgagttatggaaccgacagcggcgaattttcaagcgtgggcgaagaattttatcgtaatcactcccagccacctcccttggagaccttagggctagatgctgacgagttgatcctcattccaaacggagtgcagatcttttttgtcaaccccgctggggaggtgagcgctccctcctaccctggatatttaaggattgtccgattcttggataactcgctggataccgtcctcaataggccgcccggctttctacaggtctgtgactggctgtacccactggtaccggatcggagcccagttttgaaatgcacagccggtgcctatatgttccctgatacgatgctacaggccgcgggatgcttcgtgggtgtggtgctctcatcagagctcccagaggatgatcgagagctgtttgaggacctgctccgccagatgtcagacctaaggctacaggccaattggaacagagccgaggaagaaaatgagttccaaatccccggtagaacgaggccctcctctgatcagttgaaagaggcctctggtacggacgtgaagcagttagatcagggcaataaggacgtgcgacacaaaggcaagaggggcaaacgagccaaagacacctcatctgaggaggttaacttgtctcatatcgtgccttgcgaacccgttccagaagaaaaacccaaggaactaccagaatggagcgagaaagtggcacacaacatcctgtcaggagcaagctgggtcagttggggtttggtcaagggagccgagattacaggaaaggccatacagaagggcgctagcaaactgagggagaggatccagcccgaggaaaagcctgtagaggtgtcacccgcagtcaccaaaggcctgtacatcgctaaacaggccaccggaggagccgctaaggtgagtcagtttttagtggatggagtttgtacagtcgccaactgcgttggcaaggagttggcaccacacgttaagaaacatggttctaaactggtacccgagtctctaaaaaaagataaagacgggaagagccccctggacggcgctatggtcgtcgctgcttcttcagtgcagggtttctccacagtttggcagggcctggaatgtgccgccaaatgcattgtgaacaacgtgtccgctgagacagttcagacagttcgatacaaatacggctacaatgccggcgaagcaacccatcatgccgtagactctgcagtaaacgttggagtaacagcttataatatcaacaatattgggattaaggcaatggtcaaaaaaacagcaacacaaactgggcatacgctgttggaagattaccagatcgttgataactcccagcgagagaaccaggagggggctgctaatgtgaatgtacgaggggagaaggacgagcagacaaaagaagtgaaagaggctaagaagaaagataagtag

SEQ ID NO: 206656 - DNA, 2001 bp, synthetic construct
  misc_feature 1..2001: note = Description of Artificial Sequence: Synthetic coding sequence
  source 1..2001: mol_type = other DNA
atggagcaggagccccagaacggcgagcccgccgagatcaagatcatccgggaggcatacaagaaggcgtttctcttcgtcaataaggggctcaatactgatgagctggggcagaaagaagaggccaagaactattacaagcagggcatagggcacctgctgaggggtattagcatctccagcaaggagagcgaacatactggacctggctgggagtctgcccgtcagatgcagcagaagatgaaggagacccttcagaatgttcgcacccgtctcgaaattctcgagaagggcctcgctacgtctttacagaacgatttgcaggaggtcccgaagctttacccggagttccccccgaaggacatgtgtgaaaaactgcctgaaccgcaaagcttcagctcagctccccagcacgccgaagtgaatggtaacacatcgaccccaagtgctggcgcggttgctgcccccgcctccttatccctgccaagccagagctgtccggcggaggcccccccggcctatacaccccaggctgccgagggccactataccgtttcctatggaaccgactcaggggagtttagctcagttggagaggagttttatagaaaccactcccagcctccgcctctcgaaactttaggccttgacgcagacgaactaatactaatcccgaatggggtgcagatctttttcgttaatccagctggggaggtgagcgctcctagttatcccggttaccttagaatagtgaggttccttgataactccctcgacacggtgctcaaccgccctcccggcttcctgcaggtgtgcgactggttataccccctcgtccctgaccggtccccagttctgaaatgcacggcaggcgcctacatgttccctgatactatgctacaggcagcaggctgcttcgtaggagtcgttttaagttccgagttgcctgaagacgatagagagttgtttgaagacctgcttcggcagatgagcgatctgaggttacaagccaactggaatagagctgaggaagagaacgagttccagatcccaggccggacgaggccatcaagcgatcagcttaaggaagcaagcgggactgatgtgaagcaattagatcaagggaacaaggatgtgcgtcacaaaggaaagcgggggaagagagctaaggacacgagctctgaggaggtcaacctgagccacattgttccgtgcgagcccgtgccggaggagaaacctaaggaacttcccgagtggtccgagaaggtggcacataatatcctgtccggggcttcatgggttagctggggcctggttaagggggctgagatcacgggaaaagctatccaaaaaggcgcctccaagttgagagaacgcatccagccggaggagaagcctgtagaggtgtcacctgccgttacaaagggactgtacattgccaagcaagccacaggcggagccgctaaagttagccagttcctagtcgacggagtgtgtacggtcgccaactgtgttggcaaggaactcgcaccacacgtcaagaaacacggcagtaaactcgtccctgaaagcttgaaaaaagacaaggatgggaagagcccactggatggcgcaatggttgtggccgcgtcatcagttcagggtttctccaccgtatggcagggattggagtgtgccgccaagtgcatagtcaataacgtttccgccgaaactgtgcagacagtcagatacaagtacggctataacgcaggagaagccacccatcacgccgtcgattcagccgtaaatgtcggtgttactgcctataatattaataacatcggtatcaaagccatggtgaaaaagacagccacacagactggccacacattactggaggactaccagatcgtggacaacagccagcgggaaaatcaagagggcgcagcaaacgtcaatgtcaggggtgaaaaggacgagcagaccaaagaggtgaaagaggcaaagaagaaggacaaatag

SEQ ID NO: 206657 - DNA, 846 bp, synthetic construct
  misc_feature 1..846: note = Description of Artificial Sequence: Synthetic coding sequence
  source 1..846: mol_type = other DNA
atgggcgagatcaaggtgagccccgactacaactggttccggggcactgtgccccttaaaaagataatagttgacgatgatgactctaaaatctggtccctatatgacgccgggcccaggagcatcaggtgcccacttatttttctgccccccgtctctggtaccgctgacgtgtttttcaggcagatcttagcactcacaggctggggataccgcgtgattgcagtccatctgtttggagcctctttgggcggattcctggctcagaagttcgctgagtacacccacaagtctccgagagtgcactcgctgatattatgtaacagtttctcagacacctccatatttaaccagacgtggaccgctaacagcttttggctcatgcctgcattcatgttgaagaagatagtgctaggaaactttagcagtggtccagtcgaccccatgatggctgacgctattgactttatggtggataggttggagtctcttggccagtccgaactcgcttctaggctgactctgaactgtcagaatagctatgttgagccccacaagatcagggatataccagtgactatcatggacgtcttcgaccagtcagccctgtctactgaggccaaggaggaaatgtataaactctacccaaacgcacgcagagcccacttgaagacgggagggaattttccctatctgtgtcggagcgccgaggtgaacctgtatgtccagattcatctgctgcagtttcacggcacaaagtatgcagctatagatcccagcatggtatccgccgaggagctggaggtccagaaagggagtctgggcatatcccaggaggaacagtag

SEQ ID NO: 206658 - DNA, 927 bp, synthetic construct
  misc_feature 1..927: note = Description of Artificial Sequence: Synthetic coding sequence
  source 1..927: mol_type = other DNA
atgggcgagatcaaggtgagccccgactacaactggttccggggcaccgtgccgcttaagaagatcattgtcgacgatgacgactctaagatctggagcctgtatgatgccggcccaagaagcattagatgccctctgatctttctgcctccagtgtccggtactgccgacgtgttctttcggcagatcctggcgctaacagggtggggataccgtgtaatcgctttgcaataccccgtgtactgggatcatctggaattttgcgatggctttcgaaaactactggaccacttacagctcgataaagttcacctctttggggcctccctgggaggctttctggcgcaaaagtttgcagaatacacccacaagagcccaagagtgcacagcctgatactgtgcaatagtttctcagatacatcaattttcaaccaaacatggactgcgaattctttctggttgatgccagcattcatgttaaagaagatagtgctgggtaattttagttctggtcccgtggaccctatgatggcggatgctatcgacttcatggtcgatcggctggaatcactgggccagtctgagctcgctagccggctcacgctaaactgccagaactcttacgtcgaaccccacaaaattcgggacataccggtgaccattatggacgtatttgatcagagcgccctgagcacagaagctaaggaggaaatgtacaaactttaccccaatgcgcggcgtgcacacttgaagactggaggcaattttccttacctgtgcagatccgccgaagtgaatctttacgtgcagatccatctgttacaattccatggcaccaagtacgcagccattgacccttcaatggtgtcagcagaagaacttgaagtgcagaaaggcagcctgggcatcagccaggaagaacagtag

SEQ ID NO: 206659 - DNA, 927 bp, synthetic construct
  misc_feature 1..927: note = Description of Artificial Sequence: Synthetic coding sequence
  source 1..927: mol_type = other DNA
atgggcgagatcaaggtgagccccgactacaactggttccggggcaccgtgcccttgaaaaaaattatagttgacgatgacgatagtaagatctggtcgctttacgatgccggtccccgaagcatccgatgcccacttatctttctgcccccagtcagtgggacggccgatgtcttctttcgacagatccttgctctcaccgggtggggataccgcgttatagccctgcagtaccccgtgtactgggatcatctcgagttctgtgatggttttcgtaagttgctagaccacctgcagttggacaaagtgcacctttttggcgcctctctgggggggttccttgcccagaagtttgcggagtacacccataaaagtccccgagtgcacagcttaatcttatgcaatagctttagtgatacctcgatctttaaccagacttggaccgcgaactccttctggctgatgccggctttcatgctgaagaaaatcgttctcggcaactttagctcgggccccgtggatcccatgatggcagacgccattgactttatggtggaccgactggagtccttgggacagtcggagctggcctcaaggctaacactgaactgtcaaaactcatacgtggaacctcataaaatccgggatatcccagtcacaataatggacgtgttcgaccaaagcgctctgagcacagaggcgaaggaagaaatgtacaagttgtatccgaacgcccgaagggcccacttaaaaaccgggggcaacttcccctatctgtgccgatctgcagaggtgaacctgtatgttcagatccacttactgcagtttcacggaaccaaatacgctgcgattgatccaagcatggtgtccgcagaggaattagaggttcaaaagggatctctgggtatctctcaggaggagcagtag

SEQ ID NO: 206660 - DNA, 2388 bp, synthetic construct
  misc_feature 1..2388: note = Description of Artificial Sequence: Synthetic coding sequence
  source 1..2388: mol_type = other DNA
atggccgtgctgctgctgctgctgcgggccctgcggcggggccccggacccggcccccgacccctgtggggaccaggccccgcgtggagtcctgggtttccagcccggcccgggcgggggaggccctacatggcgagccggccgcccggtgacctggccgaggccggcggccgggcactccaaagtctgcagctcaggctgttaaccccaacatttgagggcattaacggcctcttattaaagcagcatttggtccagaaccccgtgagactatggcagttactgggtggcaccttctacttcaataccagccgactgaaacaaaagaataaagagaaggataaatccaaaggaaaagccccagaagaagatgaagaggagagacggcgacgagaacgagatgaccagatgtaccgtgaacggctgaggaccctccttgtcatagccgtcgtcatgagcctcttgaacgcactgagcaccagcgggggatccatttcctggaatgattttgtacatgagatgttagcgaagggcgaggtgcagcgagtgcaggtggtgcctgaatctgacgtggtggaggtctatctgcatccgggcgccgtggtgtttggacggccccgcttggccctgatgtatcgcatgcaggttgcaaatatagataagtttgaggagaaattgcgggcagcggaagacgagcttaacattgaagccaaggatcgaattcccgttagctataagaggacaggcttcttcgggaatgcgctttactctgtcgggatgacagctgtgggcttagctatcttatggtacgtcttccgactggccggtatgacgggacgcgagggtggattctctgcttttaaccagctgaagatggctagattcacgatcgtggacggtaaaatgggaaagggagttagctttaaagatgtggcaggaatgcatgaggccaagctggaggtgagggaatttgtcgattatctaaagtcaccagaacgctttttgcagctcggggccaaagtcccaaagggtgctctacttctagggccgcctgggtgcggtaagaccctgctcgcaaaggcggtggcaactgaggcccaggttcccttcctggctatggctggccccgagttcgttgaggtcataggtggcttaggcgccgccagagtcagaagcctgttcaaggaagcacgggctcgcgccccgtgtatcgtttatatcgatgagattgacgccgtcggcaagaaaagatccacaaccatgtcaggcttctccaatacagaagaagaacaaactcttaaccagcttctcgtggagatggacggtatgggcacaacagatcacgtaatcgttctcgcaagcacaaatagagccgatattttagacggtgcattgatgaggcctgggcggctagataggcacgttttcattgacctcccgacccttcaggagcgtcgcgagattttcgagcaacacctcaaatctttgaagctgactcaaagctcaaccttttacagccagaggctggctgagttaactcccggcttttcaggcgctgatatcgccaacatatgcaacgaggccgcactacacgccgcgcgcgaagggcatacatcggtgcacactctgaattttgagtacgctgtggaacgcgttctggccgggactgccaaaaaaagcaagatcctgagtaaagaagaacagaaagtggttgccttccatgagagcggccacgctctggttggctggatgctggaacacacagaagctgtcatgaaagtttctatcacccctcgcacaaatgctgctcttggtttcgcacagatgctccctcgtgaccagcatctctttacaaaagaacagctatttgagcgcatgtgcatggcccttggggggcgggctagcgaggcgttgtcttttaatgaggtgacctctggtgcccaagatgacctccgtaaggtgacgagaatcgcgtactccatggtgaaacagtttggaatggctcctggaatcggcccaattagttttcccgaggctcaggaaggacttatgggaattgggcgtcgcccctttagccagggacttcagcagatgatggaccacgaagcgcgtctccttgtggcaaaggcctatcgtcatacggagaaagtgctgcaagataacctggacaagctgcaagctctcgccaatgccctattagagaaggaagtaatcaattacgaagacatagaagccctgatcggccctccgcctcatgggccaaaaaaaatgatcgccccccagcgttggattgacgctcagcgagagaagcaagatcttggagaggaagagactgaagagacccagcaaccaccattagggggcgaggagcctacttggcccaaatag

SEQ ID NO: 206661 - DNA, 672 bp, synthetic construct
  misc_feature 1..672: note = Description of Artificial Sequence: Synthetic coding sequence
  source 1..672: mol_type = other DNA
atgcggctgcggtgcacccggcggggccgggacaccctgccctgcacactcagcactagcagcacaccttggagcgccagctcccaggttccacgagctcaactgggaaaggctgtaggctcatgccgcggcgtggggtcctgttgcgctagacactgcaaaacacacctcgcttctttaaggcagccgtgtggggagagaaccggagccgcttgcgtgctcttgatctattttagggtgacaatttatttctacgtcgagatcgagaagttactcatcatcgtcgccaaacaggagggcttaagcggcaatcataagcccgtggagaggaaatacatgacatacctgtcagcccaagatcatgagttgatccaagtggtgcagaatggccacctgcagatgtgcggcaagtcagaaacgggcaatgaagccagtcccgggttgccgaaaagggctaggtcgtgccctcggaaaaaccgtaagtggcttaggttcatgtcgcgggcaactccttggtgggcaggctgttggtctacccgccgggatgagggactccataacccatcaacaaatgccgcgttgggctttgcacaagcaccacagaggccagccccactccatgaacaactatttgaacgcatgtgtatggctctgggcggccgggcgtcgtag

SEQ ID NO: 206662 - DNA, 618 bp, synthetic construct
  misc_feature 1..618: note = Description of Artificial Sequence: Synthetic coding sequence
  source 1..618: mol_type = other DNA
ctgggcccccaggcctgcaccgtggtgccccggagcaagtgcttcgatctcgagatggtaagctctcgctgggagccactgctgctgctgacggaagtcacaagcgcaaacgaagtgtgggtgacctccaattcaaccgcactcgtgtttgtttcagacaacgtgcgggaggaattagaagaggtgcaggatctgctctgccgcaccctccctttgcccgtgcagctcagtttccctgaggaagctctggacgtggcaagggtggctcacgtgttcgtctcgccattttgctttagcgctggcagcgaagaacggcgtagacgggagagggatgaccaaatgtatcgagagcgcttacgcacgctactggtcatagctgtcgtgatgagtctgctgaatgccctgagcactagcggcggctcgatctcctggaatgacttcgtccacgagatgctggcaaaaggggaggtccagagggtacaggttgtacccgaaagcgatgtcgtggaagtgtaccttcacccaggtgccgttgtgtttggaagacctcgcctggccctgatgtatcgaatgcaagtagccaacatcgataaattcgaggagaagctcagagcttag

SEQ ID NO: 206663 - DNA, 1470 bp, synthetic construct
  misc_feature 1..1470: note = Description of Artificial Sequence: Synthetic coding sequence
  source 1..1470: mol_type = other DNA
atggccgtgctgctgctgctgctgcgggccctgcggcggggccccggacctgggccgcgacccttatggggtccgggaccggcgtggtctcccggttttcccgcaaggcccggtcgcggacggccgtacatggccagtaggccccccggcgacctggcggaggccggcggacgcgccttacagagccttcaactgcggttgctgaccccgacttttgaaggcatcaatgggctgctgctgaagcagcatttggtgcagaacccggtccgcctttggcaattgctgggcggcaccttctactttaacacctccagactgaagcagaagaataaggaaaaagacaagagcaagggtaaagcacctgaggaggacgaagaagagcggcgccgaagggaaagggacgatcagatgtatagagagcgcctacggaccttactcgttatagctgtagttatgtctctgctgaacgcattaagcactagcggcgggagcatttcctggaatgacttcgttcatgagatgcttgctaagggagaagtccagcgcgtccaagtggtgcccgagtctgacgtcgttgaagtatatttacacccaggagctgtggtatttggcagacccaggttagccctgatgtacaggatgcaggtggcaaatattgataagtttgaggagaaactcagggccgccgaggatgaactgaatatagaagccaaggataggatccctgtgtcttataaacgaactgggttttttgggaacgccctgtactccgttggtatgaccgcagtagggctggccatcctgtggtatgtttttcggttggcgggcatgactggaagagagggtggttttagcgcattcaaccagctcaaaatggcaaggtttactattgtggacggcaagatgggcaaaggggtctcattcaaagatgtggctggaatgcatgaggctaaattggaggtgagggagttcgttgattatttaaagtctccggagaggtttttgcaactgggcgctaaggtgcctaaaggggcactgctcttgggcccgcctggttgcggaaagaccctgctagccaaagctgtggccaccgaggctcaggttcccttcttggccatggccgggcctgaatttgtcgaggtgattggtggcctgggagcagccagagttcgttcgctgttcaaagaggcccgcgctagagctccgtgtatcgtgtacatcgacgaaatagatgcagtgggtaaaaagaggagcaccacaatgtccggtttctccaatacagaggaagaacagacactgaatcagctgctggtggaaatggacggtgctagcctggatcagctgccttctcagggaactatgagaaaactccggggcaaaactccggcgtgcagttgtttaaccgaacctaccgggtcgaggagggcgatggaggggcactcactctgctggggctgcctgcttcactag

SEQ ID NO: 206664 - DNA, 1851 bp, synthetic construct
  misc_feature 1..1851: note = Description of Artificial Sequence: Synthetic coding sequence
  source 1..1851: mol_type = other DNA
atgaacagccccggcggccggggcaagaagaagggcagcggcggcgcctcaaatcctgtgccacctcgaccgcctccaccatgtctggctcctgcaccgcccgctgcagggcctgcccctcccccggaaagcccacataaacgtaacctgtactactttagttatcccctgttcgtgggtttcgcccttcttcggctggtggctttccacctgggtctgctgttcgtatggctatgccagcgctttagtagagcactgatggccgccaagcggtcttccggagccgctcctgccccggcgtccgctagcgctcctgcaccagttcctgggggagaagctgaaagagtgagggtatttcacaagcaggcttttgagtacatctcaattgctctgcgtattgacgaagacgaaaaagccggtcagaaagagcaggctgtcgagtggtacaagaagggcattgaggaactggagaaggggatagccgtgatagttaccggccagggggaacaatgtgaacgagctcgcaggctgcaggccaagatgatgacgaatctggttatggcaaaggacagactccagcttcttgaaaaaatgcagcccgtcctgccattcagtaagagccagacagacgtatataacgacagcaccaatctggcctgcaggaatggacatctgcagtctgaatcaggcgcagttccaaaacggaaggatccactgacccatacaagcaactctctccctcgttcgaagactgtgatgaagactgggtctgctggcctgtctggacatcacagggctccgtcatacagtgggttgtctatggtgagcggagttaagcagggaagcggtccagcacccaccactcataagggcacacccaagactaatagaacaaacaaacctagcacccccacaaccgctacccgcaaaaaaaaagatctgaagaatttccgaaacgtggactcaaatctggccaatctaattatgaatgagatcgtagataatggcactgcagtgaagtttgacgatattgccggccaggacttggccaagcaggcactgcaggaaatcgtcatcctgccgtccctgcggccggaattgttcactggtctccgggcccccgcacgcggcctgctgctatttggtccaccgggcaatggcaagaccatgctcgccaaggcagtggccgcagaaagtaatgccaccttcttcaacatttccgctgctagcctcacatcaaagtacgttggcgagggggaaaaattggtgcgtgctctgttcgctgttgcaagagagctgcagccttcaattatctttattgatgaagtcgattcactgctgtgtgaaaggcgcgagggcgagcacgatgcttcccgacggctaaagaccgagtttctgatcgaatttgatggtgttcagtccgcaggcgatgacagagtactcgttatgggcgcaacaaatcgaccacaagagctcgacgaagcagtgctaaggaggtttatcaagcgcgtctatgtgtccctcccgaacgaggagactcgcctgctgctcctcaagaatttgctgtgcaagcaggggagtcccctgactcagaaggaactggcccagctggccaggatgaccgacggctatagtggatccgacctgactgccttggcgaaggatgccgcgttgggtcccatccgggaattgaagcctgaacaggtgaaaaatatgagtgccagcgaaatgcggaacatcagactgtccgactttaccgagtcattaaagaaaatcaaaagatcagtctcccctcagaccctggaagcttacatccggtggaataaggacttcggtgacacaacggtgtag

SEQ ID NO: 206665 - DNA, 1755 bp, synthetic construct
  misc_feature 1..1755: note = Description of Artificial Sequence: Synthetic coding sequence
  source 1..1755: mol_type = other DNA
atgaacagccccggcggccggggcaagaagaagggcagcggcggcgccagcaatcctgtgccaccacggcctccccccccctgtttagccccagccccgcctgctgccggccctgcacccccgccagagtctccccacaagaggaatctgtattatttttcataccctctgttcgtcggttttgccctattgcgactggtagcttttcacctgggcctgttgtttgtgtggctttgccaacggttctcccgggccctgatggctgccaagcgcagttctggggcggcgcccgccccagcctccgcaagcgcacccgcaccagtgccgggcggggaagctgagcgagtgagagtgtttcataagcaggcctttgagtacatcagtatcgctctgcgcattgacgaggatgaaaaggctggacagaaggagcaggcggtggagtggtacaaaaaaggcattgaggagctcgaaaagggcattgcagtgatcgtaaccgggcagggtgagcagtgtgaaagagccaggaggcttcaggccaagatgatgaccaatctggtgatggctaaggataggctgcagctcctagagtccggcgcggtgcctaaaagaaaagaccccttaacgcatacaagcaatagcttaccacgttcaaagacggttatgaagactggatcagctgggctctcaggccaccatagggcccccagctactctggtttgtctatggtgagcggggtcaaacagggttctggccccgctccaacaacacacaagggaactcccaaaacaaatcgaaccaacaaacccagtactcccactacagccacgagaaagaaaaaagatttgaagaacttccgaaatgtggattccaacttagccaacttgatcatgaatgaaattgtggataacggcactgcggtgaaatttgacgatatagcaggtcaggatctggcgaagcaggcactacaggagatagttattctgccgtctctacggccggaattattcaccggcttgcgggctccggcgcgcggcctgttactgttcggcccccccggaaatggtaaaaccatgctggccaaggctgtggccgcagagtccaacgccaccttcttcaacattagcgcagccagtctaacctcgaagtacgtgggagagggggagaagttagtgagagcactgtttgcggttgcacgtgaactccagccatccattatctttatcgatgaggtagatagcctgctctgtgaaagacgcgaaggcgagcacgatgcatctcgacggctgaagaccgagtttctgatcgaattcgacggggttcaaagtgcaggcgacgacagagtacttgtgatgggagcgactaatcgcccacaagagctggatgaggccgtgctgcggcgattcattaagagagtatacgtgtctctgcctaacgaagagactcgcctgcttttgctgaaaaacctgctttgcaaacaagggtcccccttaacccagaaggaacttgcacaactggcccggatgaccgacggatactccggctccgatttaactgccctcgcaaaggacgccgccctgggaccgatacgcgagctgaaacccgaacaggttaaaaatatgtctgcttccgaaatgcgaaacatcaggctgtctgatttcactgagtctcttaaaaaaattaaacgtagtgtgtcccctcagaccttagaggcttatatccggtggaataaagattttggcgacaccacagtgtag

SEQ ID NO: 206666 - DNA, 26394 bp, synthetic construct
  misc_feature 1..26394: note = Description of Artificial Sequence: Synthetic coding sequence
  source 1..26394: mol_type = other DNA
atggccaccagccggggcgccagccggtgcccccgggacatcgccaatgtaatgcagcgtctccaggacgaacaggaaatagtccaaaaaaggaccttcacgaagtggatcaattcccatctggccaagcggaaaccccccatggtggtcgacgacttattcgaagacatgaaagatggcgtcaagctccttgctttactggaggtcctgtccggccagaaacttccatgtgagcagggacgaagaatgaagagaatccatgccgtggccaacatcggaaccgccctgaaattcctggagggacgaaaaataaaactggtaaatatcaattccacagacattgctgatggcaggcctagcatcgttctaggcctcatgtggacaattattctctacttccaaatagaggagttaacctctaacctgccacagttacaatctctgtcctcatccgcatccagcgtcgatagcatagtgagctcagaaaccccttctccacctagtaaaaggaaggttacaacaaagatacagggcaacgccaaaaaagctctcctcaagtgggtccagtacacagcaggcaaacagaccggtatagaggtaaaggactttggtaagtcatggcggtcgggggtagcctttcactccgtgattcacgccattcgtccagagcttgtagatctggagacagtgaaggggaggtccaacagagagaacctagaagacgccttcacaatcgcggaaaccgaactcgggatccccagactgttggatcctgaggatgttgacgtcgataagcctgatgagaaatctattatgacctatgtcgctcagtttctcaagcactatccagacattcataacgcctcgaccgacggccaggaagacgacgagatattgccgggattccctagctttgctaacagcgtccaaaatttcaaaagagaagatcgggttattttcaaggagatgaaggtgtggattgaacagttcgaacgggatctcacacgcgcacagatggtggagtcaaacttgcaagacaagtaccagtcctttaagcacttccgcgtgcaatatgagatgaagagaaaacagatagagcacctgatccagccacttcatagggacggtaagctgtctttagaccaggcgctcgtgaaacagtcatgggaccgcgtaacctctcggttattcgattggcatattcaacttgataaatcactgcccgcaccattagggaccatcggggcctggctgtacagggcggaggtggctctgcgcgaggagattacggtacagcaagtccacgaggaaaccgctaacaccatccagagaaaattagaacaacacaaggatctgctgcaaaataccgacgcgcacaagcgcgcatttcacgagatttataggacgaggagtgtgaatgggatccctgtgccacctgaccagttagaggatatggccgagcgcttccacttcgttagttccacaagcgaattacatctgatgaagatggagttcctggagctgaagtaccggctgttgagcctcctcgtgctcgccgagagtaaattgaaatcgtggattataaagtatgggcgcagggagagtgtggaacaactgttacaaaactacgtgagcttcatcgaaaattcaaagtttttcgagcagtatgaagtcacataccaaatcctgaagcagactgccgaaatgtatgtgaaagctgacggctctgtcgaagaggctgagaatgtgatgaaattcatgaatgaaactacagcccagtggcgaaatctctcagtggaggtgagatctgtaagaagtatgttggaagaagtgattagcaactgggataggtacgggaataccgtcgctagtctccaggcctggctcgaggatgctgagaagatgctgaatcagtcggaaaatgctaagaaggatttctttagaaacctgccccactggatccagcaacatacagccatgaacgatgcgggcaattttcttatcgagacgtgcgacgagatggtgtcgcgggatctgaaacagcaactgctcctgctaaacggccggtggagggaactgttcatggaggtcaagcaatacgcgcaggctgatgagatggaccggatgaaaaaggagtacacagattgtgtggtgaccctgagcgcatttgcaaccgaggctcacaaaaaactttccgagcctctggaggtgagcttcatgaacgtaaaactgttaattcaggacctcgaagacattgaacagcgcgtgcctgtgatggatgcccaatataagatcatcaccaagacagctcacctgatcactaaggagtcacctcaggaggaaggcaaagaaatgttcgccaccatgtctaagttgaaggagcagcttaccaaggtgaaggagtgctactcccccctgctgtatgaatcccaacagctgctcatccctctcgaggagctggagaaacagatgacttcattctacgactctctggggaagattaatgaaattataaccgtgttagagagagaggcccagagcagtgcgctgttcaagcagaagcatcaggaacttcttgcctgccaggagaattgcaagaagacacttacgctaatagagaagggtagccagagcgtacagaagttcgtgaccttgagtaacgttctcaagcactttgaccaaactcggctgcagagacagatagccgatattcatgtggctttccagtccatggttaagaagacgggggattggaagaagcatgtggagacgaatagtcgtctgatgaagaagttcgaagaatcgcgcgccgagttagagaaagtcctgcggattgcacaagagggactggaggaaaaaggggaccctgaagagctgctgaggcggcataccgagtttttctctcaactcgatcaacgagtgcttaatgcattcctgaaggcctgcgacgaactcactgatatactcccggagcaagaacagcaggggcttcaggaagctgtgcgaaagcttcacaaacagtggaaggacctgcagggggaggcaccataccacctgctgcacttaaaaattgatgtggagaagaaccgtttcctggcatccgtagaagaatgccggacagagctggatcgtgagacaaaacttatgccgcaagaaggcagtgagaaaataattaaggaacaccgcgttttcttttctgacaagggacctcaccacctgtgtgaaaaacggctgcaacttattgaagagttatgtgtgaagctacctgtccgcgatcccgtgcgggacactccaggtacgtgtcatgtaacactcaaagagctgcgcgctgccattgatagcacttatcgtaaacttatggaggaccctgacaagtggaaggattatacctcacgtttttccgagttttctagctggatatcaaccaacgagacccagcttaagggtatcaaaggtgaggccatcgatacggcaaatcatggcgaagtgaagagagccgtagaggaaatccgaaacggagtcacaaagcgcggcgagaccctgtcttggctgaaatctcggttgaaggtgctcacggaagtgtcatccgagaatgaagcccagaagcaaggagacgagctggctaagttgagctcctctttcaaggctctagtgactttgctgtcagaggtggaaaagatgttgagtaactttggggattgcgtacagtacaaggaaatcgtcaaaaattctctggaggaactgatttctggctctaaggaagtccaagagcaagcggaaaaaatcctcgataccgagaatttattcgaagcccagcagctactcttgcatcaccagcaaaaaacaaaaagaattagcgccaagaagcgagacgtgcagcaacagatagcgcaagctcagcaaggggaaggaggcttacccgaccgggggcatgaagagctgcgaaagctggagtccactttggacgggttggaacggtcacgcgagcggcaggaaaggcgcattcaggtgactctgcggaagtgggagagatttgagacgaacaaagaaaccgtggtgcgatatctgtttcaaactggctcctcgcacgagaggttcctgtccttttcatctctggagtctctgtcctcagaactggaacaaactaaagaattcagcaagcgtactgaatctattgctgtgcaggcagagaatctcgtgaaggaagcaagcgagatcccccttggaccccaaaacaagcagctgctccagcagcaagctaaatcaattaaagagcaggttaagaaattggaagacaccctggaggaggatatcaagaccatggagatggtgaagacaaagtgggatcatttcggttccaattttgagacacttagcgtgtggatcacagaaaaagaaaaggaacttaatgcgcttgaaacatcatcgagcgcaatggatatgcaaatttcccaaatcaaggttacaatacaggaaatagagagcaagctgtcttctatagtgggcttagaggaggaagctcagtcgtttgcacaatttgtcactaccggtgaatcagctagaattaaagccaaattgacacaaatcaggagatacggcgaagaactgagagagcacgcgcagtgtcttgaagggacaatcttaggtcacctgagtcagcagcagaagttcgaagaaaacttgagaaagatccaacagtccgtctctgagttcgaagacaaattggccgttccgataaagatttgttcgtccgcaaccgagacctacaaggtgcttcaagagcacatggacctgtgccaagccttggagtcgttgagctccgcgatcactgctttttctgccagtgcccgtaaagtcgtaaatagagacagttgtgttcaggaagctgccgccctccagcaacagtacgaggatattctgcggcgtgcaaaagagagacagacggctcttgagaatctactggcccattggcagagactggagaaggagttgtcgagctttctaacttggctagaacgtggcgaggcaaaggcctcttcccccgagatggatataagcgccgatcgggtgaaagttgagggcgaactccagctgatacaagctctgcaaaatgaagtcgtatcacaggctagcttctacagtaaactcctacagctgaaagaaagcctgtttagcgtggcgtccaaggatgatgtgaagatgatgaagctgcatctggagcagttggacgaacgctggagggaccttccacagatcatcaataaacgtataaacttcctgcaatcagtggttgccgagcatcagcagtttgatgaactgcttctgtctttttctgtgtggattaaactgttcttaagcgaattgcaaacaacatctgagattagcatcatggatcatcaggttgctctgacccgccataaagaccacgccgccgaggtcgagagtaagaaaggggagcttcagagcttgcagggtcacctcgctaaactgggttctctggggcgagccgaagatcttcatttgttacaggggaaggcagaagattgcttccagctgttcgaggaggcctcacaggtcgttgaacgccggcagctggccctatcgcaccttgcggagttccttcagagtcacgctagcttatccggtatcctgcgtcaactgcggcaaacagtggaggccaccaattcaatgaataagaacgagagcgatttaattgaaaaagaccttaacgatgctctgcagaatgctaaggccttggaaagcgcagctgtgtcgttggacggcattctgtctaaagcgcagtaccacctgaagataggttcctcagagcagagaaccagctgtagggccactgccgaccagttatgcggcgaggtggagcgcattcagaatttgctgggtacaaagcaatctgaggccgacgccctagccgtcttaaagaaagccttccaggaccagaaggaggagctcctcaaatcgatcgaggacattgaagaaaggaccgataaggagcgattgaaggaacccactcgacaggccctccaacaaagactgcgggtctttaatcaactagaagatgaactcaactctcacgaacatgaactttgctggcttaaggataaggctaaacagatcgctcagaaagacgtcgcttttgcccctgaggtcgatcgcgagatcaataggcttgaggttacttgggacgacacgaagagactgatccacgaaaatcagggccagtgctgcgggttaatcgatttgatgagagagtatcagaacttgaaatcagcagtgtctaaggtgctagagaacgcttcttcagtgatcgttactcggactacaattaaggaccaagaagacctcaagtgggctttttccaaacatgagaccgctaaaaataaaatgaactacaaacaaaaggacctcgataactttacatctaagggaaaacacctactttccgaactgaagaaaatccacagcagtgatttttcgcttgtgaagactgacatggaatccacagtggacaagtggcttgacgtgtctgaaaagctggaggaaaacatggatcggctacgagtcagtctttcgatctgggacgacgtgcttagtactcgcgacgaaattgaaggctggtctaacaattgcgtgcctcagatggccgagaatatttctaacctggataaccacctcagagctgaggagcttctgaaggaattcgaatcggaggtgaaaaacaaggccctgcgcctggaagagttacacagtaaggtgaacgacttaaaggaactcacaaagaacctggagactccccctgacctacagttcatcgaggccgatcttatgcagaaactggaacatgcaaaggaaatcacagaggtggcaaagggaactctgaaagattttactgcccagtcaacccaggtggaaaaatttatcaatgacattaccacctggttcacgaaggtcgaggaatctctcatgaactgtgctcaaaacgagacctgcgaagcgctgaaaaaagtcaaggacattcaaaaggaactgcagtcccaacagagtaacatttcctctacgcaggaaaatcttaacagcctctgccgtaaatatcacagtgccgagctagaatctctgggcagggccatgaccggcctcattaagaagcacgaggctgtgtctcagctgtgcagcaaaacacaggcatctctgcaggagagtttggagaagcacttctcagaatccatgcaagaatttcaggagtggtttcttggagctaaggccgccgcgaaggagagctccgaccggactggcgatagcaaggtactggaggccaaattgcacgatctgcagaacatcctggattcagtatcagacggacagagtaaattggatgctgtgacccaagaaggtcaaactctctacgcccacttatccaagcaaatcgtaagtagtatacaggaacagataacaaaagccaacgaagaatttcaggccttcttgaagcagtgtctgaaagataaacaagctctgcaggattgtgcctcagaactcggctcattcgaagatcagcataggaagttgaacctatggattcacgaaatggaagagcgcttcaatactgaaaacctgggggaaagcaaacaacacataccggagaaaaagaacgaagtacacaaagttgagatgttcttgggagagctgctggctgcccgggaatctcttgacaagctgagccaacgcggacagcttctttccgaggagggtcacggagccggccaagagggccgactgtgttctcagctgctgacatcccatcagaaccttcttcgcatgactaaggagaagttgcggtcttgtcaggtggcactccaagaacatgaggccttggaagaggcactgcagagcatgtggttctgggtgaaagccatacaggaccgacttgcctgtgccgagagcaccctcggctcaaaagatactttagagaagagactgtcacagatacaagatattcttcttatgaaaggggagggagaagtgaaacttaacatggccatcgggaagggagaacaagcattgaggtcctccaataaggagggacagcgggtgattcagacgcagctggagacacttaaggaagtctgggccgacattatgtctagtagtgtgcacgcccagagcaccctagagtctgtgatcagccagtggaacgactacgtcgagaggaaaaaccaactcgagcagtggatggagtctgtggatcagaagatagaacacccccttcagcctcagcctggcctcaaagaaaagttcgtcctgctcgaccatcttcagagcattctctcagaggccgaagatcacactagagcattgcatagactgattgccaaaagcagggaactgtatgagaaaacagaagatgagtcttttaaagacactgcccaggaggagctgaagacccagtttaatgacatcatgacagtggccaaagaaaaaatgcggaaagtggaggagattgtcaaggaccacctgatgtaccttgacgctgtccacgagtttaccgactggttgcacagcgctaaagaggaattacaccgctggtccgatatgtctggggactcatcagctacgcagaagaagttgagcaagattaaggagctaatagactcacgggaaattggcgcatctaggctgagccgcgtggaatctctggcccccgaagtgaaacagaataccacagcatctggctgtgagttgatgcacacggagatgcaggccttgagagcagactggaaacagtgggaagactctgttttccaaactcaatcttgccttgaaaatctggtttctcagatggcactgtctgagcaggagttttcagggcaggttgcccaactcgagcaggccctggaacagttctcggcactactaaagacttgggcacaacagctcaccctgctcgaaggtaaaaatactgacgaagagatcgtcgaatgctggcacaaaggacaggaaatcttggacgcactgcagaaggctgagccccggacagaagacctcaagtcccagcttaatgaactctgccggtttagcagagatctttccacctactctggaaaggtgagcggcctcattaaggaatacaactgtttgtgtctacaggcatccaagggctgtcaaaacaaagaacagattctgcagcagcggttccgcaaagcctttcgggattttcagcagtggcttgtaaatgccaagataaccacagcaaaatgtttcgatatcccgcagaacatttctgaggttagtacctcccttcaaaaaattcaagagttcctgtctgagtcagagaacggacagcacaaactcaatatgatgctgagtaaaggtgagctcctgagcactctgctcactaaagagaaagccaaaggcatccaggctaaggttaccgctgcgaaggaggactggaagaacttccatagtaacctacaccaaaaagaaagtgccttggagaacctgaagattcagatgaaggatttcgaagtttcagctgagccgatccaggactggctgtcaaagacagagaaaatggtgcacgaaagtagtaatagactgtacgacctgccagccaaacggcgggagcagcagaagctccagtctgtgttggaagagattcattgttacgagccgcaacttaaccgcttaaaggagaaagcccagcaattatgggagggacaagccgcttctaaatcattccggcaccgagtttcacaactatcctctcaatacctcgccctttctaacctgactaaagagaaggtcagcaggctggatcggatcgtggctgaacacaatcaattctcccttggaatcaaggagttacaagattggatgacagatgcaatccacatgctggacagttactgccacccaacttctgataagtctgtactggattctcggacattgaagcttgaggcactgctgtccgtgaaacaggagaaagagatacagatgaagatgattgtcacacggggagaatcagttttacagaacacctctccagaaggcatccccaccattcaacagcaactacagagcgtcaaggacatgtgggcctcgctgctgtcagcaggaatccggtgtaaatcgcagctagaaggggccctgagcaagtggacctcctatcaggatggcgtgagacaattttccgggtggatggacagcatggaagctaacctgaatgagtccgaacgccaacatgcagagttgcgggacaagacaactatgctgggcaaagccaagcttctcaatgaggaagtacttagctacagctctctccttgaaactattgaagtcaaaggagcggggatgaccgaacattatgtcactcagctggagttgcaggatctgcaggagcgttacagggcaatacaggaacgggccaaggaagccgtgactaagagtgagaagctagtgcgcctgcaccaggagtatcaacgagatcttaaggcctttgaagtgtggctgggtcaagagcaggagaaactggatcagtattcggtactggaaggtgatgcacatacccacgagaccacactccgagatctgcaggagctgcaagtgcattgtgcagaaggtcaggccctcctgaactccgtcctccatacccgtgaagatgttatcccttcaggcatcccgcaggcggaggacagggcccttgagagtctccgccaggactggcaggcctatcagcatagattgtctgaaacacggactcagttcaacaacgtggttaataagctgcgcctaatggaacaaaagtttcagcaggtcgacgagtggctgaaaaccgcggaagagaaagttagtccaagaacgcggcgccaaagcaacagggctaccaaggagatccaactgcatcagatgaagaagtggcacgaagaagtgacagcctacagggacgaagtcgaggaagttggagctcgcgctcaggaaattctggacgagtcccacgttaactctcggatggggtgtcaggccactcagctcactagcagatatcaagctttactcttacaggtgctcgagcagataaagttcctggaggaggaaatacagagccttgaggagtctgagagctcgctttcttcgtacagtgattggtacgggagtacccataagaatttcaagaacgtcgccaccaaaattgacaaggtcgataccgtgatgatgggtaagaaactcaaaaccttggaggtgttgctcaaagacatggaaaaggggcacagtttgttaaaatcagctagggaaaagggggagcgggccgtcaagtacctggaggaaggtgaggcagagagactgcggaaggaaatacatgatcacatggagcagctgaaggaacttaccagcacagttcgaaaagaacatatgaccttggaaaaaggactacaccttgccaaggagttctctgataaatgcaaagccttaactcaatggatagctgaataccaggagatacttcatgtccccgaagagcctaagatggagctgtacgagaagaaagcccagctctctaagtacaagagcctgcagcagaccgtgctgagccacgaaccaagtgtgaagtcagtgcgagaaaagggagaggctcttctcgaattggtgcaggacgtgacgctgaaagataagatcgaccaactgcagtcagattaccaggatctctgttccattgggaaagaacatgtgttttcacttgaggctaaagtcaaggatcacgaggactataactcggagttacaggaggttgagaagtggctgcttcagatgtccgggcgcctcgtcgcacccgatttgcttgaaactagcagccttgagaccatcacccagcagcttgcccaccacaaagcgatgatggaagaaatcgcaggctttgaggaccggttaaacaatctgcagatgaagggcgacactctcattggacaatgtgctgaccacctccaggcgaagctcaaacagaatgtgcacgcacacctgcagggaaccaaggattcttattcagcaatctgcagcaccgctcagcggatgtatcagagtttggaacacgagctgcagaaacatgtatcaaggcaggacacactacaacagtgccaggcctggcttagcgccgttcagccggatctggaacctagtcctcagcctcccctgagtcgtgctgaagctatcaaacaagtgaaacattttcgcgcactccaagagcaggcccggacgtacttggacctgctgtgttccatgtgtgacctcagcaacgccagtgtcaagaccactgccaaggatatccagcagacggaacaaacaatcgagcaaaagctcgtgcaggcccaaaaccttactcagggatgggaagagattaagcacctaaagagtgagctctggatttatcttcaggacgctgaccagcagctccagaatatgaagcggcggcactctgaactggaactgaacatcgcgcaaaacatggtgagccaggtcaaggattttgtgaaaaaactccaaagcaagcaggcctcagtcaatacaattattgaaaaggtgaataaattgactaaaaaagaagaatcacctgaacacaaggaaatcaatcatctgaacgatcaatggctcgacctgtgtcgacagagtaataacctatgcttgcagagggaggaagacctccagcggaccagagattaccatgattgtatgaatgtcgtcgaggtcttcctggagaaatttacgacagaatgggacaacctggcaaggagtgacgccgaaagtacagctgtacatctcgaagccctcaagaagttggcgctggccctccaagaaagaaagtatgcgattgaggacctgaaagatcagaaacaaaagatgatcgagcacttaaatttggacgataaggagttggtgaaagagcagaccagccatctggagcaacgctggtttcaattagaagatctaatcaagaggaagatacaggtctctgttactaatctggaagagctcaatgttgtccagagccgatttcaggaattgatggagtgggcggaggagcagcagccaaatatcgcggaagctctcaaacagtcacccccgccggacatggcacaaaatctgttgatggaccatctcgctatttgctccgagctggaggcaaagcagatgctcctgaaatccctcattaaggacgccgacagagtaatggccgatctcgggctgaatgagagacaggtgattcagaaggcgttaagcgatgcgcagagtcatgtcaattgcctgtccgatctggtaggacagaggcgcaaatacctgaataaggccttaagtgaaaaaactcagttcctgatggccgttttccaggcaaccagtcaaatacaacagcatgagcgcaagatcatgtttcgagagcacatctgtctcctgcccgatgatgtttccaaacaagtgaagacatgcaaatcagcccaagcatctctgaaaacataccaaaacgaggtgacgggactatgggctcagggacgagagctgatgaaggaggtgaccgagcaagaaaagtccgaggtcctgggaaagcttcaagagctgcagtcagtgtatgactccgttctgcaaaagtgttcgcataggctgcaggaactggaaaagaacctcgtcagcagaaaacatttcaaggaggatttcgacaaggcgtgccactggcttaagcaggctgacattgtgactttccccgaaattaacctgatgaatgaaagcagtgagttacacacgcagctcgcaaaataccagaacattctggaacagtcacccgaatacgagaacctgcttctgaccctccagagaactggtcagaccatcctgccctcattaaatgaggttgatcacagttatctctctgaaaaactgaacgccctcccgcgccaatttaacgtgatcgtcgcactggccaaggacaaattctataaagtgcaggaagcaatccttgctaggaaggaatacgctagcctcatcgagctgaccacgcagagtttaagcgaactagaagcccagttcctacggatgtccaaggtcccgaccgacctggccgttgaagaagcactgagcctgcaggacggatgtagggccattctggacgaggtagctgggttaggcgaggcagtggacgagcttaaccagaaaaaggagggttttcgatccactggtcagccctggcagccggacaaaatgctgcacctcgtgacgctgtaccatcgtctcaaaaggcagacagagcagagagtaagcctgctcgaagacaccacctccgcgtatcaggaacacgagaaaatgtgtcagcagctggagagacagctgaagtcagtaaaggaggagcaatccaaggtcaacgaggagacacttcccgccgaggagaagttgaagatgtatcacagccttgctggatccttacaagactcaggtatcgtgctgaagcgcgtgacaatccatctggaggatctggcaccgcacctggatcccttagcttacgaaaaagctcgacaccagatacagagttggcagggtgagctgaaattgctcacctctgcaatcggcgaaacggtgacggagtgtgagtcgcggatggtgcagagcattgacttccagacagaaatgtcacgaagcctggactggctgaggcgggttaaggccgaactgtctgggcctgtctacctcgatctcaatttacaggacattcaggaagaaatccgaaaaatccagatccaccaggaagaagtccagagctccctgagaatcatgaatgccctgagccacaaggaaaaagagaaattcaccaaggctaaggaactgatctcagctgacctggagcactctctggctgagctatcagagctagacggcgacattcaggaggccctgcgaacaaggcaggccaccctcacggaaatctactctcaatgtcagaggtattaccaagtatttcaggccgcaaacgactggcttgaggatgcacaggaactcttgcagctggctgggaatggactggatgtggaatcggctgaggaaaacctcaagtcacatatggagttcttcagcactgaagatcagttccacagtaatttggaagagctgcacagcctagtcgctactttggacccgctcatcaagcctactggcaaggaagatctggagcagaaggtcgcgagtcttgaactgcggtctcagcgcatgtcccgcgactctggcgcacaggtagatttgctgcaaagatgcaccgctcagtggcacgactatcaaaaagcccgtgaagaagttatagaattaatgaacgacactgagaagaaattatctgagttctcgctcctgaaaaccagcagctctcatgaggccgaggagaagctctcagagcataaggcactagtgtcagtggtgaactcgtttcatgaaaaaatcgtagcactcgaggagaaagctagccagctggaaaagacaggcaatgacgcttccaaagctaccctgtcccgcagtatgaccacggtgtggcagagatggacacggctcagagctgtggctcaagaccaggaaaaaatactggaggatgccgtggacgaatggacaggctttaataataaagtcaaaaaggccacagaaatgattgaccagctgcaggacaagctaccgggaagctccgcagagaaagcaagcaaggccgaacttctgactcttctggagtatcatgacacatttgtgttggagcttgaacagcagcaaagcgctctaggcatgctccgccagcagacactctccatgttgcaagacggcgccgctcctaccccgggggaagagccaccactgatgcaggaaattaccgcgatgcaggaccggtgtctcaacatgcaggagaaggtgaagacaaacggaaaactagtgaaacaagagttgaaggatagagaaatggtggaaacccaaattaactctgtcaagtgctgggttcaagaaacaaaagagtatttggggaaccctacgattgagatcgacgcgcaattagaggagctgcaaattctgctgacagaggctaccaatcatcgacaaaatattgagaaaatggccgaagagcagaaggaaaagtatcttgggctctatacaatcctgcctagtgaactctctcttcagttggcagaggtggccctagacctgaagatccgggaccagatacaggacaaaataaaggaggttgaacaaagtaaggctacttcacaggagctcagccgccagatacagaagctggccaaggatctgaccacgatactgactaagctaaaggcaaagacagataatgttgttcaggccaaaaccgatcagaaagtgctgggggaggagctggacgggtgcaactcaaaactgatggagctggacgccgctgtccaaaaattcctcgagcagaatggtcagctaggaaaaccgctggctaagaagatcgggaagctaaccgagctacaccagcagactattcgtcaggcagagaatcgcctgtccaaattgaatcaggcagcatcccatctagaggagtataacgagatgttggaactgatcctcaaatggattgaaaaggctaaggtccttgcccacgggactattgcctggaacagcgcatcacagttgagggagcagtatattctgcatcagacactgctggaagagagcaaggagatcgatagcgaacttgaagcgatgaccgagaaactgcagtacctgaccagtgtttactgcaccgaaaagatgtctcagcaggtggcagagctagggagagagaccgaagaactgagacaaatgataaaaatccgactgcagaatcttcaggacgctgcaaaggacatgaagaagttcgaagccgaactcaagaaactgcaggccgcactcgagcaggcccaggctactctcacctcccccgaggtaggacgcctcagtctgaaggagcaactgagccacagacaacacctgttatccgagatggagtctttgaagccaaaagtgcaggccgtgcagctgtgtcaatccgcactaaggatccccgaagacgtcgtggcgtcgttgccattgtgtcatgctgccctgcgtctccaggaggaggcctcaaggttacagcacactgcaatacagcaatgcaacatcatgcaggctgccgtggtccagtacgagcagtatgagcaggagatgaaacacctccaacagctgatcgaaggtgcgcaccgggagatagaagataagccagttgctacaagcaacattcaagagttacaagcccaaattagtcgacatgaagaacttgctcagaagataaaggggtatcaggaacaaatcgccagcctgaacagcaaatgtaaaatgttgactatgaaggccaaacacgctactatgctgcttacagtcactgaagttgaaggcctggccgaagggacagaggacctagacggggagctcttacctactccaagcgcacatccttctgtggtgatgatgactgccgggcgatgtcacacccttctttctcccgtcaccgaggagagcggcgaagaaggtactaactctgaaatctcaagcccacccgcctgtaggtctcccagccccgtggccaacacagatgcgtctgttaaccaggatatcgcatactatcaggcgctctctgccgaacggctccagacggatgcagccaagattcaccccagtacatctgcttcccaggagttctatgaacctggacttgaaccttcagccacagcgaagcttggcgacctgcagcgaagctgggagaccctcaaaaatgtgattagtgagaagcagcgcactttgtacgaggccctggagaggcaacaaaagtatcaagattccctccagagcatcagcaccaaaatggaggccatcgagttgaagttatctgaaagccccgaaccaggacgatcccccgagagccagatggcagaacaccaggccctgatggatgagattttaatgctgcaagatgagattaacgaactccaaagttctctggccgaagagcttgtgtctgagagctgtgaggcggacccagcggagcagcttgccttacagagtactctaactgtgctggccgaacgtatgagtacgattcgaatgaaagcctccggaaagaggcaattgttagaagagaagctcaatgaccaactcgaggagcaacggcaagagcaggcgctgcagaggtacaggtgtgaggccgatgaactggacagttggctactcagtacgaaagctaccttggacacggcactctcccccccaaaggagccgatggatatggaggcccagctgatggattgccagaatatgttggtggagattgagcagaaggtcgtggcactgtcagaactttctgttcacaacgaaaatctactgctagagggtaaggcccataccaaggatgaggccgagcaactggctggcaagttgcggcgtctgaaagggtcgctacttgaacttcagcgcgcattacatgataagcagctcaatatgcagggaaccgcccaggaaaaggaagaatcagatgtcgacctcacagcaactcagagtcctggcgtgcaggaatggctggcccaagcaaggactacgtggacgcaacaacgccaatcctcgttacagcagcaaaaggagctcgagcaagagctggccgaacagaaatcccttctgagaagtgtggccagcagaggtgaggagatcctgattcagcacagcgcggccgagacctctggggacgcaggtgagaaacccgacgtcttatcacaagagttaggaatggaaggtgagaaatcttcagccgaagaccaaatgcgaatgaagtgggagtccttgcaccaggaattcagcaccaaacagaagttactccaaaatgttctggagcaggagcaggagcaagttttgtattcaaggcccaatcgccttttatccggagttccgctctacaaaggcgatgtacccacccaggataaatcagccgtgacttcattgctagatggccttaatcaggctttcgaggaagtctctagccaatctggcggggccaaacgccagtccatccacctcgagcaaaaactatacgacggggtatccgcgacttcaacatggctcgacgacgtagaagagaggcttttcgtcgcaaccgcattgctacctgaagagactgagacctgcctgtttaaccaggaaattctggccaaggatattaaagaaatgagtgaggaaatggataaaaataagaacctcttcagccaggcttttccggaaaacggtgacaacagagacgtgatcgaagacacacttggttgtctgctgggccggctgagcctactggattcagttgtaaatcagcgctgccaccagatgaaagaacggttacagcagatcctgaatttccagaatgacctgaaggtgctttttacctctctcgcagataacaaatacatcattcttcaaaagttagccaatgtattcgagcagcctgttgcggagcaaatagaggcaatccaacaggccgaggatggcctcaaggagtttgatgctggcatcatcgagctgaaacgcagaggcgacaagctgcaagtggagcagccttcaatgcaggagctctccaaactgcaggacatgtacgacgagctgatgatgatcatcggcagtcgcagaagtggactgaaccagaatcttactctgaaatcacaatacgaaagggccctgcaggatctcgccgatctattagaaacagggcaagagaagatggcaggagaccagaagattatcgtcagtagtaaggaggaaattcagcaactgctggataagcataaagaatattttcagggccttgaatcgcacatgattttgactgaaacactgttcagaaagatcatcagctttgcagtgcagaaggagacccagtttcacaccgaacttatggcacaggcttcagctgtgcttaaaagagcacataagagaggtgtggagctggaatacattctggaaacttggagccacctagacgaggatcagcaggaactgagccgtcagctggaggtcgtggaatcatccataccgtccgtgggcctggtggaggaaaacgaagaccggctgatcgatagaattactctatatcagcacctgaagtcatcgttaaacgagtatcagcctaaactgtaccaggtgctcgacgatggtaaacggctgcttatttctatctcttgctcagatctggagtctcagctgaatcagctaggggagtgttggctgtcaaatactaacaagatgtccaaagaactccaccggcttgaaaccattctgaagcattggacacgctaccaatcagagtccgccgacctgatacactggctccaatcagccaaggacagactcgagttttggacccagcagtcggtgactgtgccccaggagctggaaatggtgcgcgatcacttgaatgcttttcttgagttttctaaggaagtggacgcccaatcttctctgaagagcagtgtcctaagtactggaaatcagttgcttcgcctgaagaaggttgatacggccacattgcgaagcgagctctctcgcatagatagtcagtggacagatctcctgactaatattcccgcagtccaggaaaagctccaccagctgcaaatggacaagctcccaagccgacatgccatctctgaagtcatgtcgtggatctccttaatggagaatgtgatacagaaggatgaggataatataaaaaacagtatcgggtacaaggctatccacgaatacctacagaaatataaaggttttaaaatagatataaattgcaaacaacttactgtcgatttcgtgaaccagagtgtcctgcagatctccagccaggatgtcgagtctaaaaggagtgacaaaaccgactttgcagagcagctgggcgcgatgaataagagctggcagattttacaaggcctggtgaccgagaaaattcagttgctggaaggactgttggagagctggagcgaatacgagaacaacgtacagtgtctgaaaacttggttcgaaacacaggagaaacgcttgaaacagcagcaccgaattggggatcaggccagcgtgcagaacgctctcaaagactgccaagatttggaggacctgatcaaagcgaaagagaaagaagtggagaaaattgagcagaacggcctggctctaatccagaacaaaaaggaagacgttagctctattgtcatgagcactctcagagagctgggacagacgtgggcaaacttggaccacatggtcgggcagctaaagatcctgcttaagtctgttttggatcaatggtcatcacacaaggttgcgtttgacaagataaactcttatctcatggaggctcggtattccttaagtcgcttccggttgcttaccggctccctcgaggcggtccaagtacaggtagacaacttacagaacctccaggatgacctggagaagcaggagcgatcactacagaagtttggatctattacaaatcaacttttaaaggaatgccacccacctgtgactgagactttaaccaatacactgaaggaagtcaacatgcgatggaataatctgctggaggagattgctgagcagctgcagagcagcaaagccttgctgcagctgtggcagaggtataaggactacagtaaacagtgtgccagtaccgtgcagcagcaagaggatcgtactaatgaactgctgaaggctgcaaccaataaagacatcgcagatgacgaggtcgcaacgtggattcaagattgcaacgacttgctgaaggggctcggtaccgtcaaggacagtctcttttttctgcacgaactgggggaacagctgaagcaacaggttgatgccagcgccgcctcagccatccagagcgaccagttatccctttctcaacacctgtgcgcactggaacaagcactctgcaagcagcaaacgtctctgcaggccggggtgctcgactatgagactttcgctaaaagtctggaggctcttgaggcatggatcgtggaggccgaggagattctgcaaggccaggacccaagtcactcctcggatctttctacgattcaggagcgcatggaagagctgaaaggccagatgctcaaattcagtagcatggctcccgacctagatcgcctcaacgaacttggctatcggctccctctaaacgacaaggaaattaagaggatgcagaacctgaacagacattggagcctcatcagctctcaaacaacagagagattcagcaagctccagtcctttttgctgcagcaccaaactttcttagaaaaatgcgagacgtggatggagtttctggtccagacagaacaaaaactggctgtcgagatctccggcaattatcagcacttgctggaacagcaacgcgctcatgagttattccaagcagagatgttcagtcggcagcaaatactgcactcaatcatcatagacgggcagaggctcctggaacaggggcaggtggacgatcgcgatgagttcaacctgaaactgactctgctgagtaatcagtggcaaggcgtgatccgcagggcacagcaacgcagggggataatcgatagccagatcagacaatggcagcggtacagagaaatggcggaaaagctgagaaaatggctggtggaagtgagctacctgcccatgtccggcctggggtccgtgcctattccgttgcagcaggcccggaccttatttgacgaggtacaattcaaggaaaaagtctttcttaggcagcaaggcagttatatccttaccgtggaggccggtaaacaacttctgctgagtgccgacagtggggcggaagcagcgttgcaagccgagctagccgagattcaggaaaaatggaagtctgcctccatgcgcttggaggaacaaaaaaaaaagttagcattcttgctgaaggattgggaaaagtgtgaaaaaggtatcgccgacagcctggagaagttgcgtaccttcaaaaaaaagctctcacagtctttgcccgatcatcacgaagagctacacgccgagcagatgagatgtaaagagctggagaatgctgttgggagctggacagatgatttaactcagctctctctgcttaaagataccctttctgcttacatcagcgctgatgacatcagtatcctgaatgaaagggtagaactgcttcagcgtcagtgggaagagctctgccatcaattatctttaagacgtcaacaaatcggagagagactgaacgagtgggcggtgttttcggaaaagaataaagagctgtgtgagtggctgacacagatggagtccaaggtgagccagaatggcgacatcctgatcgaagaaatgatcgagaagttgaaaaaagactaccaagaagagatcgctatcgctcaggaaaacaaaatccaattgcagcagatgggggaacgacttgccaaggcatcccacgaatcaaaggcatccgagattgagtacaaactgggtaaggtgaatgatcgttggcagcatttgcttgatctcattgcggcgagagtgaaaaaacttaaagagactttggtagcagtccaacagctcgacaagaatatgtctagccttagaacttggctagcgcatatcgagtcagaactggccaagcctatcgtttatgattcttgcaattctgaagagattcagcgtaagctgaatgagcagcaggaactacagcgagatattgagaagcactccacaggggtcgcatccgtactaaacctctgcgaagtcctgctgcatgattgcgacgcctgtgcaaccgacgcagagtgcgacagtattcagcaggctacacggaatctcgaccgacgttggcgtaatatctgtgcaatgtcgatggagcgccgtctaaagattgaagagacctggaggctttggcagaagtttctggatgattactcccggtttgaggattggctgaaatcatctgagcgcacagccgcctttccctctagctcaggcgtcatttacacggtggctaaggaagaactgaaaaagtttgaagcctttcagcgccaggttcacgaatgcctgacccagcttgagcttattaataagcaataccggaggctggcccgggagaatcgaactgacagcgcctgcagtctcaagcaaatggtgcacgagggcaaccagagatgggataacctgcagaagagagtcacctccattctcaggcgtctaaagcatttcatcgggcagcgggaggaattcgagacagcacgggacagtattcttgtgtggctgactgaaatggatttgcagttaaccaacatagagcactttagcgagtgcgatgtgcaggcgaagataaagcagctgaaggccttccagcaggagatctcgctgaaccacaataagatcgaacagatcatcgctcagggggagcagctgatcgaaaaaagcgagcctcttgacgctgctataattgaagaggaactcgacgagttgagaagatattgccaggaggtcttcggtcgggtcgagaggtatcacaagaagcttattcggctccccctacccgatgacgagcacgacctctccgatcgggagctcgaattagaggattccgccgcactctccgatctgcattggcacgacaggagcgccgatagcttgctgagccctcagccctcaagcaaccttagtctgagtcttgcccagcccctgcggagcgaaaggtccggacgagacacccctgccagcgtggattcgattccactcgaatgggatcacgattacgacctatccagagacctggaatccgccatgtcccgggctctgccatccgaggatgaagaagggcaggacgacaaggacttctatctgcggggcgccgtcgggctgagcggagaccacagcgccctggagagccagattcgacagctgggtaaggctctcgatgacagtaggtttcagatacagcagaccgagaacattataaggtcaaaaacccctacaggaccagagcttgataccagttacaagggatacatgaaactgctgggggagtgcagctccagtattgacagtgttaagcgactcgagcataagctgaaagaggaagaggaaagcctgcctggcttcgtgaacttacactctactgagacccagacggctggcgtcatcgataggtgggaactcctccaagcacaggcgctctcaaaggaattaaggatgaaacagaacctgcagaagtggcagcagtttaacagcgacctcaactctatctgggcctggctgggcgacactgaggaagagctggagcagcttcaaaggctggaattatcaactgatatccagactattgagttgcagatcaaaaagctcaaagaattgcagaaagccgtggaccaccgaaaggcaataatattaagcatcaacctgtgttccccagagttcacccaagccgactctaaagagagtcgcgatttacaagacagattgagccagatgaatggaagatgggaccgcgtctgctccctactggaagagtggcgaggactcttgcaagacgccctgatgcagtgtcagggattccatgagatgagtcacggtttactcctcatgctagaaaatattgaccgcaggaagaacgaaatcgtgcctattgatagcaatttagatgcggagattttgcaagaccaccataagcagctgatgcagattaaacacgagcttctggagtcacaattgcgcgtcgccagcttgcaggatatgtcctgccagcttctggtgaatgccgaggggaccgactgcctggaggcaaaggaaaaagtacacgtcattgggaaccgactcaagctgctgctgaaagaagtatccagacatatcaaggagcttgagaagttgctggacgtctcctcatctcagcaggatttgagcagttggtcgagtgctgacgaattagatacttccggctccgtgtcccctacttccggtagaagtaccccgaatcgccagaagacgccacgaggcaaatgctccttaagccagcctggtcccagcgtgtcctcccctcactcgcgcagcaccaagggagggtcagattcttctctcagcgagccaggacctggcagatcaggacgaggcttcctttttcgcgtgctgcgcgccgccctccctctacaacttcttctgttgttgctgataggattagcgtgccttgtgccaatgtctgaggaggactacagctgtgcactaagtaacaatttcgcaaggtcatttcacccaatgctcaggtacactaacggccctccacctctctag

SEQ ID NO: 206667 - DNA, 25230 bp, synthetic construct
  misc_feature 1..25230: note = Description of Artificial Sequence: Synthetic coding sequence
  source 1..25230: mol_type = other DNA
atggccaccagccggggcgccagccggtgcccccgggacatcgccaacgtcatgcaacgcttgcaggacgagcaagaaatagtccagaaacggacattcacaaaatggatcaattcacatctggcgaaaagaaagccgccgatggtcgtcgatgacctttttgaggatatgaaagatggcgtgaagttactcgcccttctcgaggtgctatctggacagaagctgccgtgcgaacagggccgacgaatgaagcgcattcacgcggttgcaaatattggcactgctctgaagtttctggagggaaggaagatcaagctggtgaacatcaactcaacggatattgcagacgggagaccctccatcgtccttggcctgatgtggactatcatcttatactttcagattgaggagctcacctccaatttgccacagttgcagtcactgagttcaagcgcctcctctgtcgatagtatcgtgtcatctgaaactccttcccctccttctaagcgtaaggtcactactaagattcagggcaacgctaagaaagccctgctaaaatgggtccagtacacagcaggaaaacaaactggtatcgaggtgaaggattttggaaagtcatggagaagtggagttgcctttcactccgttatacatgccatccgccctgaacttgtggatctggaaactgtcaagggccgaagcaaccgcgaaaatctcgaggatgctttcactattgcagaaaccgaactgggtatccctagactcttagatcctgaggacgtcgacgtggacaagcccgatgagaagtccattatgacttacgtagctcaatttttaaagcattaccccgatatccacaacgcttcaaccgacggtcaagaagatgatgaaattctccccggcttccccagtttcgccaacagcgttcagaacttcaagagggaagaccgtgtgatctttaaggagatgaaggtctggatcgagcagttcgagagggatctcactagggctcagatggtggaatcaaacttacaggacaaataccagagctttaagcactttcgggtgcaatatgagatgaagcggaagcagatagaacacctaatccaaccgctccaccgggacggcaagctgagtttggaccaggcccttgtgaagcagtcgtgggaccgtgtcaccagccgtttattcgactggcacattcaacttgacaaaagtcttcccgcccctctgggaactataggcgcctggctttatcgtgcagaagtagcactgcgtgaagagatcaccgttcagcaggtgcacgaggagacagctaataccatccagcggaaattagaacagcacaaacggaaattgcggaatgtcatcgatttactccagaacaccgacgcccacaagagagcttttcacgaaatatatagaacccgcagcgtgaatgggatcccagtgccacccgaccagctcgaggacatggctgagagattccactttgtcagtagcacatccgagctccatttgatgaagatggaatttctggagcttaagtacagactgctctcactgctcgtgctcgcggaaagcaaattaaagagctggattatcaagtatggacggagggagtctgttgaacagctcctacagaactatgtgtcctttattgaaaactctaagttcttcgaacaatatgaagtgacctaccagattctgaaacagaccgccgagatgtatgtgaaagccgacggttccgtcgaggaagccgaaaacgttatgaaattcatgaacgagactaccgcccagtggaggaacctgagtgtcgaagtaagaagcgttagatcaatgctcgaggaagtaatatccaattgggacaggtacggaaacacagtggcgtccctgcaggcctggcttgaggacgctgagaaaatgctgaatcagagcgagaacgcaaagaaggacttctttagaaatcttccccattggatacagcagcacactgccatgaacgatgccggaaatttcctcatcgaaacatgcgacgaaatggtctcaagggatttgaaacagcaactgttgctcctcaatggacgttggcgcgaactgtttatggaagttaagcagtatgcacaggctgacgagatggacagaatgaaaaaggaatatactgattgcgtggtaacgctgagcgccttcgccacagaagcgcacaagaagctctccgagcccctggaggtgtcttttatgaatgtgaagctgttaatacaggatctggaagatatcgagcaaagggtcccagtgatggacgcccagtataagataatcacaaaaactgcacatctgatcactaaagagtcgcctcaggaagaagggaaggagatgttcgcgaccatgagcaagctcaaggagcagctaacaaaagtgaaggaatgctactcacccctcctctatgagtctcagcaactgctgattcccttggaggaactcgaaaagcagatgacgtcattttacgattctctgggcaagatcaatgagatcattactgtcctcgaaagagaagcgcagtcttctgcactcttcaagcagaagcaccagctccgtattcttaagtgcaagtggtgtaatagttctcagaagatgactctctgtttagtgctaggatctatgatcagcatgctgagcaccgcaaagatcaccattgcaggatataagtccgaggtagaagtgtcggagctgctcgcttgtcaggaaaactgcaagaaaaccctaacactcatcgaaaaaggctctcaatccgtccagaaatttgtaaccttgagtaacgtgctgaaacactttgaccaaacccggctgcagactgattgcaggtactcttgctgtttttctgttatgcgaaagcagcaccacatcatgattgtttttcacattaagagtatggtgaaaaaaacgggggactggaaaaagcatgtggaaaccaactcccgcctgatgaagaaattcgaggaatccagagcagaattggagaaggtgctgcgtatcgctcaagaagggctagaggaaaagggggatcccgaagagctcctgcggcggcacacagagttcttcagccagcttgaccagagggtgctgaacgcctttttgaaagcgtgcgatgaactgacagacatcctgcccgagcaggaacagcagggcttgcaagaggccgtccgtaaactgcacaagcagtggaaagatctgcagggggaagcaccctatcatctcctccatttgaaaattgacgtcgagaagaacaggtttcttgcctcggtagaagaatgcaggaccgagttggatagggagacaaaactcatgccccaggaggggtctgagaaaatcattaaggagcaccgagtgtttttcagtgacaaggggccacatcatctgtgcgagaagagacttcagctcattgaggagctgtgtgtaaagctgcccgtgcgtgaccctgtacgcgatactccagggacatgtcacgtgactctgaaagagttgcgcgccgcaatcgactcaacctataggaagctgatggaggatcccgacaaatggaaggattacacgtcacggttctccgaattttcctcttggattagcactaacgaaactcagctcaaaggaatcaagggcgaagccattgacaccgccaatcatggtgaggtgaaaagggcagtggaggagatcaggaacggcgtgactaagcgaggtgaaactctgagctggctcaagtcccgcctgaaagtgttgacggaggtgagctctgagaacgaggctcaaaagcagggcgacgagttagcgaagctctcctcaagtttcaaggctcttgtgaccctcctgagcgaggtggaaaagatgttgtctaactttggcgattgtgttcagtacaaggagatagtgaagaactctttggaagagctgatcagcggctctaaagaggtccaggaacaggccgagaaaattctagatactgagaacttgttcgaagctcaacaactgctcctgcatcaccaacaaaagactaagagaattagcgccaaaaagagggatgttcagcaacagatcgcacaggcacagcagggtgagggtgggctccccgaccgcggacatgaagagcttagaaagctcgaaagtaccctagacggattagaaagaagtagggagaggcaggaaagacgtattcaagtgactctgagaaaatgggagaggttcgagacaaataaggaaaccgtcgtcagatacctattccagacagggtctagccacgaaagatttctgtcattctcctccctcgaatcactgagctcggagctcgaacagactaaagaatttagcaaaagaaccgagagcatcgctgtacaggcagagaatctggtcaaagaggcctcagaaataccactcgggccccaaaacaagcagctgctgcagcagcaggccaaatctataaaggaacaggttaagaagctggaagacactttagaggaggagtatgtaatcgataacaaaacaatggaaatggtcaagacaaagtgggatcacttcggttcaaacttcgaaaccctgtctgtctggattaccgagaaagagaaagagctcaacgccctcgaaaccagcagttcggcgatggatatgcaaatcagtcagatcaaggtaaccatccaagagattgaatctaagttgagctctatcgtcggcctggaggaggaggctcagtcctttgctcagttcgtgaccactggcgagagcgcccgcatcaaagccaagctgacacagataaggcgttacggcgaggagcttcgagagcatgcacaatgtctcgagggaaccatactgggacatctgtcacagcagcagaagttcgaggagaatcttcgcaagatacaacagagcgtgagcgagtttgaggacaagcttgccgtccctattaagatctgctcaagcgcaacggagacctataaggtccttcaagagcacatggatctgtgtcaggcccttgagtcactgagttcagcgatcactgcatttagcgcgtccgctagaaaagtcgtcaatagagacagctgtgtgcaagaagccgccgcccttcagcagcagtatgaggatattctccgtagagcaaaggagaggcagacagccttggagaacctcttggcccattggcagcgcctggagaaagaactctcatcctttctaacctggcttgagagaggcgaggccaaagcttccagtccagagatggatatctcagcggacagagtcaaggtagaggcttccaaagatgacgtgaagatgatgaagctgcacctcgaacagcttgacgaacgctggcgggatttaccgcagataatcaataagagaatcaacttcttgcaaagtgtcgtggctgagcaccagcagttcgatgagctgctgctatcctttagtgtgtggatcaagttgtttttatccgaacttcagacaacatccgaaattagtattatggatcatcaggttgcactgacacggcacaaggaccacgctgcagaagtagagagtaaaaagggcgagctccagtccctccagggtcacctcgcaaagttggggtccttgggccgcgcagaggacttgcacttgctgcaggggaaggctgaggactgcttccagctgtttgaggaagccagtcaagtcgtggagaggcggcaactcgctttgtcacacctggcagaattcctccaatctcacgctagcttaagtggcatcctccggcaactgagacagaccgttgaagcgactaattccatgaataagaacgaatctgatctcattgagaaggatctgaatgatgcacttcagaatgctaaggctctggaatctgctgccgtgagcctcgacggcattctatcgaaggcgcaatatcacctgaagattgggtccagcgaacaacgtacttcttgcagggccaccgcagatcagctttgcggcgaggtggagagaatccagaatttgttaggtaccaaacagagtgaggctgatgctttggccgtgctcaaaaaagcatttcaggatcagaaagaggaactactgaagtccattgaggatattgaggaacgcaccgataaggagcgcctgaaggagccaacccggcaagcacttcagcagcgattgcgggtgttcaaccagttagaagacgagctaaatagtcacgaacatgaactgtgttggctcaaagataaggccaaacagatcgcacagaaggacgttgcatttgcgccagaggtcgatcgtgagatcaataggcttgaggttacatgggacgacactaagagattgatacatgagaaccaaggacagtgttgtggactcatagatctaatgcgtgaatatcagaatctaaaatctgccgtatcgaaggtgcttgaaaatgcaagctccgtgattgttactagaaccaccattaaagatcaggaagatctgaagtgggccttctctaagcatgaaactgccaagaataagatgaactacaaacagaaggacctggataacttcaccagcaaggggaaacacttgctttctgaactgaaaaagattcacagcagcgacttttctttggtgaagaccgatatggaatccaccgtagacaaatggttggatgtgtccgagaagcttgaggagaatatggaccgccttcgggtttcgctgtctatctgggacgatgtactctctaccagggacgaaatagagggatggtccaacaactgtgtgcctcaaatggccgaaaacattagcaatctagataaccatctgcgagcggaggagctgctcaaggaatttgaatcagaggtgaagaacaaagctttgagattggaggaattgcattccaaggtaaatgacctgaaggagttgacaaagaaccttgagactccgcctgacctgcagtttatcgaagcagaccttatgcaaaaattagaacacgccaaagagatcaccgaagtagccaaaggcactctgaaggacttcaccgcacaatccacccaggtagagaaatttattaatgatattacaacttggttcacgaaggtcgaagagtcgcttatgaactgtgcccagaacgaaacgtgtgaggctctcaaaaaggtgaaggatattcagaaagaactccagtcccagcagtccaatatttcgtccacacaggagaatctgaacagcctgtgtagaaaataccattcggccgagttggaaagcctcggtcgcgccatgactgggctcatcaaaaaacatgaagccgtgtcacagctctgttcaaaaacgcaggcttcattgcaggaatcactggaaaagcatttctcagaggagtctatgcaggaatttcaagagtggttcctgggcgcaaaagcagccgccaaagaatcatcggaccggaccggcgattcaaaggtattagaagccaaactacatgatttgcagcagaatattctggattccgttagcgatggtcaatcaaaacttgatgctgtcacccaggagggtcagacactgtacgctcacctatcgaaacagatcgtttccagcatccaggaacaaatcacaaaggctaacgaggagtttcaggcgtttctgaaacagtgtttaaaggataagcaggccctccaggattgtgcatccgagctgggaagtttcgaggatcagcataggaagcttaacctgtggattcatgaaatggaggagcgctttaacaccgaaaacctcggggagagcaagcagcatatccccgagaaaaagaatgaagttcataaagtagaaatgtttctcggagagctactagccgccagagagagccttgataagctgtcacaacggggacagttacttagtgaagaaggacacggcgcaggacaggagggccgcttatgctctcaattactcacaagtcaccagaatttgctgagaatgacaaaggaaaagcttcggtcttgtcaggtggccctgcaggaacacgaagcgctcgaggaggctcttcagtcgatgtggttctgggttaaggctatacaggatcgcctagcttgtgccgaaagtaccttgggttcgaaagacacgctggagaaacgcctatcccaaatccaggatatactgctgatgaagggcgagggcgaagtgaaattaaatatggctatcggcaagggcgagcaggcccttcgaagcagtaacaaagaaggacaacgggttatccaaactcaacttgagacactgaaagaggtgtgggcagacattatgagttcctccgtccacgctcagtccaccctggaatctgtgatctcccaatggaacgactacgtggaaaggaaaaatcagctcgagcagtggatggaatctgtcgatcaaaagatcgagcaccctctgcagcctcagcccggcttaaaggagaagttcgttctgctggatcatctgcagtcaatcttgtcagaggcagaagatcacacccgcgctctgcatcggctcatcgcaaaaagcagagagctgtacgagaagacagaagatgagagtttcaaggacacggcgcaggaagaactgaagactcagttcaatgacatcatgactgtcgccaaggagaaaatgaggaaagtcgaggaaatcgtaaaggatcaccttatgtacctcgacgcagtgcacgaattcaccgactggctgcatagcgctaaggaagagctgcaccgttggtctgatatgtctggggactctagcgccacgcagaaaaaactctccaagatcaaggaactgattgattctagagagatcggagcatcgcgcttatctcgcgttgagagcctggcaccagaagttaagcagaataccaccgcgagcggttgcgagctgatgcacaccgagatgcaggcattgcgcgcagactggaagcagtgggaagattccgtgttccagacccagtcatgccttgaaaatctcgtgtctcagatggcgctcagcgagcaagaatttagtggccaggtggcccaattggaacaggcactggaacagttcagcgccctgctaaagacctgggcccagcagctcaccttgctagaaggcaaaaacaccgacgaagagatcgtggaatgctggcacaaagggcaggaaatactcgatgccctgcagaaggctgaaccaagaacagaggacctcaaaagccaacttaacgaattatgccgcttcagtcgcgatttgtctacctattccggcaaggtgtcgggactgataaaagagtataattgcctctgcctgcaggcgtctaagggctgccaaaataaggaacaaatactccagcaacggttcagaaaagcgttcagagactttcagcaatggttggtgaatgccaagattacgacagccaagtgttttgacatcccccagaacatctctgaagtcagcactagcctgcagaagatccaagagtttttatccgaaagtgagaatgggcagcacaaacttaacatgatgctgagtaaaggtgagctactctctaccttgctgacaaaggagaaagcaaaggggatacaggccaaggtgacggctgccaaagaggattggaaaaattttcactccaacctgcaccagaaagaaagtgcccttgaaaatttgaaaatccagatgaaagatttcgaagtgagcgcagaacccatccaggattggttatcaaagacagaaaagatggtgcacgagtctagcaaccggttatatgatttgccagctaaaaggcgggagcagcagaagctccagtccgttcttgaagagatccactgctatgagccacagcttaaccggttaaaggagaaggcccagcaattgtgggaaggacaagctgcctctaaaagttttagacatagagtgagtcaactttcctctcagtatctggccttgtctaatcttacaaaggagaaggtgtcgcgcttggatcggattgtggctgaacataatcagttttccctgggcattaaggaactgcaagactggatgacagacgctatccatatgctggactcctattgtcaccctacttctgataagtccgtcttagattcccggactcttaaactcgaggctcttctgtctgtgaagcaggaaaaggaaattcagatgaaaatgatagtgactcgcggagaaagtgtgctccaaaacacaagtcctgaggggatcccaacgatccagcaacagctccagtcagtgaaggacatgtgggcttcgttgctcagcgcaggtatccgatgcaaacgtgttagactcccatgcgcctatattgcccttaaactgcgggtgcatcagcatgcagaactccgagataaaactacaatgctcggaaaggcaaaagaagcagtgacaaagtctgagaaactcgtgaggcttcaccaggagtatcagagggatctgaaggccttcgaagtctggctggggcaggagcaggagaaactagatcagtattccgtgctggagggcgatgcacacacgcacgagaccacactgcgcgaccttcaggagttacaggtccactgtgccgagggtcaagcacttcttaacagcgtgctccatactagggaagatgtgatacctagcggcatacctcaagcagaagatcgcgcgcttgaaagtctccggcaggattggcaggcctaccaacatcggctttccgagacccggacacagttcaataacgttgtgaacaagctgagactaatggaacagaagttccagcaagttgacgagtggctcaaaactgctgaagagaaggtatcaccacgcacccggcgccaatccaaccgggcgacaaaggagatccagctgcatcaaatgaagaagtggcatgaagaagtgaccgcttatcgcgacgaagtggaggaagttggtgcgcgcgcacaggaaatattagacgagtcacacgttaatagccggatgggttgtcaagctactcagctgacgagtcgataccaggcactgctccttcaggtgctcgagcagattaaattcttggaggaggagattcaatccctagaggaatccgagagcagcctttcgtcatatagtgactggtatggttctacacacaagaacttcaaaaatgttgctaccaagattgacaaggttgataccgtgatgatgggcaagaagctcaagacactggaggtgctgctgaaggatatggaaaagggccatagtctgcttaagtccgctagagagaaaggggagcgggctgtgaaatatctggaagaaggcgaagctgagagacttcggaaggaaatacatgaccatatggaacagttgaaagaactcacctccacggttaggaaggagcatatgaccttggagaaatcactccagcagaccgtgctttcccacgagccctctgtgaagagcgttagggaaaaaggggaggcattgctggaactcgttcaggatgtaaccttgaaagacaagatagatcagcttcagtctgattaccaagacctctgtagtattggaaaagaacatgtgttcagtcttgaggccaaggtgaaagaccacgaagactacaactcagaactccaagaagtggaaaagtggctgctgcaaatgagcggcagattggtcgctccagacttactcgagacatctagcttggagaccataacacagcagttagctcatcacaagatgtaccagagcctcgagcatgagctacaaaaacacgtgtctaggcaagacacactccagcagtgtcaggcatggttgtctgccgtacagccagatctagagccttctccgcaaccccctctctctcgcgccgaagccatcaagcaggttaagcatttccgagctctccaagaacaggcgcggacatatctggacttactctgctctatgtgcgatctgagcaatgcctctgtgaagacgactgccaaagatattcagcagaccgaacaaactatcgaacagaaattggttcaggcgcagaatctcacccagggatgggaggagatcaagcatctgaagagcgagttgtggatttatctgcaggatgcagatcagcaactccagaatatgaaacggcgccactccgagttagaactgaatatcgcgcaaaacatggtcagtcaagtcaaagacttcgtcaaaaagctccagagtaagcaggcaagcgttaacacaattattgagaaagtcaacaaactgacaaaaaaggaggagtctcccgaacataaagaaattaaccatctcaatgatcagtggttagatctctgccggcagtcaaataatctttgcctgcagagggaggaagaccttcagagaactagagactaccacgattgcatgaacgtggtggaggtgtttctggagaagtttacaaccgaatgggacaatctggcccgctcagacgctgaatctaccgcggtgcacttggaagctctcaagaagcttgcacttgcgctgcaggaaaggaaatacgctattgaagatttgaaggatcagaagcagaaaatgatcgaacacctcaatctcgacgacaaggagctcgtgaaggagcagacctcccacctggaacagagatggtttcagctggaagatctgatcaagagaaaaatccaggtgtcagtgaccaaccttgaggagcttaatgtggttcagagccggtttcaagagctcatggagtgggctgaagaacagcagcctaacatcgccgaggcactcaagcagtctccaccgcctgacatggcccagaatctgctcatggaccatctggcaatttgttccgagttggaagcaaagcagatgttgctgaaatctctgattaaggatgcggacagagtaatggccgatctgggcctgaatgagaggcaggtaatccagaaagctctgagcgacgcacagagccatgtcaattgcctgagcgacttggtgggccagagaagaaagaagcattttaaggaggattttgacaaagcttgtcactggctgaaacaggctgatatcgtgacatttccggagatcaacttgatgaacgagagctccgaacttcacacccagctagccaaataccagaacattctagagcagagtccagagtacgaaaacttactgctgacacttcagcggacgggccagacaattctgccaagcctaaatgaagtggaccatagttacctgtccgagaaactgaacgccctgcctagacaattcaatgttattgtggcactggccaaggacaagttttacaaggtccaggaggccatactggcacggaaagagtacgcttcactaatcgaactcaccacccagagcctcagcgagctggaagctcaattcctacgtatgtcaaaagttcccaccgaccttgctgtggaagaagcactgtccttgcaggacggatgccgcgcgatattggatgaggtggccggccttggcgaggctgtcgacgagctcaaccaaaagaaggaaggattcagaagtactggccaaccgtggcagccagataagatgctgcatctggtgacactgtatcatagattgaaaaggcagactgagcagcgcgtctcattattggaagatactacttctgcttatcaggaacacgagaaaatgtgccagcagcttgagcgtcagctcaaatccgtcaaggaggaacaatctaaggtgaacgaggaaaccttacccgcagaagagaaacttaaaatgtaccatagccttgccgggtcattacaggatagcggtattgttttgaaacgcgtaacaattcatctggaggatctcgccccccaccttgaccccttggcttacgaaaaagctcgccatcagatccagtcctggcagggcgaattgaagctgttgaccagcgccattggagagactgtaaccgagtgcgaaagccgcatggtacagtcgatagactttcaaaccgaaatgagccgaagtctggactggctgcgtagagtgaaagccgagctgtccggaccggtgtacctggatctgaacctacaggacattcaggaagagatcagaaagattcagatacatcaggaggaggtccagagctcccttagaattatgaacgctctctctcataaagaaaaagagaagttcaccaaagccaaggagctgattagcgccgacctcgaacatagtctcgcagagctgtctgaactggacggcgatattcaggaggccctacgtactaggcaggctactttaacagaaatctacagccagtgtcagcggtactatcaagtatttcaggcggccaatgattggctggaagacgcacaagaactcttgcagctggccggcaacggactcgatgttgaaagtgccgaggagaacctgaagtcccacatggaattcttcagcaccgaggatcaatttcacagtaatctggaagagctgcattccttggttgcaacccttgatcccctcattaagccgaccgggaaggaagatctggagcagaaagtggctagcctggagctacgctcccagcgcatgagtcgggactccggggctcaggcgttggtgtccgtcgtgaatagtttccacgaaaagatagtagctctggaggaaaaggcatctcaattagagaagactggcaacgatgcgagtaaggctactctgagtaggagtatgactactgtatggcagcgatggactcgactgagggcagttgcccaggatcaggaaaaaattctggaagacgccgtggacgaatggaccggtttcaataacaaagttaagaaggcaactgagatgatcgaccaactgcaggataagctgccgggctcatccgcagaaaaagcaagtaaggccgagctgctaacgctcctggaataccacgatacattcgtccttgagttggagcaacagcagtcggcgctggggatgctccggcaacagacactgagtatgcttcaagacggcgccgccccgacacccggcgaggagcccccactgatgcaggagatcaccgcgatgcaggaccgctgtctgaaaatggtcgaaacccagatcaattctgttaagtgctgggtgcaagagaccaaagagtacttgggtaatcctacaattgaaattgacgcccagttggaagagctgcagatactgctgactgaggccacaaaccatcgccagaatatcgaaaagatggctgaagaacagaaggagaagtacctgggcctgtacacaatactcccgtcagaactgagcctgcagctcgccgaggtggccttggatctcaagatccgggaccagatccaggacaaaatcaaggaggtcgaacaatccaaagcaacatcccaggagctgagtagacagatccagaagctggcgaaagacctgacgactatcctcactaagcttaaggctaaaaccgataacgttgtgcaggctaaaacagaccagaaagccgcctcacacctggaggaatacaacgaaatgcttgagctcatcctgaagtggatcgagaaggcaaaggtgctggcccacgggacaattgcctggaacagcgctagccagctgagagagcaatatattcttcaccaaacactcctagaggaatcaaaagaaattgactccgaactcgaggccatgactgagaaactgcaatacttaacaagtgtgtactgtacagaaaagatgtctcagcaggtagcggagttgggccgcgagaccgaggagctcaggcagatgataaagataaggctccaaaatctacaggacgccgcgaaggatatgaaaaagttcgaggctgagctgaagaaactgcaagccgctctcgagcaggctcaagcaaccctgacctcacctgaggtcgggcgattgagcttaaaagaacagctctcccatcgccaacatctcctctccgagatggaatccttgaaacccaaagtgcaggctgtgcaactctgtcagtccgctttaaggataccggaagacgttgtcgctagccttcccctgtgccacgccgccctgaggttgcaagaggaggcctcacggttgcaacataccgccatccagcagtgtaacatcatgcaagaagccgtggtgcagtatgagcagtatgagcaggaaatgaagcatctgcaacagttgattgagggggcccaccgtgaaattgaggataagcctgttgccacgtccaacatccaggaactccaggcgcagatctcaaggcacgaagagttggcacagaaaattaagggataccaggagcagattgcttccctgaacagcaagtgtaagatgctgacgatgaaggcaaagcatgccacaatgcttctcacagtcaccgaagtcgaaggtctggcagaaggcacggaagatcttgacggggagctcctaccaacccccagtgcccacccgtccgtggttatgatgaccgccggtaggtgtcacactttgctgtctccagtcactgaagagagtggtgaagaagggactaattctgagattagttctcctccagcttgtcgtagtccctcccccgtcgccaacaccgatgcatcagtgaatcaagacatcgcctattaccaagccctcagcgctgaacggctgcagaccgatgccgccaagattcacccgtctacttctgccagtcaggaattctatgaacctggactagagccaagcgccactgctaaactaggcgatttgcagcgcagctgggagaccttgaagaacgtgatctcggagaaacagagaacattgtatgaagccttggagaggcagcaaaagtatcaggatagtctgcagtccatctccactaagatggaggccatcgagctgaagctttccgaatcccctgagccagggcggtcgccagagagtcagatggccgaacaccaggctctgatggatgagatcctgatgctgcaggatgagattaatgaacttcagtcatcgctcgcagaagagctggtctcggagtcttgtgaagcagatcccgctgagcaactcgccctgcagagtaccttaaccgtgctggctgagaggatgagtacaatcagaatgaaggcaagtggtaagcgtcagctgctcgaggagaaattaaacgaccaactggaagaacagaggcaggagcaggccctccaacgataccggtgtgaagcagatgagttggatagttggctgttgtcaacgaaggccactctggatactgcgctaagtcccccaaaagagcccatggacatggaggcacagctgatggattgtcagaacatgttggtggagatagagcaaaaagtggtcgctctatcagagctcagtgtgcacaatgagaatctcctgttggaaggtaaggctcacacaaaggacgaagccgagcagctagcaggaaagcttcgacgactgaaagggtctttactcgagctgcagcgggcgctgcacgataagcagctgaacatgcagggcacagcccaggagaaggaggagagtgatgtcgaccttactgcgacacaatcacccggagtccaggagtggctggcacaggctcggactacttggacccagcagagacagagttcgctgcagcagcagaaggaattggagcaggaattggccgagcagaaatcgctgctgcgctctgtcgcaagccgtggcgaggagatcttaatccaacatagtgctgccgagacctctggcgatgccggcgagaaacctgatgtgctgagccaggagctgggtatggaaggcgagaagtccagcgccgaagaccagatgcgcatgaaatgggagtcattgcatcaggaattcagtaccaaacagaagttgttgcaaaatgtgttagagcaggagcaggaacaggtgttgtactctcgcccaaaccgcctgctcagcggtgtacctctctataaaggcgacgtacccacacaagacaagtcagcagttactagtctccttgatggccttaaccaagccttcgaggaggtgtctagccagagcggcggcgcgaaacgacaatctattcacctcgaacagaaactctatgatggagtcagcgcaaccagcacctggctcgacgatgtagaggaacgccttttcgttgcgaccgccctgcttcccgaagaaacagagacctgtcttttcaatcaggagatcttggcaaaggacattaaggagatgtcggaggagatggataagaataaaaaccttttctcacaggccttcccagagaatggagacaatcgcgacgtgatcgaggacacactgggctgcctgttaggccgcctgtctctgctggactccgtcgttaaccagagatgccatcagatgaaagaaagactccagcagattcttaatttccaaaatgacttaaaagtgctgtttactagtctggcagacaataagtatattatcctccaaaaactcgctaatgtcttcgagcaacccgtggctgaacagatagaagcgattcagcaagcggaggatggcttgaaagaatttgatgctggaataattgagctgaaacgtcgtggggacaagcttcaggtggaacagccttccatgcaagaactgagcaaattacaggatatgtatgacgagctgatgatgatcattgggagcaggcggtcaggtcttaatcagaacctgacccttaagtcgcagtatgaacgcgcactgcaagacttggcagacctattggaaaccggacaggagaaaatggcgggcgatcagaaaattattgtgagttcaaaggaggagattcaacagttgttggataaacacaaggaatactttcaaggactagagagtcatatgatccttaccgagaccctctttcgcaaaattatctcctttgccgttcaaaaggagacacaatttcacacggagctcatggcacaagcctctgctgtgttgaagagagcacataaacgaggggtggagcttgagtacatcctggaaacctggtcacacctcgacgaggatcagcaggagctttcccgccagcttgaggttgtcgaatctagcattccgtcggtgggtttggtggaagaaaatgaggacaggctgattgaccgcattacgctctaccagcacctgaaaagttccttgaacgaataccaacctaaactgtaccaggtactggacgacggaaaaagactccttatttcaatttcctgttccgatctggaaagtcaactgaatcagctcggcgaatgctggctttctaatactaataagatgtctaaagaactgcaccgtttagagacgatcttgaagcactggaccaggtaccaatcggagtctgctgatctgatccattggttacagagcgccaaggatcgcttagagttctggacacagcagtccgtcacggttccgcaagaattggagatggtgcgcgaccatcttaacgcctttttagaatttagcaaagaagttgatgcccagtcatccttaaaaagcagcgtgttaagtacgggaaatcaactattacggcttaaaaaggttgataccgcaactctgagaagcgagttgtctcggattgattcccagtggactgacctcctcactaacatccctgctgtacaggagaaactccaccagctgcagatggataaactgcctagtagacatgctatctccgaggttatgagctggatatctttgatggaaaacgtgattcagaaagatgaagataacatcaaaaacagcattgggtataaggctattcacgagtatctccaaaaatacaagggttttaagatcgatatcaactgtaagcaattaacagtggactttgtgaaccagagcgttctgcagatctctagtcaagacgttgaaagtaagcggtcagacaaaaccgactttgccgaacagctcggtgccatgaataagtcgtggcagattttacaggggctggtgactgaaaagattcagctgctggaaggacttttagagagttggagcgagtatgaaaacaatgtgcagtgcctgaaaacctggtttgagacacaggaaaagagactcaagcagcaacatagaataggcgaccaggcttcggtgcaaaatgccttgaaggattgtcaagacttggaggatctgatcaaagccaaggaaaaggaggtcgagaaaattgagcaaaacgggctggccctcattcagaataagaaggaggacgtgtcatccatagtgatgtcaacactccgagagctcggacagacctgggcaaacctggaccacatggttggccagcttaagatcttactcaagtctgtcttggatcagtggtcttctcacaaggtggcgttcgacaaaattaactcatatcttatggaggctcggtattccctgtcaagattccgactcctgacgggcagcctggaagccgtgcaagtccaggttgataacctccagaacctacaggatgatcttgaaaagcaagagcggagcctccagaaatttggaagcataacaaaccagctcctgaaagaatgccacccaccggttaccgagactctgacaaataccctcaaggaggtgaacatgcgatggaataacctgcttgaggagattgctgagcagctgcagtctagcaaggctctgttgcagctatggcagcgttataaggattattccaaacagtgcgccagcactgtgcagcagcaggaagatagaactaatgaactccttaaggccgctaccaacaaggacattgctgacgatgaggtcgccacatggatccaggattgcaatgacctcctcaaaggcctcggtacagtcaaggatagtctattctttttgcatgaactcggggagcagttgaaacagcaggttgacgcgagcgctgcttctgctatacagtcagaccaactgtccctctcacagcatctgtgtgcacttgagcaagcactgtgcaaacagcagactagcctgcaggccggagtcctggactatgaaacattcgctaagtccctagaggctctggaagcctggatcgtcgaggcggaagagatcctccaggggcaggatcccagccatagcagtgacctcagtaccatccaagaacgcatggaggagctgaaagggcaaatgctgaagttctcatcaatggcccccgatcttgataggttgaatgaactgggatataggctgcctctgaatgacaaggagattaagaggatgcaaaacctgaaccggcattggtctctgatctctagtcaaactacagagcggttcagcaagctacagtctttcctcctgcagcatcagacgtttcttgagaaatgtgagacatggatggagtttttggtacaaactgagcagaaacttgcagtggagataagcggtaattatcagcatttactggagcaacaaagggctcatgagctgttccaagcagagatgttttcccgccagcagatcctccactcaatcattatcgatggacagcgtctgctcgagcagggccaggtggatgaccgtgacgagttcaacctcaaattgactcttctttccaatcaatggcagggggtcattaggcgtgcacagcagcggagaggaatcattgactcacagatccgacaatggcagcgatatcgcgaaatggccgagaaactgagaaaatggctcgtcgaagtgagctatcttcccatgagcggcctcgggagcgtgccaatcccactgcagcaggccagaactctcttcgacgaggtacagttcaaagaaaaggtcttccttcgccagcaagggagctacattctgaccgtggaagccgggaagcaactcctcctgtccgctgactcgggcgcagaggctgctttacaggcggagctggcagaaattcaggaaaaatggaagtcagccagtatgcgccttgaagagcagaagaagaaactcgcttttctgctgaaggattgggagaagtgtgagaagggcattgccgactctctggagaagttgaggacctttaagaagaaactgtcccagtctctgccagatcatcacgaagagctgcatgcggaacaaatgcggtgcaaggagctggagaacgcggtgggctcttggactgacgacctcacgcagttatcactgcttaaagacactctgtctgcctacatttcggcagatgacatctccattctaaatgagcgcgtggagcttctgcagcgtcagtgggaggaactctgccaccagctgagcctcaggcgccagcagattggcgaaagactgaatgagtgggcggtgttctccgagaaaaacaaggagctgtgcgagtggctgacacaaatggaatctaaagtgagtcaaaacggagacattctgatcgaggaaatgatcgaaaagcttaagaaggactaccaggaggagattgccattgcccaggaaaataaaattcagcttcaacagatgggggagcgactggctaaggcctcacacgaaagtaaggcgtcagaaatcgagtataagttaggaaaggttaacgaccggtggcagcacctccttgatttaattgccgcacgggttaaaaagcttaaggagacccttgtcgcggtgcagcagttagacaagaacatgagcagcctgcgaacttggttggcgcatattgaaagcgaattggcgaagccaattgtctatgactcttgcaattctgaggagatccagcgcaaactgaatgaacagcaggagttgcagagggatatcgaaaagcactccacgggcgtggcttccgttctcaacctctgcgaagtgttactccacgattgtgacgcttgtgccaccgatgctgagtgtgatagcattcaacaagccacccgcaacctagacagaaggtggagaaatatatgcgccatgagtatggagcgtcgtcttaaaatcgaggagacctggaggttatggcagaaatttctggatgactattcaagattcgaggactggcttaaatcttccgaacgcacggctgcctttcctagtagcagtggggtgatttataccgtcgcaaaggaggagctgaagaagtttgaggccttccagcgccaggtccatgaatgcctcactcaattggagctgatcaacaaacagtaccgtaggctcgctcgcgaaaacaggactgacagcgcttgcagccttaagcagatggtgcacgagggcaaccagcgttgggataacctccagaagcgcgtgacgtctatattgagacgcctgaagcactttattgggcagcgggaagaattcgaaacagccagagattctattttagtgtggctcacagagatggacctgcagcttacaaacattgagcatttttcagagtgcgacgttcaggctaaaatcaaacaactgaaagcattccaacaggagatcagtctgaatcataacaagatagaacaaatcatcgcccagggcgagcagctgatcgagaagtcagaacctttagatgccgcaatcatcgaggaggaactggacgagttgcggagatattgccaggaggtgttcggccgcgttgagaggtaccacaaaaagctaattaggctccccctgcccgatgatgagcatgacctgtcagatcgggaactggaacttgaggattcagccgctctaagcgatttgcactggcatgacagaagtgcagactcactgctctctcctcagccatcctcgaatctgtcattatcactggcgcagcccttgcggagcgagcgctcaggccgggacaccccagcctctgtcgatagcatccccctggagtgggatcacgattacgacctgtcgcgggatttggaatccgcaatgtcccgagccctgccatctgaggacgaagaagggcaggatgataaggacttctacctgcggggagcagtgggactgtccggcgaccacagtgccctcgaaagtcagatcagacagctgggtaaagccttggatgactcacggtttcagatccagcagactgaaaatattattagatccaaaacaccaacgggtccagaactcgacacgtcttacaagggatacatgaaactccttggtgaatgctcttctagtattgacagcgtgaaacggcttgaacacaagctcaaggaagaggaggagtcgctgccagggtttgtaaatctccattcaaccgagacgcagaccgctggggtgatcgataggtgggaattgctccaggcccaggccttgtctaaggaattgcgcatgaagcagaatctgcaaaagtggcaacagttcaattcagacctgaattctatttgggcttggctcggcgatacagaagaagaactagagcagctacaacgtttggaactgtccacagacatacagactatagaactccagataaagaagctgaaggagctccagaaggctgtggaccaccgtaaggcaattatactgtcgattaacctgtgttctcccgagttcactcaagcagactccaaagagtcccgggacctgcaggaccgtctaagccagatgaacggccgctgggatcgcgtctgctcgctcctggaggagtggaggggattgctgcaggatgctctgatgcagtgtcaagggttccacgagatgtctcacgggctgctgttaatgctagagaatatcgaccgacgcaagaacgaaatcgtgcctattgactccaatctggacgccgaaattctgcaagatcaccataagcaactgatgcagataaaacacgagttgctggaatcccagcttcgggtggcctcactgcaagacatgtcctgccagctgcttgtcaacgcagagggcaccgactgtttggaggccaaggaaaaggttcacgttatcggcaatcgcctgaaattactacttaaggaggtgtcccgccatatcaaagaacttgaaaagttgcttgatgtcagctccagccagcaggacctgtcatcttggagttccgcagatgaattggatacgagcggtagtgtttcaccgacatctggcaggtccaccccgaacaggcagaaaacgcccagggggaaatgtagtctgtctcagccaggacctagtgttagttccccgcactctaggagcacgaagggcgggagcgattcgagtctatcagagccaggcccaggtcgatctgggcgggggttcctgttcagagttctgagggcagctctccccctccaactcctgcttcttcttctcatagggttagcttgcctagtgcctatgtccgaggaggactactcttgtgccttatctaacaattttgccaggagcttccatcctatgctcaggtacaccaacggacctccgccactatag

SEQ ID NO: 206668 - DNA, 9966 bp, synthetic construct
  misc_feature 1..9966: note = Description of Artificial Sequence: Synthetic coding sequence
  source 1..9966: mol_type = other DNA
atggagctggacgccgccgtgcagaagttcctggagcagaacggccaattaggcaagcctctagctaagaagatagggaagcttacagagttacatcaacagacaatccgacaggcagagaatcggctttctaagctgaaccaagccgcttcccacctggaggaatacaacgagatgctcgaactcatactgaagtggattgaaaaagctaaagtgctagcgcatggcacaatcgcttggaacagcgcctcccagctgagggaacagtatatcctccatcagacactacttgaagagtctaaggaaatagacagcgaactcgaagccatgactgagaagcttcagtaccttacctctgtgtactgcaccgagaagatgagtcagcaggtggccgagctgggtcgcgagaccgaggaactccgccagatgatcaaaatccggctgcagaatctccaggacgcagctaaggatatgaaaaaattcgaggccgaacttaagaagctgcaggccgccctcgaacaggcccaggcgactttgacatcccccgaggtagggcggctgtcgctgaaggaacagctatctcaccgccaacacctcctgtccgagatggagtccctgaagccaaaagtgcaggcagtgcagctctgccagtccgcactgcgtattcccgaagatgttgtagcttccctgccgctttgccatgccgcactcaggctccaggaggaggcgtctcggctacagcatactgccatccagcaatgtaacattatgcaagccgcggtcgtgcagtatgagcagtacgagcaggaaatgaaacatctgcaacaattaattgaaggagcccaccgggaaattgaggataaacccgtcgccactagtaatatacaggaactgcaggctcaaatctctcgccatgaggaattggcacagaagatcaagggctaccaagaacaaattgcttctctcaattctaagtgtaaaatgttaacaatgaaggcaaagcatgcgacgatgctgttgacagtgaccgaagtggagggtctggcggagggaaccgaagatctggatggagagctgcttcccacgccctccgcgcatccgtccgtggtgatgatgaccgccggtcgatgccacaccttgctgagccccgtgacagaagaaagcggggaggaggggaccaattccgagatctccagcccaccagcttgccggagcccctccccggtggcaaacacagatgccagtgtaaaccaggacatcgcatattaccaggctttatccgccgaaagattacaaacggatgccgccaagattcaccccagtacgagcgcatctcaggaattctacgaacccggactggaaccaagtgctacagccaagctgggagacctccagaggtcttgggagaccctgaagaacgtgatctctgagaaacagagaactctgtacgaagcccttgaacgacagcaaaagtaccaggatagtcttcagtccatcagcacaaaaatggaggctattgaactgaagctttcagagtccccagaacccggaaggtcacccgagtcacagatggctgaacatcaagccctgatggacgaaatccttatgctacaggacgaaatcaacgaacttcagtcctcactcgccgaggaacttgtgtcggagagctgcgaagctgaccccgcggaacagctcgccctccaatccacccttacagtgctcgccgagcgcatgtctacaatccggatgaaagctagcgggaaacgacaactgctcgaagagaagcttaatgaccagctcgaagagcaacgccaagagcaagctctgcagcggtatcgatgtgaggccgatgagctggatagttggctgctctcaacgaaggcgaccctggacacagcactgtctccccccaaggagccaatggatatggaggcccaattgatggattgccagaacatgctggtcgaaattgaacaaaaggtggtggctcttagcgagttatccgtgcacaatgagaatttgttgctggaggggaaagcccatacaaaagatgaggccgagcagttagctggcaagctgagacgattgaagggaagtctgctggagcttcagcgggctctacatgataagcagctaaacatgcagggtactgcccaggaaaaggaggaatctgatgtggatttgacagccacccaatcccctggcgtgcaggaatggctggcgcaggcacgcaccacttggacgcagcagagacagagcagcctccagcaacagaaggagctcgaacaggagctcgccgagcagaagagcctgctgcggagtgtggctagccggggagaagagatccttattcagcacagcgcagccgagaccagcggcgatgccggtgaaaagccggacgttctcagtcaggagctaggcatggagggtgagaaaagctcagccgaggatcaaatgcggatgaagtgggaatctttgcatcaggaattcagtactaagcaaaagctgctccagaatgtcttagagcaggagcaggaacaggtgctatacagcaggccaaacagattgctgagcggcgtgccactctataaaggtgacgtccccacacaagataaatcggccgtcactagccttctggatgggctgaatcaagcattcgaagaagtttcctcacagagcggaggggcaaaaaggcagtccatacatttggaacagaagctgtatgatggcgttagcgccaccagtacctggctggatgacgtggaagagcgattattcgtggcaacagccctcctgccagaggagaccgaaacttgtctcttcaaccaggagatcttggcgaaagacataaaggagatgtctgaggaaatggacaaaaacaaaaatctgttttcacaggctttcccagaaaatggggacaaccgagatgtgatcgaggacactttgggatgtctgctgggaaggctgagcttgctggacagcgtagtgaaccagagatgccaccaaatgaaagagaggcttcagcaaattttgaactttcaaaatgatcttaaagtcctcttcacatctcttgctgacaataaatacatcatcctgcagaagttggccaatgtgttcgagcaacccgtcgccgagcagatcgaagccatccagcaggcggaggatggactcaaggagtttgacgccgggatcatcgagctcaagcggcgaggagacaagctgcaggtggagcagccatccatgcaggagttaagcaaactgcaggacatgtatgacgagctgatgatgattataggctctcgcagaagtggattaaaccagaatctgacattgaaatcccagtatgaacgcgcactccaggaccttgctgacctactcgagaccgggcaggaaaagatggctggtgatcaaaagatcatcgtgagctccaaagaggagattcagcagctgttggacaaacacaaggaatatttccaaggactggagagccatatgatccttaccgaaaccctattccggaagattatctctttcgctgttcagaaagaaacgcagtttcacaccgaactgatggcccaggcctcggccgtactcaaaagagctcacaagcggggcgtggagctcgagtatatccttgaaacttggtcccacctggatgaggaccagcaggagctgtcgcgacagctagaggtggtggagtcatccataccctccgtgggcctggtggaagaaaacgaggatcgcttaatcgacagaatcacactgtatcagcatttgaagtcctcattaaacgagtaccagcccaagctgtaccaggtcctggatgacggcaagagattactgatttctatctcctgttctgatttggagtctcagttaaaccaactgggagagtgctggctctccaatactaataaaatgagcaaggaactgcataggttggagacaatcctgaagcactggacccgctaccaaagcgaaagcgccgacctcattcactggttgcagagtgcgaaggatcggctggagttctggacacagcaaagtgtaacagttccccaggaactggaaatggttcgcgaccatcttaacgcttttctcgaattctctaaggaggtggatgcacaatcttccctaaaatcttctgtcctcagcactggaaaccagctcctacgtctaaagaaagtggacaccgcgaccctacggtcagagctgagtagaattgattcgcagtggacagatctcctcacaaacattccagcagtccaagaaaaattgcaccagctccagatggacaaactgccgtcgagacacgcaatttcagaggtgatgtcctggatctctttgatggagaatgttattcagaaagacgaagacaatatcaagaatagcatcggctacaaggcgattcatgagtatctgcagaaatacaagggcttcaaaattgatatcaactgtaagcagctcactgtggactttgtcaaccagtccgtcctccagatttcctcccaagacgtggaaagcaagagaagcgataagaccgattttgccgagcagctgggcgcgatgaacaagagctggcaaatcctgcaaggtctggtcacagaaaagattcaactcctggagggactcctcgagagctggtccgagtacgaaaacaacgtacagtgcctgaagacttggtttgaaacacaagagaaaagactcaaacagcaacatcgaataggtgaccaggcctctgtgcagaatgctttgaaagactgtcaagatttggaggatctcatcaaagccaaagagaaagaagtggagaaaatagagcagaatggtttggccctgattcagaataagaaagaagacgtgtctagcatcgtaatgagtactctgagggagttgggccagacttgggcgaacctcgatcatatggtgggccaattaaaaattctgctaaaatctgttctggatcagtggtccagccacaaggtggcttttgataaaattaactcctacttgatggaggcccgatactcactcagccgctttcggttgctgactgggtccctggaggccgtccaggttcaggtcgataacctgcagaacctgcaggacgacctcgagaagcaagagcgcagccttcagaaattcggcagtataaccaatcagcttctgaaagagtgtcatccccctgtgactgagactctgacgaatacccttaaagaggtgaacatgcgctggaataacctgctggaagaaatcgccgaacagttgcagtcctctaaggctctgctccaattatggcagagatacaaggactattccaagcaatgcgcctcgacagtgcaacagcaggaagaccggaccaacgagctactcaaggccgctaccaacaaagatattgccgatgatgaggtggccacttggattcaggactgtaatgacttactcaaaggattgggcaccgttaaagatagtctatttttcctgcacgaactgggggaacagctaaagcaacaggtcgatgcatcggcagctagtgccatccagtccgaccagctctccctctctcagcacctatgcgctctggagcaggccctgtgcaaacagcaaactagcctgcaggccggagtccttgattacgagacttttgctaaatccttagaggccctggaggcgtggatcgtcgaagccgaagagattctacagggccaggacccatcccactccagcgacctctccactatccaagaacgtatggaggagttgaagggacagatgctaaagttttcaagcatggctccggatctcgaccgtctaaacgaattgggctaccgcttaccgctgaacgacaaagagatcaaacgcatgcagaatctgaacaggcattggtccctcatatctagccagacaaccgaacggttctccaagctgcagagctttctgctacagcatcagaccttcttagagaagtgtgaaacttggatggagttcctggtgcagaccgagcagaaactggctgtggagattagtgggaactatcagcacttgctggaacagcagagagcacacgaactgttccaggccgaaatgttttcgcggcaacagatcctgcactccatcatcattgacggccagcgactgctggagcaaggccaggtggacgaccgagatgagtttaaccttaagcttacactgctttcaaaccagtggcagggagtgatcaggagagcccaacagagaagaggtatcatcgatagccaaatacgacagtggcaacggtatagggaaatggctgagaaactgaggaagtggttggtggaggtgagctacctacccatgagcgggctgggcagcgttcccattccactacagcaggcaaggacactgtttgatgaagtgcagtttaaggaaaaggtgtttctgagacagcaggggtcatacatcctgactgttgaagcaggaaaacagctgctgctgtccgcagattccggcgcagaggctgcgcttcaggccgaactggccgagatccaggaaaagtggaaatctgcttcaatgagattggaggagcaaaagaaaaaactggcatttctcctgaaggactgggagaagtgtgaaaaaggcatagccgattccttggaaaaacttaggacctttaagaagaagcttagtcaaagtcttccagatcatcatgaggagctccacgctgaacaaatgaggtgcaaggagcttgaaaatgcagtgggctcatggaccgacgacttgacacaactgtctctgctaaaggacacgctatctgcatacatcagcgccgacgacatatccattctcaacgaacgggttgaattactacagagacagtgggaggaactgtgtcaccagctttcactgcgccgacagcagatcggagagcggctaaatgaatgggccgtctttagcgaaaagaacaaagaactttgcgagtggctgactcagatggaatctaaagtgtcccagaatggagacatcctaatagaagagatgatcgagaagttgaaaaaggattatcaggaggaaatcgcaattgcccaagaaaacaagatacagctccagcagatgggggagcgcctcgccaaggcttcccatgagagcaaggcctcagaaattgagtataaacttggcaaagtcaacgatcgttggcagcacctccttgatctgatcgccgcccgagttaagaaattgaaggagaccttggtggctgtgcagcagcttgataaaaatatgtcaagcttacgaacttggctggctcatatcgaatctgaactggccaagccaatagtgtacgactcatgtaatagtgaagaaattcagcgcaagttgaacgagcagcaggagctgcaacgggacattgaaaaacactctaccggcgtggcttcggtgttaaatttgtgtgaggtattactgcatgactgtgacgcctgcgcgaccgacgcggagtgtgattctattcagcaggcgactcgcaacctcgatcggagatggcggaatatttgcgccatgtccatggaacggagactgaagatcgaggaaacatggaggttgtggcaaaagttcctggatgattacagtagatttgaggactggctgaaatcctctgagcgcacggcggccttcccctctagctccggagttatctatactgtcgctaaagaagagttaaaaaaattcgaagcatttcagcgacaggttcacgaatgtcttacccagctcgagcttattaacaaacagtaccggaggctggctcgggagaaccgcaccgacagcgcctgcagtctgaaacagatggttcacgaaggcaaccaaagatgggacaatcttcagaagagagtgacatctatactacggagactgaaacactttatcggtcagcgggaggaatttgaaaccgctcgcgatagtattttggtgtggctaaccgagatggacctacagctgacgaacattgagcactttagcgaatgtgacgtgcaggccaagattaagcagctcaaggcgtttcagcaggagattagcttgaaccacaacaagatcgagcagatcatcgctcaaggagaacagctcatagagaagtcagagccgttggatgccgctatcatcgaggaggaactcgacgagcttagaaggtactgtcaggaggtgttcggacgggtcgagcggtaccataaaaagctaatcaggctgcccttgccagatgacgagcatgacctgagtgacagagaattggagctagaagattcagctgccctgtctgacctgcactggcatgaccgaagtgcagactcacttctgagccctcaaccttcctcaaacttgagcctttcattggcacaaccactccggtccgagcgctccggaagagacactcctgcgtccgttgactccatcccacttgagtgggaccatgactatgatctcagccgtgacctggagagcgccatgtccagagccctgccgtctgaagatgaagagggccaggatgacaaggacttctacctccggggcgccgttggactgagcggcgatcacagtgccctcgagagtcagatcaggcagctcggcaaggctctcgacgattcaaggtttcagatccaacaaacagaaaatatcatccggagcaaaaccccaaccggccccgagcttgacactagctataaaggctacatgaaactgttgggagaatgctcttcatcaattgattctgtgaaacgcctagagcataaactgaaagaagaggaagagtctctgccagggttcgtcaatctgcactctacggagacacagacagccggcgtaatagaccgctgggagctgctgcaagcccaagccctgtcaaaggagttacgaatgaagcagaacctgcagaaatggcagcaatttaactccgatcttaactctatttgggcctggcttggagataccgaggaagagctcgagcagctacagcggcttgagctgagcaccgacatccagacaatcgaactgcagatcaagaagctgaaagagctgcagaaggccgtggatcaccgcaaagcgataatcctgtccatcaacctttgtagccctgagttcacacaggctgatagtaaagaatcaagagatctgcaggaccggctgtctcagatgaatggccgttgggaccgggtctgcagtctgctggaggaatggagaggactcctgcaggatgcactcatgcagtgtcagggcttccatgagatgtctcatgggctgctgttgatgttggaaaacatcgacaggcggaagaacgagattgttcctattgatagtaatctggatgcagaaatacttcaggatcaccacaaacagctaatgcagataaaacacgagctactggagagtcagctgagggtcgcgagtctccaggacatgtcttgccaactgctggtcaatgcagagggaactgactgccttgaagcaaaagaaaaagtgcacgtaatcggcaatcgcctgaagctgctgctaaaggaggtttcgcggcatattaaagagcttgagaagctcctcgacgtctcgagcagccagcaggacttatccagttggagctccgccgacgaactcgatacctccgggtcggtgtcgccgacttctggcagatcaacccctaacagacaaaagaccccacgtgggaagtgctctttgagccaaccaggccccagtgtatcatcccctcacagccgatcaactaaaggcggctctgactcatccctgtctgagcccgggcccggcagaagcggccggggtttcctgtttagagtgttgagagcagccctgcccctacagcttctgctgctgctactcatcggactcgcttgtctagtaccgatgagtgaggaagattatagttgtgctctttctaacaacttcgcacgatctttccacccaatgttgaggtacactaacggccctcctccattatag

SEQ ID NO: 206669 - DNA, 2934 bp, synthetic construct
  misc_feature 1..2934: note = Description of Artificial Sequence: Synthetic coding sequence
  source 1..2934: mol_type = other DNA
atggtggtggccgaggacctgagcgccctgcggatggccgaggactcctgcgtcgacgctgacctacccgactgcaactgtgatgtgacaaggcagcgggtcaaaaaactgaaagagactttggtcgctgtccaacagctagataagaacatgtcaagtcttagaacctggctcgcgcacatcgaaagcgagctggcaaaaccaatcgtatacgattcatgcaactctgaggagattcagcgcaaattaaacgaacagcaagaactgcagcgcgatatcgaaaagcattccacaggcgtggcgtcggtcctgaatctgtgcgaggtactcttacatgactgtgacgcctgcgccactgacgcagagtgcgacagcatccagcaggccaccagaaatctggacaggcgctggaggaacatttgcgctatgagtatggaacggcgattgaagatagaggagacttggcggttgtggcagaaatttctagacgactacagtcgtttcgaagattggctgaaaagctctgagaggaccgctgccttcccgtcgagctcaggcgtcatttacaccgttgcaaaagaggaactcaaaaagtttgaagcattccaaaggcaagtgcatgagtgtctgacacagttggagctcataaataagcagtatcggcgtctcgcaagagagaataggaccgatagcgcttgttcacttaaacaaatggtgcacgaaggaaaccaacgatgggataacttgcagaagagagtcacttccatactaagacggctcaaacattttattggccagagggaggagtttgaaactgcaagagattcaattctggtgtggctgacggaaatggacctgcaactgacaaatatagaacactttagcgagtgcgacgtacaagccaagatcaaacagctcaaggcgtttcagcaggaaatcagcctcaatcacaataaaatcgagcaaatcattgctcagggagagcagcttatagaaaagagcgagcctttggatgctgcaatcatcgaggaggagctggatgagcttcggcgctactgtcaagaagtgtttggcagagtggaaagataccataagaagctcattcgcctcccattgccggacgacgagcacgacctgagcgatagggaactcgaactcgaggattcagcagccttatctgatctacattggcacgaccggagcgccgactccctcctgtcacctcagccttcctctaacttgtccctctcattggcccagcccctccgctctgaacggtccggccgggacaccccagcttctgtagacagcatccctctagagtgggaccacgactatgatctttcacgggacctcgagtcagcgatgtcccgtgccttgccttctgaggacgaagagggtcaagacgacaaagacttttacctgaggggggcagtgggtttgtccgacgtgatgatcccggagtcaccagaagcctacgtgaaactgaccgaaaacgccatcaagaatacaagtggggatcattcagccctggaaagccagatccgacagcttggtaaagcgctcgatgactcgagatttcagatccagcagaccgagaacattattcgaagtaagacccctacaggccccgagctggacacatcctacaaaggatatatgaagctactcggagagtgcagtagtagtattgactccgtcaagcgtctcgaacacaaactcaaagaggaggaagaaagtctccctggcttcgtcaacctccattccacagagacccagacagccggggttatcgaccgatgggaactactgcaggcccaggccctatctaaggagcttcggatgaagcagaatctgcagaagtggcaacagtttaactcagatctgaacagcatttgggcatggttgggcgatactgaggaagaactggaacaactccagcggctggaattgtctaccgatattcagactatcgaactgcagatcaagaaactgaaagagctgcagaaggcagttgatcaccgcaaggccatcattctctccatcaatctctgttcccccgagtttacccaggccgactcgaaggagtctcgggacttacaggacagactatcccagatgaatgggaggtgggaccgggtgtgtagcctgctggaggagtggcggggcctcctgcaggatgccttgatgcagtgccaaggtttccacgaaatgtctcatggacttctgttgatgcttgagaacattgacagaaggaagaatgaaatcgtgcctatcgattccaacctggatgctgagatactccaagatcaccacaagcagttgatgcaaataaaacacgagttgctggagtctcagcttcgggtcgcatcactccaggacatgtcatgccagttattagtcaacgcggaaggaactgattgcctagaggcaaaggagaaagttcacgtgatcgggaacaggttaaagctcctgctgaaggaggtgtcaagacacattaaagaacttgaaaagctactagacgtaagtagctcacaacaggatctctccagttggtcgtcggcagacgaacttgatacgtcagggagcgtcagccccacaagcggacgctccactccaaaccggcagaaaacaccgagaggcaagtgttctctgtcccaacccggcccctcagtgtcatctcctcactcacgctctacgaagggaggctctgactcatcactctctgagcctggcccaggtagatctggtcgggggtttctttttcgggtgcttagggcagcgcttcccttgcagctactcctactgctgttaataggtctcgcctgtttggtgcccatgtccgaagaagactatagttgtgctctctctaacaacttcgccagaagcttccatcccatgctgaggtatacaaatggtcctccacccctctag

SEQ ID NO: 206670 - DNA, 26394 bp, synthetic construct
  misc_feature 1..26394: note = Description of Artificial Sequence: Synthetic coding sequence
  source 1..26394: mol_type = other DNA
atggccaccagccggggcgccagccggtgcccccgggacatcgccaatgtcatgcagagactgcaggatgagcaggaaattgtccagaaaaggacatttacgaaatggatcaactcccacttagccaagcgaaaacctcctatggtagttgacgatttgtttgaggatatgaaggatggagtgaaactacttgccttactagaggtattgagcggccagaaactcccatgtgaacaaggccgccggatgaagaggatccacgcagtggcaaatattggtaccgcactgaaatttctggagggccggaaaattaagctcgtgaacattaattccacagacattgcggacggtcgtccttctatcgtgctgggccttatgtggactatcattttgtacttccagattgaggagctcacctccaacttgccccagctgcagtctctgtcatcttcagcatcctcggtggactctatagtgagctcggagacaccatcccctcctagcaagcgcaaggtgacaaccaaaattcagggaaatgcgaagaaagctttacttaagtgggttcagtacacggccggcaagcagaccggtattgaggttaaggatttcggtaagagctggaggtctggagttgcctttcattctgtcattcacgctatccgccccgaattggtggatctcgagactgtgaagggccgtagcaaccgggagaacctcgaggatgcatttacaatcgctgagacagaacttgggattccccggctgctcgacccagaggatgtcgacgtcgataagccggacgagaaaagcattatgacttatgtggcccagttcctcaagcactatccagatatccacaacgctagcacagatggccaggaagatgatgagatactcccaggctttccttctttcgccaacagtgtgcagaacttcaagcgagaagacagagtgatattcaaagagatgaaggtgtggatcgaacagtttgaacgagacctgacgcgggcccagatggtcgagtccaatctgcaagataagtatcagtctttcaaacactttcgcgttcagtacgaaatgaagaggaagcagatagaacatctgattcaacctctgcatcgggacggaaagctgagtcttgatcaggccctggtgaagcagtcctgggaccgggtgaccagtagattgttcgactggcatattcagctggacaaaagtctgcctgcaccgctgggcacaatcggagcctggctttatagagccgaggtggccctgcgagaagagatcacagttcagcaggtgcatgaggagactgccaatactattcagcgcaaactggagcaacacaaagacctgctgcagaacaccgatgcccacaagagggcattccacgaaatctacagaactagatctgtgaatggcatcccagtacctcctgaccaacttgaagacatggcagaacgatttcactttgtgagttctactagtgaactgcacttaatgaagatggaattcctggaacttaagtatcggcttttatccctactagtgctagccgaaagtaagctaaagtcatggatcattaaatacggccgaagggagagcgtcgaacagctgcttcaaaattatgtgtctttcatagaaaattcaaagtttttcgaacagtacgaagtgacctatcagatcctaaaacagaccgccgagatgtacgtgaaagctgacgggtccgtagaggaggccgaaaacgttatgaagtttatgaatgaaaccacggcccagtggcgtaacctctcagtggaagtgaggagcgtccgtagcatgctggaggaggtaattagcaactgggaccggtacggcaataccgtcgcgtctctgcaggcgtggctggaggatgcagagaagatgctcaatcaaagcgaaaacgcaaaaaaagatttttttcggaacttgcctcattggattcagcagcatacggccatgaatgacgctggcaatttcctgattgaaacatgcgatgagatggtcagcagagacttgaaacagcagctccttctgctgaatggacggtggagagagctgttcatggaggtaaagcagtatgcacaggctgacgaaatggacaggatgaaaaaagagtacacagactgtgtagtgactctgagtgccttcgctacggaagcgcataagaagctgtccgagccactggaggtctccttcatgaatgtgaaacttctgatacaggacttggaggatatcgagcagcgggtgccagtgatggatgcacagtacaagattattactaagactgcccatctgattacaaaagagtcacctcaagaggagggaaaagagatgtttgctaccatgtccaaattaaaagagcagcttactaaggtcaaagagtgctactcacccctgctctatgagtctcagcaactgttgatcccactcgaagaactggagaagcagatgacttctttctacgactctttgggaaagataaatgaaatcattactgtgctggagagggaggcacagtccagtgccctgtttaagcagaaacaccaagaactgctcgcgtgccaggagaactgcaagaaaacattaacactaatcgaaaaggggagccaaagcgtgcaaaaattcgtgaccctttccaacgttcttaaacactttgaccagactcgtctacagcgtcagatagctgacatccacgttgcattccagagtatggtaaaaaagaccggggattggaaaaaacacgtcgaaactaactcccgtctcatgaaaaagttcgaggagagtcgagccgaacttgaaaaggtgcttcggatcgcgcaggaggggttggaggagaagggagatcctgaggagctgcttcgacgccatactgagtttttttcccagctcgatcaacgagtccttaatgcatttctaaaggcttgtgatgagctcacagacatactgccagagcaagagcagcaaggcttacaagaggcagtaaggaaactgcataagcagtggaaggatctgcagggtgaggccccctaccacctcctgcatctaaagattgatgtcgaaaaaaaccgattcctagcttcagtcgaggagtgtcgtactgagctggaccgtgagaccaagctcatgcctcaggaaggcagcgagaaaatcatcaaagagcatcgagttttctttagcgataaaggaccacatcacttatgcgaaaagcgcctacagctgatcgaggagctctgtgtcaaattaccagtgagagatcctgtcagggacacgcccgggacctgtcacgtgaccctgaaagagctcagagccgcaatagattcaacctaccggaagctgatggaggacccagataagtggaaagattacacaagccggttttctgagttttcgtcttggattagtaccaacgaaacacaactgaagggaatcaagggcgaggcgatcgatacagcaaaccacggagaagtcaaacgggccgtggaagaaattaggaatggcgttaccaagaggggcgaaacattatcttggctgaagtccaggttgaaggtactgacagaagtgagctccgaaaatgaagcgcagaagcagggggatgaactggctaagctgtccagttcttttaaggccctcgtgaccttactcagcgaggtcgagaaaatgctctctaacttcggagattgtgtgcaatacaaggaaatagtaaagaatagcctcgaagagctgatctccgggtcaaaggaagttcaggagcaggccgagaagattctggacaccgagaatctgtttgaggcccaacagctgttgctccaccaccagcaaaagactaagcgcattagtgccaaaaagcgtgatgttcagcagcagatagcacaggcccaacaaggagaggggggattgccagacagagggcacgaagagctcagaaaactggaaagtactctcgatggactggagcgctccagggagcggcaagaaaggcggattcaggtaacactcagaaagtgggaaaggtttgaaacgaataaagaaacagtggtgagatatctctttcagaccgggtcctcccacgagcgctttctcagctttagttccctggaatccttgtctagtgaactcgaacagactaaagaattcagtaagagaactgagtcaattgctgtgcaggctgagaacctcgtgaaggaagcaagtgagattccattgggtccacagaataaacagctgctccagcagcaggctaaaagtattaaagagcaggtgaaaaaactggaggatactttggaagaggacattaagactatggaaatggttaaaaccaaatgggatcatttcggttcgaatttcgaaaccctcagtgtttggattacagaaaaggagaaggagctcaatgcactcgagacatctagtagcgctatggatatgcagatctcacagatcaaagtaactattcaggagatcgagtccaagctttctagcatcgtcggactggaggaggaagcccagtctttcgctcaattcgtgactacaggagagtccgctcgcattaaggcaaaactaacccagatccgcagatacggtgaggagctgagagaacatgcacagtgtctggaaggaactatcttggggcatctgtctcaacagcagaaattcgaagaaaatctgagaaagattcaacagtcagtgagtgaattcgaggataagttagctgtaccgattaagatctgcagcagtgctactgaaacgtacaaagtcctccaagaacacatggacctgtgccaggccttggagagcctgtcaagtgcaatcaccgcattctctgctagcgccagaaaggtcgtgaaccgcgactcttgtgtgcaggaggccgcagctctgcagcagcagtacgaggatatccttcgcagggcgaaagaacggcaaaccgctctcgagaatctgctggcccactggcagagactggagaaggagctgtcctcattcctgacctggctggaaaggggagaggctaaagcctcgagcccagaaatggacattagcgccgaccgggtgaaagtagagggtgagctgcagctgatccaagcccttcagaacgaggtggtcagtcaagcaagtttttatagcaaacttctgcagcttaaagagtccttattttcggtagcaagtaaagatgacgtcaaaatgatgaagttgcacctcgaacagctggacgaacggtggagagatctgccccaaattattaataaacggataaactttctccagtctgtcgttgccgagcatcagcagtttgatgagctcttgctttccttttctgtatggattaagttattcctgtccgaattacaaacaacaagcgaaattagtataatggaccatcaggtagcactgacccggcataaagaccacgctgctgaggtggagagtaaaaaaggagaactccaaagtctgcaagggcacttagccaaactgggaagtttggggcgggccgaagacttacacctgctgcaaggcaaggcggaagattgtttccaactgttcgaggaagcttctcaggtggtcgaaagacgacagcttgctctgtctcacctggccgagttcctgcaatcgcacgctagcctatctggaattctgagacagctaaggcagactgtggaagccactaattccatgaataagaacgagagtgacttgatcgaaaaagacttaaatgacgcgctacagaacgccaaggctctggaatcagccgccgttagtctggatggcatcttatccaaggcacagtaccaccttaaaatcgggtccagcgaacaaaggacatcctgtcgagcaaccgctgaccagctgtgtggcgaggttgaacgaattcagaacctgctcggcactaaacagtctgaggcggacgccctcgccgtcctgaaaaaagctttccaggatcagaaggaagagctcctgaagtcgattgaggacatagaggagcgaaccgacaaggaaaggctgaaagaacctacgcggcaggccctccagcagcggcttagagtcttcaatcagctcgaagacgaacttaacagtcacgagcacgagctgtgctggctcaaggacaaggccaaacagatagcccagaaagatgtggcatttgcccccgaggtggaccgcgaaatcaatcgcttagaagttacatgggatgatacaaagaggctcatccacgaaaaccagggtcaatgctgtggcctcatagacctgatgcgcgaataccaaaacctcaaatcggcagtctctaaggttctggagaatgcttcctccgtgattgttaccaggacaacaatcaaggatcaagaggacctgaaatgggcctttagtaaacacgagactgccaagaataaaatgaattacaaacaaaaggacttagacaacttcactagtaaaggcaaacatctgctttctgagctgaaaaagatccattcatcagatttctccctagtgaaaactgacatggaatcgaccgtcgataaatggctcgatgtttctgagaagctcgaagaaaacatggaccggcttcgcgtctctctatctatttgggacgatgtgttgagtacacgtgacgagatcgagggttggagcaacaattgcgtgcctcagatggcggagaacatatccaatctcgataaccacttgcgcgctgaggagctcctcaaggagttcgagtccgaagtgaaaaacaaggcactcagactagaggaactccactcaaaagtcaatgatttaaaagagctcaccaagaatttggagaccccccccgatcttcaatttatcgaagccgacctcatgcaaaagctcgagcacgctaaagagataaccgaggtcgcgaagggcacactaaaagatttcaccgcccaatcgactcaggttgagaagttcattaatgacatcacgacttggttcacgaaagtggaggaatccctcatgaactgcgcacaaaatgaaacttgtgaggcgttgaagaaagtgaaggatatacagaaagagttgcagagtcagcagagcaacatcagttccacccaggagaatctgaactcactgtgccgcaagtaccattcggccgagctggagtccctgggccgtgcaatgacaggactcatcaagaaacacgaggccgttagtcagctctgttccaagacccaagcgtctctccaggaatctctggagaagcacttttctgagtctatgcaagaattccaagagtggtttctcggagctaaggctgcggccaaagaaagctctgataggaccggcgactccaaggtgctcgaagccaagctccatgacctgcagaacattcttgactcagtttcagacggacagagtaagctggatgccgttactcaggagggacagacactgtacgcccacctgagtaaacagatagtgagtagcatccaggagcagatcactaaagccaatgaggaattccaggcatttcttaagcagtgtctgaaagataagcaggccttacaggactgtgccagcgagctgggcagcttcgaggatcagcataggaagctaaacctatggattcacgagatggaggagagatttaacaccgagaacctgggggaatcaaagcagcacatccccgagaagaaaaatgaggtgcacaaagttgagatgtttttgggggaattgttagccgcgcgagaatcattggataaactcagccagaggggtcagttgctatctgaggagggacatggcgccggccaggagggtcgcttatgctctcaactcctgacatctcaccagaatcttctgcgcatgacgaaggagaaactgagatcatgccaggttgcactacaggagcacgaggcattggaggaagccctccagagcatgtggttttgggtgaaagccatccaggatcgcttagcctgtgccgagtcaactctgggatctaaagacaccctggagaagagactttcacagattcaggatatcctgttgatgaaaggagaaggggaggtaaagctgaacatggctattggcaagggtgagcaggccctgcgaagctctaacaaagagggccagcgggtgatccagacacagctggagactctcaaagaggtttgggccgacataatgtcttcttccgtgcacgcccagtctacactggagagcgttatctctcagtggaacgactacgtggagcgaaaaaaccagctggagcagtggatggagagtgtggatcaaaagatagaacaccctttgcagccccaacctgggctaaaagagaagttcgtccttctggaccacttgcagtcgatcctgtcagaagccgaggaccatacccgggctctgcaccgccttatcgccaaatccagggagctttatgaaaagactgaggatgaatcgttcaaggataccgcccaagaggagttaaagacgcaattcaatgatataatgaccgtggccaaagagaaaatgagaaaggtggaggagatcgtcaaggaccacttgatgtatctggatgccgtgcatgagtttaccgactggttgcatagcgccaaagaggagcttcaccggtggtctgacatgagcggggacagttctgccacacagaagaaactgagcaagatcaaggagttaatagactctcgggagattggcgcgtccaggcttagcagagttgaatccctggcacctgaggtgaagcaaaatactaccgcatccggatgcgaactgatgcacacagagatgcaggcccttcgcgctgattggaagcagtgggaggacagtgtcttccaaacccagtcctgccttgaaaatctcgttagccaaatggcccttagcgaacaggaattcagcggacaggttgctcagctggaacaggccctggagcaattctccgcgttgctgaaaacatgggctcagcagctgacactgttggaaggcaaaaacactgacgaggagattgtggagtgctggcacaaaggccaggaaatactggatgctttgcaaaaggctgagccccgtactgaagatctcaagtctcagctaaatgagctgtgcagattctcacgggatctcagcacttatagcggtaaagttagtggactcattaaggagtataattgtctttgcctgcaagctagtaaggggtgccagaacaaggagcagattctacagcagagattcaggaaggcatttagagattttcagcagtggctcgtgaatgcaaagattaccacagctaaatgctttgatatcccacagaacatctctgaggtgagcacaagcctccagaagatccaggagtttctctctgaatctgagaatggtcaacataagcttaacatgatgctgagcaagggtgagctgctgtccactctcttaacgaaagagaaggctaaggggattcaggcaaaagtaactgccgcgaaggaggactggaaaaattttcatagcaaccttcaccagaaggaaagcgccttagagaacctgaaaattcagatgaaggatttcgaggtgagcgctgagcctattcaggattggctgtcaaagacagagaaaatggtgcacgagtcctcaaaccggctgtatgacctgcctgcaaaacgccgcgagcaacagaagctgcagagcgtcctggaagagatccactgttacgagccgcagctcaatagactgaaagagaaagcacagcaactgtgggaaggtcaggccgctagcaagtcatttcggcaccgtgtgagtcagctttcctctcaatatctcgcactgagcaatctgactaaagaaaaagttagccgtcttgatagaatcgtggctgagcataaccagttttcattgggcatcaaagagctgcaagactggatgactgacgcgattcatatgcttgacagctactgccacccgacatctgacaagtccgtgctggacagcaggaccctcaaactggaagcactcctgtcggtgaagcaggaaaaagagatccagatgaagatgattgtgacccggggcgaatctgttcttcaaaatacatcccccgaaggtatccccactatccagcagcagctgcagagcgtcaaagatatgtgggccagcctgttaagcgcggggatacgatgtaaaagccaacttgaaggagctttatcaaaatggacaagttatcaagacggcgtgcgtcaattttctgggtggatggactccatggaggctaatttgaatgagagtgagcgccagcatgctgagctgcgggataagacaaccatgcttgggaaggccaaactgctcaacgaggaggtgttgagctatagttctctgttggagactatcgaagtgaaaggcgccggcatgacggaacactacgtgactcagcttgaactgcaggacctccaggagcgataccgcgctattcaggaacgagctaaagaagctgtgacaaagtcagaaaagctcgttaggctccatcaagaataccaacgagatttgaaggcattcgaagtgtggctgggccaagaacaggaaaagctcgatcagtactctgtcctagaaggggatgcccacacacacgagacaacactgcgagatcttcaagagctacaagttcactgcgcggaaggtcaggctctgctgaactcagtattacacactcgtgaagatgttatacccagcggcattccacaggccgaggatcgtgccctggagagcctcagacaagactggcaggcttaccaacatcggctctccgagacaagaacacagttcaataacgtggtgaataaactgcggttgatggaacaaaagtttcagcaagtggatgagtggcttaagacggcagaggaaaaggtatccccgaggacacggcggcagtcaaatagagctacaaaggaaatccaactgcatcagatgaaaaagtggcatgaagaagtcactgcctatagggatgaagtcgaggaggtcggtgctagagctcaggagatccttgatgaaagccacgttaatagtcgaatgggatgccaggcgacacagctgacctcccgctaccaagccttgcttctccaggtgctagagcaaatcaagttcttggaggaggaaattcagtcactggaggagagcgagtcttccctgtctagttacagcgactggtacggctcaacccacaaaaacttcaagaacgtggcaacgaagatagacaaagtggataccgtgatgatgggaaagaaactgaagactcttgaagtgcttctgaaggacatggagaagggccactctctgctgaaatctgccagggagaagggcgaacgagctgtgaaatacttagaggagggcgaggccgagcggttgaggaaagagattcatgatcacatggaacagctaaaggagctcacatcaactgttcgaaaagaacacatgacattagaaaaggggctgcatcttgccaaggaattttccgataaatgcaaagcactgacccagtggattgctgaatatcaggaaatactgcatgtacccgaggaaccaaaaatggaactttatgagaaaaaagcacagctcagcaaatacaagtcgcttcagcaaacagttctgagccacgagcccagcgtgaaatccgttcgagaaaaaggagaggcattgctggagctcgttcaggatgtgacactgaaagacaaaatagaccagctgcagtccgattaccaggacttgtgcagtattgggaaggagcacgtgttctccctagaagccaaggtcaaagatcatgaagattacaatagtgagttgcaggaggttgagaaatggctattacagatgtcgggacgcctcgttgccccagacctcctggaaaccagtagtctagagacaattacgcagcagcttgcccatcataaggccatgatggaagaaattgccggcttcgaggaccggttaaataatcttcaaatgaagggcgacaccctcatcggacagtgtgccgaccacctgcaggccaagctgaagcagaatgtccatgctcatctccaggggacaaaggacagctacagcgctatttgcagcacggcacaacgaatgtaccaaagtctggaacacgaactgcagaagcacgtctcccggcaagatacactgcagcagtgtcaggcatggttgagcgcagtacaacctgacttggagcctagcccacagccacccctctcccgtgccgaggccatcaagcaagtcaaacactttcgggcgctgcaggagcaggcccgcacctatctggatcttctatgttcaatgtgcgatctgagcaacgcctccgtgaagaccaccgcaaaggacattcaacagacggagcagacaatagagcaaaaactcgtgcaagctcagaatctcactcagggttgggaagaaatcaagcacttgaagtctgaactttggatttatcttcaggacgccgaccaacagctgcagaacatgaagcgaagacactccgaactggagctgaacatcgctcagaacatggtctcacaggtaaaagacttcgtgaaaaagctgcagtctaagcaggcttctgtgaacaccattatcgaaaaggttaacaagctgaccaagaaagaagaatccccagagcacaaggagatcaatcatctgaacgatcaatggctggacttgtgtcgccagagcaacaatctctgcttgcagagggaggaggatctgcagcgcacacgagattaccacgactgtatgaacgtggtggaggtgtttctggagaagttcactaccgaatgggacaacttagcgcgttcagacgcagagagcaccgcagtccatctggaggccctgaaaaagcttgcactcgcattgcaggaaagaaaatacgctatagaggacctgaaggaccagaaacagaaaatgatcgaacacctgaatctggacgataaagagctggtcaaggagcagactagtcatctcgagcaaagatggttccagctagaggacctgattaagcggaagatccaggtgtcagtgacaaacctggaggagctaaacgttgtccagagccgctttcaagagctgatggaatgggccgaagaacagcagcccaatattgccgaagcattgaagcagtccccccctccagacatggcccagaatctcttaatggaccatctggccatttgttcggaacttgaggccaagcagatgctgctgaaatccctcattaaggatgcagatcgtgtgatggcagacctcgggcttaacgagagacaggttatccaaaaagctctctccgacgcgcagagtcacgtgaactgcttgtccgaccttgtcgggcagcggcgtaaatatctgaacaaggccctgtcagagaagacccagttcctgatggccgtctttcaggccactagtcagattcagcagcatgagcgtaaaattatgttcagagaacacatttgcctgttaccagacgatgtcagtaagcaggtgaagacctgtaagagcgctcaagcctctctgaaaacataccagaacgaggtcacagggttatgggcccagggacgagaacttatgaaggaggtgaccgagcaggaaaaatccgaagtactgggaaagctgcaggaactgcagtcagtttacgattccgtcctacagaagtgttcccataggctacaagagctggagaagaacctggtcagtcgaaagcactttaaagaggacttcgataaagcgtgtcattggttaaagcaggccgacattgtgacgtttcctgagattaatctcatgaacgagtcctccgaattgcatacccagttggccaaataccagaatattctggagcagagccctgagtatgagaatctgctgctcactttgcagcgtaccggccagacaatcttgccctctcttaacgaggttgaccatagttatctctcagagaaactgaacgccctgcctcgacagtttaacgtcattgtggccctggcgaaggacaaattttacaaagtccaggaagctattctggcacggaaggagtatgcctctctcatcgaactgacaactcagagcctgagcgagctagaagcccagtttctccggatgagtaaagtcccaacggatttagcggtggaggaagccctgtcactgcaagacggttgccgcgccatactggatgaagtcgccggtctgggggaagcagtcgatgagctgaaccagaaaaaagaagggtttcgttccaccggacagccctggcagcccgacaaaatgcttcacttggtcactctgtaccataggctgaaacgccaaactgagcagcgggtcagtctgctggaagatacaacttcagcctaccaagagcatgaaaagatgtgtcaacaactggagcgccagctaaaatctgtgaaagaagaacaatcaaaggtgaacgaggagacattgccagctgaggaaaagctaaagatgtaccattccctcgctgggagtttacaggacagcggtatagtcctgaagagggtgacaatccacctcgaggatcttgccccgcacttggatcccttagcctatgagaaggctcggcatcagattcagtcctggcagggtgagctgaaacttttgacgagcgctattggggagacagttacagagtgcgagtctcgaatggtgcagtcgattgatttccaaacggaaatgagccggtctctggattggttgagacgcgtcaaagcggagcttagtggtcctgtctacctggacttgaacctccaggacatccaggaggagatcaggaagatacagattcatcaggaagaggtgcagtccagtctgcgaatcatgaacgctcttagccataaagagaaggaaaagtttacgaaggctaaggaactcatctcggccgacctggaacacagccttgccgaactgtctgaactggatggcgatatccaggaagccctgagaactcgtcaggccaccctcaccgaaatttactcccaatgccagcgctactaccaagtattccaggccgctaatgattggctggaggacgctcaagagctgcttcagctagctgggaacggcttggatgtcgagagtgccgaagaaaacctgaaatcacacatggagtttttttcaacggaagatcagtttcattcaaacctggaagaactacattccctggtggccacgctggatcccctgataaaacccacgggaaaagaagacctggagcagaaggtggcgtccctggaactgaggagtcagcggatgtccagagactcgggggcccaggtggatctgctgcagcggtgcacagctcagtggcacgattatcaaaaggcccgggaggaagttatagaattaatgaacgacactgagaaaaagctgagcgagttttcactgctgaagacttcttcttcgcacgaggctgaggaaaaactgtcggagcataaagccctggtaagcgtggtgaactcatttcacgaaaaaattgtggcacttgaagagaaggctagtcagttggagaagaccgggaacgacgccagcaaggccacactgtcccggagtatgacaactgtctggcagcggtggactaggctaagagctgtggcccaagatcaggagaagatcctggaggatgccgtcgatgagtggacgggatttaataataaggtgaagaaggccacagagatgattgaccagctgcaagacaagcttcctggctcatcggccgagaaagccagcaaagccgaactactcaccttgctggagtaccacgacactttcgtcctagagctcgaacagcaacaaagcgcgctggggatgttgcgccagcagactctttctatgttgcaggatggggctgcacccaccccaggggaggagccccctctgatgcaggagataacagccatgcaggatcgctgtctcaacatgcaggaaaaagtgaaaactaacggaaagctcgtgaaacaagaactgaaagatagagagatggttgagacgcagatcaactcagtcaaatgttgggtccaggaaactaaagagtacctgggtaaccccactatcgagattgatgcccagttggaagaactgcagatcctcttgaccgaggctacaaaccatcgacagaatattgaaaagatggcagaagaacaaaaagagaaatacctgggcctgtacactatcttgccctctgaactgtctctgcagctcgccgaggttgcactcgacctcaagatccgggaccaaattcaggacaaaattaaggaggtggagcaatcaaaagcaacttctcaggagttaagcaggcaaattcagaagctagctaaagacctgacaacgatcctaaccaagctcaaagctaagactgataacgtggttcaggccaagaccgatcaaaaagtgctgggagaggaattggatggctgtaacagcaagcttatggagcttgacgcggccgttcagaagttccttgagcagaacggacaattgggcaaacccctggcaaagaaaattggcaagctcactgagctacaccaacagacaatcagacaggctgagaacagactgtccaagttgaatcaggccgcgtcccacttggaagagtacaatgaaatgttggaactaatcctaaagtggatcgaaaaagccaaagtgctggcgcacggcactattgcatggaacagtgcatcccagttgcgggagcaatatatcctgcatcagaccctgctggaggaaagcaaagagatcgacagcgaactcgaggccatgacagagaaactccagtacttgacctcagtgtattgcacggagaagatgtcacagcaagtagccgaactgggcagagagactgaggagctgcggcagatgataaagatccgcctacagaacctccaggacgctgccaaggatatgaaaaagtttgaggccgaactgaaaaagctgcaggccgcgttggagcaggcacaggctaccttgacatcgcctgaggtcggcaggttaagtttgaaagagcagctaagtcaccggcagcacttgctgagtgaaatggagtcattaaaaccgaaggtgcaggctgtccaactctgccaatccgctctgcggataccagaggacgtggtcgcttcactccccttatgtcacgccgccctccggctgcaggaggaggccagcagattgcaacacaccgctattcaacaatgtaatataatgcaggaggccgtggtacagtacgaacagtatgagcaggagatgaagcacttgcaacagctgatcgagggggctcaccgagagatcgaggacaaacccgtggcaacaagtaacatccaagagttgcaggcacagatctctagacatgaggagctggcacagaagatcaaggggtatcaggaacagatcgcttcgctgaatagcaaatgcaagatgctgacaatgaaagccaaacacgcaacaatgctgctcactgtgaccgaggtagagggcctggcagaaggcactgaggacttagatggcgagctgttaccgaccccttccgcccatccttctgttgtgatgatgacagctggacgttgtcatacacttttatcaccggtcacagaggaatctggagaagaggggaccaactctgagatttcttccccaccagcctgcaggtccccatctccagttgccaatacggatgccagtgttaaccaggatatcgcctactatcaggcactgtcagctgagcgactgcagaccgacgccgccaagatccacccatctacgagcgccagccaggagttctacgaacccggattagagccatccgcgacagctaaattgggtgacctccagcggagctgggagaccctcaaaaatgtcattagcgaaaaacagagaactctttatgaagcgctggaaaggcagcagaagtatcaggattccctccagtccatttctaccaaaatggaagccattgagttgaaactatccgaatctcctgagcctggccgatcgccagaaagtcagatggctgaacatcaggcactgatggacgagatactcatgctccaagatgagattaatgaactccagtcatcactcgcggaagaactggtttctgaaagttgcgaggcagaccccgcagagcagctggcgcttcagtcaacattgacggtcctggcagaacgaatgtcaaccatcagaatgaaagcttctgggaagcgccagctgcttgaggagaagctcaacgatcagcttgaggagcagcggcaggaacaggcccttcagagataccgctgcgaagcggacgaactcgacagttggctgctttccacaaaagccacccttgatactgccctgtctccgcccaaagagcccatggacatggaagcgcagttgatggattgccagaacatgcttgttgaaattgagcagaaggtggtggcactgagtgaactctccgtgcacaatgagaatttacttttggaaggaaaggcgcatactaaggatgaggccgaacagttagccggcaagctcagacgacttaagggatccttgctcgagttacagagggcactccacgacaaacagttgaatatgcaaggaaccgcccaggaaaaagaggagtccgacgtggatttgacagccacccagtctcccggtgtacaggaatggctggcccaggccaggaccacgtggacacagcagcggcagtcctcactccagcagcagaaagagctagagcaggaactggcagagcagaaatcacttctgaggtccgtcgcttctcgaggcgaagagatcctcattcagcatagcgctgccgagacctcgggcgacgcgggggagaagccagacgtactcagccaggagctggggatggagggagagaaaagcagcgccgaggaccagatgcggatgaaatgggagtctctgcaccaggagttctcaaccaagcagaaactgttacagaatgtgctggagcaggagcaagaacaggtgctttattcaagaccaaataggttattgtcaggagtcccgctgtataagggggacgtgccgacgcaggataagtccgccgtaacgtcactgttagacgggttgaatcaagcttttgaggaagtatctagtcaatctgggggcgctaagagacagtctatccacctagagcaaaagctatatgacggcgtcagcgccacaagtacctggctggatgatgtcgaggagagactgtttgtggctactgccttattaccggaggaaacagagacatgtctgttcaaccaggaaattctagcaaaggatatcaaagagatgagtgaagagatggacaagaataaaaacctcttcagtcaggcctttcctgagaatggggacaaccgggacgtcattgaagataccctcggatgtctcttgggcagattgtcactgctggatagtgtggtgaaccagaggtgccaccagatgaaagagcggctgcagcagatcctcaacttccagaacgacctgaaagtgctgttcacttccctcgctgacaacaagtatattatactgcagaagctggcgaacgtgtttgagcagccggtggccgaacaaatcgaggccattcaacaggcagaggatggccttaaagagtttgatgctgggattattgagctgaagaggagaggggacaaactgcaagtggaacaacccagtatgcaggagctcagtaagcttcaagatatgtatgatgagctcatgatgataatcggctctaggcgatccgggctgaaccagaacctgaccctgaagtcccagtacgagagggccctccaagacttggctgacctgctggaaacgggacaagagaagatggccggcgaccagaagattatcgtgtcttccaaggaagagatccagcagcttttggataagcataaggaatactttcaaggtctcgagtcccacatgatccttaccgagactctttttcgcaagatcatatccttcgccgtacagaaggagacccaattccataccgaattgatggcacaggcgtcggcagtgttgaagagagcacataagagaggcgtggagctcgagtatatcctcgagacgtggagccatctggatgaagaccaacaggagttgagtcgtcagttagaggttgtggagtctagcatcccatctgtcggcctcgtcgaagagaacgaagatcgacttatagatcggataactctgtaccagcacctgaagtccagtctgaatgaataccagcctaagttgtaccaagtgctcgatgacggtaagaggctgttgatttctatctcttgctcagaccttgagagccagctcaatcagctcggcgagtgctggctgagtaatacaaacaaaatgtctaaggagctacataggctcgagacgatattaaagcactggactcgctaccagagcgagtctgcagatttgatccattggctgcagtccgccaaagatcgcctagaattttggacccagcagtcagtcactgtcccccaggaactggagatggtgcgggaccacctcaatgcttttttggagtttagtaaagaggttgacgcccagagctccttgaaaagtagcgtactgtctacaggcaatcagctcctcagactgaagaaagtcgacacagccacccttcggtccgagctcagccggatcgactcccagtggacggatctcctgacgaatattccagctgtgcaggagaagctgcaccagctgcagatggacaagctgccctcacggcacgccatcagcgaggttatgtcctggataagtctcatggaaaatgtgattcagaaggacgaggacaatatcaaaaacagcatcggatacaaagccattcacgagtacctgcaaaagtacaagggattcaagattgatatcaactgtaagcagctcaccgtggacttcgtcaaccagtccgtgctgcaaatatcctcccaggatgtggagtctaagcggtccgataagaccgatttcgcagagcagttgggggccatgaacaagagttggcaaattctccaaggacttgtcaccgaaaagatccagttattagaaggcctcctcgagtcatggagcgagtacgagaataacgtgcaatgcctgaagacatggtttgagactcaggagaaaagactaaagcaacaacacaggatcggagaccaggctagcgtgcaaaatgcgctaaaggattgccaggacctcgaggatctgataaaagcaaaggagaaagaggttgagaaaatcgaacagaatggccttgctttgatccagaataagaaagaggacgtgtccagcattgtgatgagcacgctgcgcgagctgggtcagacatgggccaatctggaccacatggtggggcagctgaaaatcctgctgaaatctgttcttgaccagtggtccagccacaaagtcgcattcgataagatcaattcttacttgatggaagctaggtacagcctcagcagattccggctgctaacgggcagccttgaagccgtgcaagtccaagtggataacctgcagaatttgcaggacgatctcgagaagcaggagagaagccttcagaaatttggcagtatcaccaaccaactcctcaaagagtgccaccccccggtaaccgaaaccctgaccaatactctcaaggaagtaaatatgcgctggaataatttgctggaagagatcgctgaacagctccagtcctcaaaggccctgctgcagctgtggcaacgctataaagactattcaaagcagtgtgcttccacggtccaacagcaggaagatcgcacaaacgagctcttaaaagcggccacgaataaggatatcgctgatgacgaagtggcgacctggatccaagattgtaacgatctcctgaaaggcttgggaacggtgaaggattcactgttctttctgcacgaactcggggagcagctgaagcaacaggttgacgcatcagcagcgagcgcaatccagtccgatcaactcagcctatcacaacacttatgtgccctcgagcaagcattatgcaaacagcagacgagtctgcaggctggcgtccttgattacgaaaccttcgcaaaatcgctggaggccctagaggcttggatcgtcgaggctgaggaaatcctccagggacaggatccgtcacacagttccgatctaagcacgatacaagagcggatggaggagctcaaaggacagatgctcaagtttagtagcatggccccggatctggacaggttgaacgagctcggctatagactccccctaaacgacaaagagattaagcggatgcagaacctcaacaggcactggtccctgatctcctctcagacaacagagcgattttccaagctgcagtcctttttgctacaacatcaaactttcctcgagaaatgcgaaacctggatggagttcctggtgcagaccgaacaaaaactggccgtagaaatatccggaaactaccaacacctcctcgaacagcagcgagcccatgaactttttcaagcagagatgttctctcggcagcagattcttcactccatcattatcgacggtcagcgcctcttagagcaaggccaagtagacgacagagacgaattcaatctcaaactcactctgttgagcaaccagtggcagggcgtgatcaggcgcgcacaacagagaaggggtatcattgattctcagattaggcaatggcagaggtaccgggagatggccgagaagcttcgcaagtggctggtggaggtgagctacctcccaatgtctggccttgggtcagtacccattcctttacagcaggcgcgaaccttattcgatgaagttcaatttaaggagaaggtgttccttagacagcaagggtcctacatactgaccgtcgaggccgggaagcagctgctgctgtccgctgactccggggcggaggccgccttgcaggcagaactggcagaaatccaggaaaagtggaagagcgcatccatgcgactcgaggagcagaagaagaagctcgccttcctgctgaaggattgggagaagtgcgagaaggggatcgctgactctctcgagaaactgagaacattcaaaaaaaaactgagtcagtccttgccagaccaccatgaagaattgcacgccgaacagatgagatgtaaggaacttgaaaatgccgtggggtcttggacggacgacttaactcaactctctttgctcaaggataccttatctgcctacataagcgccgatgacatatcaattctcaatgaaagggtcgaactccttcagagacaatgggaggagttgtgtcaccagctatctttgcgccggcaacagatcggtgaacgactaaacgagtgggccgtgttcagtgaaaaaaataaagagttgtgtgagtggctgacccaaatggagagcaaagtgtctcagaacggcgacatcctgatcgaggagatgatcgaaaagctaaagaaagactatcaggaggaaatcgccatagctcaagagaataaaatacagctccagcagatgggtgagaggctggccaaagcaagccacgagtccaaggcatcagaaatcgaatataaactcgggaaggtcaacgaccggtggcagcatctattggatcttattgctgcacgggtgaagaagctgaaggagacgttggtagcggttcagcagctagacaagaacatgagctcactgaggacatggctagcgcacatagagtccgaactcgccaagccgattgtctacgacagttgcaatagtgaggaaattcagcgcaagctgaatgaacaacaggagttacagagggacattgagaaacactctactggcgttgcgtcagtgctgaatctgtgcgaagttctgctgcatgattgcgacgcatgcgccaccgacgctgagtgcgattccatccaacaggccacaagaaacttggacaggaggtggcggaatatctgtgctatgtccatggagaggaggctgaagatcgaggagacctggaggctctggcaaaaattcctcgatgactattctagattcgaagactggctaaagagctcagagcgcacggcagcctttccatcatcaagcggagtaatctatacagtggcgaaggaggagctgaagaaatttgaggcatttcagcggcaggttcatgaatgcttaacacaattggagctgatcaacaaacagtataggagactggcgagagagaataggacagattccgcgtgttcactgaaacaaatggtccatgaaggtaaccaacgatgggataatttacagaaaagggtgacaagcattctgcgtcgattgaaacatttcattgggcagcgcgaagaattcgaaactgctcgggactctattttagtgtggctgaccgaaatggacctgcagttaaccaacattgagcacttttcggaatgtgacgtacaagctaaaattaagcaactgaaagcattccagcaagagatatccttgaatcacaacaaaatcgagcagatcatcgcacagggagagcaactgatcgagaagtccgagccattggacgccgccattattgaggaagaactcgacgagctgcgtcgctattgtcaggaagtgtttggccgggtggaaagataccacaagaaattgatccgtctccctttgcctgatgacgagcacgatctgtcagatagggaactggaactggaagattctgctgccctctccgacttacattggcatgacagatcagcggatagcctactgtctccacagccttcatcaaacctgagtttgtcactagcgcagcccctgaggagcgaacgaagcggacgggatacaccagcgtcagtggattctataccactggaatgggaccacgattatgacctatcaagagatttggagtcggcaatgtcccgggccctcccatcagaggacgaagaagggcaggacgacaaggacttttatttgcgtggagcagtggggcttagtggtgaccatagcgctttagagagccagattagacagctcggaaaggcactggacgacagcagattccagatacaacagactgaaaacataattcgctcgaaaacacccactggtcccgaactcgacaccagctacaaaggctatatgaaattacttggggagtgtagcagctccattgactcggtgaagaggctcgaacacaagctgaaagaagaagaagaaagcctccctggtttcgtgaacttgcattctactgaaactcagacggccggagtaatcgaccggtgggagcttctccaggctcaggctctgtccaaggagctgaggatgaagcaaaacctccagaagtggcagcagtttaattccgacctgaattccatttgggcctggttgggggataccgaggaagaactagaacaactgcagaggttagagctcagcactgatatccagaccattgaactgcagatcaagaagttaaaagaattacagaaagcagtggaccacaggaaggctatcattctgtcgatcaacctgtgttcacccgaatttacccaggccgactcgaaggagtcacgggatctgcaggaccgattgtctcagatgaacggcaggtgggaccgcgtctgcagcctgttggaggaatggaggggcctacttcaagatgccttaatgcagtgtcaggggtttcatgagatgtctcacggactgctgctgatgctcgagaatattgaccgccgtaagaacgaaattgttccaatagactccaacctcgatgccgaaatactgcaggatcaccataagcagctgatgcagatcaaacacgagttgcttgaaagccagctgcgggtcgcatctctccaggacatgagctgtcagctcctggtgaacgccgaaggcactgattgtctagaggctaaggaaaaggtgcacgttattggtaatcgattgaagcttttacttaaggaggtctctcgacacataaaggagctcgagaagctgttggatgtcagctcaagccagcaggacctaagctcatggagtagcgcagacgagctcgacacgagcggaagcgtttcaccaacctctggccggtcaacgccaaatcgacagaagacaccccgcggtaaatgctctttatctcagccaggcccctcggtaagttccccccattcgcgtagtactaaagggggctctgacagctcgctgagcgaaccggggccgggccgctccggacgaggctttctgtttcgcgtgctcagggccgctttacctcttcaattgttgttacttttgttgataggattggcctgtctggttcccatgtctgaagaggattactcatgtgccctgagtaacaacttcgccaggtcgtttcaccccatgttgcggtatacaaatggaccccctcccttatag

SEQ ID NO: 206671 - DNA, 26250 bp, synthetic construct
  misc_feature 1..26250: note = Description of Artificial Sequence: Synthetic coding sequence
  source 1..26250: mol_type = other DNA
atggccaccagccggggcgccagccggtgcccccgggacatcgccaacgtcatgcagagattgcaggatgagcaggagatcgtgcaaaaaagaacattcaccaaatggatcaattcacatctagcaaagaggaagcctcctatggtcgtggatgacctgtttgaagatatgaaggatggcgttaagcttctcgcccttttagaggtgctatctggtcaaaagctgccatgtgaacagggtcgacgaatgaagcggattcacgcagtggccaacatcggaaccgccctgaaatttttagagggaaggaagtcaatgcaccgaggttcacctatcaagctcgtgaacattaacagtacagatatcgctgatgggcgaccttctatcgttctggggttaatgtggactatcattctgtatttccagattgaagaattaacgagcaacctgccccagctgcaatcattgagctccagtgcctctagcgtcgacagtattgtatctagcgagaccccctccccaccttctaagcgtaaagttaccactaagatccagggcaacgccaagaaagccctacttaaatgggtgcagtacactgccggaaagcagaccggcattgaggtcaaggactttggaaaaagctggagatccggagtagcatttcactctgtgatacacgccatcagacccgaactcgtggacttggaaactgtgaaaggtaggtctaacagagaaaaccttgaggacgcctttaccattgccgagacggagctcggaatccctaggttgctcgaccctgaggacgtggacgtggacaaaccggacgagaagtcaatcatgacatatgtggctcagttcctgaaacattaccccgacatccacaacgcctccactgatggtcaggaagatgacgaaattctacctggctttccctccttcgccaatagcgttcaaaattttaagcgcgaggatagggttatattcaaggagatgaaagtctggatagagcaatttgaacgtgatctgaccagagctcagatggtcgagagtaatttacaggacaagtatcaatctttcaaacattttcgagtccagtatgagatgaagaggaagcaaatcgagcacctcattcagcccctccaccgggatggcaaactgagtctcgaccaggccctggtgaagcagtcttgggatcgggtgacatctagactgttcgactggcacatccaactcgataagtctctgcccgcaccactgggaaccatcggtgcctggctgtaccgtgccgaggtcgctctgcgcgaagagatcacagtgcagcaggtccacgaagagaccgccaataccatccaacgcaaactggaacagcataaagacctgctccagaacactgatgcccacaagcgggccttccatgagatctacagaacacggtcagtaaacggaatccccgtgccccccgatcagctcgaggacatggcagaaagatttcacttcgtttcctcaacgtctgaactgcatctgatgaaaatggaattcctcgaactcaagtataggctgctgtcgctgctggtattagcagagagtaaacttaaatcctggattatcaagtacggccgtcgagaaagcgtggagcagttgttgcagaattacgtctcatttatcgaaaattccaaatttttcgaacagtatgaggtgacctatcagatactgaaacagaccgccgagatgtatgtgaaggccgacggatcggtcgaggaggccgagaacgtaatgaaattcatgaatgagactacagcccagtggcgcaatttgtctgttgaagtcagatcggtgcgatccatgcttgaagaggtgatatctaattgggatagatacggcaacaccgtagctagtctgcaggcatggctcgaggatgctgagaaaatgcttaaccagagcgagaacgctaaaaaggattttttccgcaatctgccccactggatccaacagcatactgcgatgaacgatgcaggaaattttttgatcgagacctgcgatgagatggtgtcccgggatctcaaacagcaacttttgttgctgaacggacggtggagggaattatttatggaagtgaagcagtatgcacaagcagacgaaatggacaggatgaaaaaggagtacacagattgtgttgtgaccctgtcagcgttcgctaccgaggctcacaaaaaactgtctgaacctttggaagtgagctttatgaatgtgaaattgctcattcaggacctagaggacattgaacagcgggtacctgtcatggatgcgcaatacaagattattaccaagacagcacatcttattactaaggagtccccccaggaggagggcaaagaaatgttcgcaacaatgtccaaactcaaagaacagttgaccaaggtgaaagagtgttatagcccactgctgtatgagtcacaacaactgcttattccgctcgaagaacttgaaaagcaaatgacttccttctacgactcattaggcaagattaacgagataatcaccgtgctggagagggaagcccagtccagtgctctgttcaaacagaaacaccaggagttgcttgcttgtcaagagaactgtaagaagactttgacactcattgaaaaagggagccaaagtgtgcagaagttcgtcacattatccaacgtcttgaaacacttcgatcagactaggcttcaaagacagatcgctgacattcacgttgcctttcagagtatggtcaaaaagacaggcgattggaagaagcatgtcgaaactaattccagactaatgaaaaagttcgaggagagcagagcagagttggaaaaggtgttaagaatcgcacaggaaggtttggaagagaaaggggacccagaggagttgcttaggaggcacacagagttcttcagtcagctagaccaaagggtgctgaacgcttttctaaaagcctgcgatgagctaactgacattttgcctgaacaggaacaacagggactgcaggaagcagtgaggaagttacacaaacagtggaaagatctccagggcgaagccccttaccatctcctccacctgaagatcgatgtagaaaaaaacagattcctcgcttccgttgaggaatgtaggacagagttggatcgggagacaaagttaatgccacaggaaggctcggagaaaatcattaaggaacacagagtttttttctcagataaaggacctcaccacctgtgtgagaagcgattgcagttaattgaagaactgtgtgtgaagctccccgtccgcgaccccgtcagggacacgcccggtacctgtcatgtgacactgaaggagctgagagccgccattgattcaacttacagaaaactgatggaagatccggacaaatggaaggactatacgagcaggttttctgaattctcaagttggatctccaccaacgagacacagcttaaaggaataaaaggggaggccattgatacagccaatcatggcgaagtcaaacgagcagtagaagaaatacgcaatggggtgaccaaaaggggcgagacattatcatggctcaagtcaaggctgaaagtcttgaccgaggtttctagcgaaaatgaggctcagaaacaaggcgacgagctggccaagctgtcttcctccttcaaggcgttagtgacacttctctctgaggtcgagaagatgctatctaacttcggtgattgtgtccaatacaaagaaattgtcaagaacagtctggaagagctgatatccggttctaaggaagtgcaggaacaggccgaaaagatcctggacaccgagaatttgttcgaagcccagcagctgctgctgcaccatcaacaaaagactaagcgaatttcggcaaagaagagggatgtccagcaacagatcgcccaggctcagcagggcgaaggcggcctccctgataggggccatgaagagctgaggaagcttgaaagcactttagacggtctcgagcggagccgggaaaggcaggagaggcggatccaggttactctgaggaagtgggaaagattcgaaactaataaagagaccgttgtgaggtacttattccagactgggagcagccatgagagattcctcagcttctcttctctagagtctctcagctcagagttggaacaaacaaaggagttctctaaacgcaccgaatctattgccgttcaggctgaaaacctagtgaaagaggccagcgagattcctttgggccctcagaacaaacaactgctccagcaacaagccaaaagtattaaggagcaggtcaaaaagttggaagataccctggaggaagacatcaagacaatggagatggtgaaaacgaagtgggaccatttcgggagtaactttgagactctgtccgtgtggattacagaaaaggagaaggagctcaatgcactcgaaacatcgtcctctgcaatggatatgcaaataagtcaaataaaagtaaccattcaggaaatcgagtcaaagctgagtagcattgtggggcttgaggaggaagcgcagtccttcgcccagtttgtgactactggcgagagtgcgaggatcaaggcgaagctaacacaaatcaggagatatggggaggaactgcgcgagcatgctcagtgtctggagggcacaattttggggcatctgtcgcagcagcagaagttcgaggaaaacttaagaaaaatacagcagtctgtgagcgagttcgaagataagcttgccgtcccgattaagatatgttccagtgcaaccgaaacatataaggtgttgcaggagcacatggacctctgccaggctctcgagtctttaagctccgctattacagctttcagcgcgtctgccaggaaggtggttaatcgcgactcctgtgtacaggaagcggccgctctgcaacaacaatacgaggatatactgcgccgtgcaaaggagcgccagacggctctagagaacctcctggctcattggcaacgtctggagaaggagttaagtagttttttgacatggctggaaagaggggaggcaaaggcctcttctcccgaaatggatatttccgcagacagggttaaggtggagggggagttacagctgatacaggcgctgcaaaacgaagtggtcagccaagcctccttttacagcaagttactacagctgaaagagtctctgtttagtgtcgcaagtaaagacgatgttaaaatgatgaagctgcatctcgaacagctggatgagcgctggcgggaccttccacagattattaataagcgcatcaacttcctgcaatcagttgtggctgagcatcagcagttcgatgagctactgctcagtttcagtgtgtggatcaagctcttcctctcagaactgcagacaacttctgagatctcaatcatggaccatcaggtggctctcacgcgccacaaagatcatgcagctgaagtggagtccaagaagggcgagttgcaaagtttgcagggccacctggcgaagttgggcagcctaggccgggcagaggacctgcatcttttacagggtaaggctgaggactgcttccagctattcgaggaggccagtcaagtggtcgagcgccgccagttggccctgagtcacctagctgagttcctgcagagccatgccagtctttccgggattcttcgacagctgagacaaaccgttgaggccaccaattcaatgaataagaacgagtccgatcttattgagaaggacctgaatgatgcactgcagaacgccaaggcgctggaaagcgccgctgtcagccttgacggcattctgagtaaagcccagtatcatctaaaaataggtagcagtgagcaaaggacctcttgccgggctacagctgaccagctttgtggagaagtggaacgtatccagaatctgctggggacaaagcagagcgaggcagacgcccttgccgtgctgaaaaaagcttttcaggaccagaaggaggaactcctaaagtcaattgaagatatcgaggagcgtactgataaagagcgactaaaagagcccacacgtcaagcactgcaacagaggttgcgggtgtttaatcaactagaggacgaactgaactcacatgaacatgaactgtgctggctgaaggacaaagcgaaacagatagcacagaaggatgttgcctttgcaccagaagtcgatcgcgaaatcaatcgcctcgaagtaacgtgggacgatactaaaaggcttatccacgaaaaccaaggacaatgctgcggcctgattgacctgatgcgtgaatatcaaaatctgaagagtgctgtgagcaaggtactggaaaatgcttctagcgtcatcgtaactagaacaaccattaaggatcaagaggatctgaagtgggcgttcagcaaacatgagaccgcaaagaataaaatgaactacaagcaaaaggacctagataactttacttcgaaggggaaacaccttttgtctgagctgaagaagatccactcttccgattttagcctggtgaagactgatatggaaagcactgtcgacaagtggctggacgtgagcgaaaagctagaagaaaacatggataggctgcgggtctccttgtcgatttgggacgatgttctctcaacaagggatgaaatagagggctggtcgaataactgcgttccacagatggccgagaatatctccaatctggacaatcacctaagagcagaagaactgctaaaagagtttgagagcgaggttaaaaacaaggcgcttcgactggaggagcttcacagcaaggtgaatgaccttaaagagctgacaaaaaacttggagactcctccagacttacagttcatcgaggcagatctgatgcagaagttggagcacgccaaagagattaccgaagttgcaaaaggtactctgaaggattttacagcgcagtcaacccaggttgagaaatttatcaatgatattaccacttggttcacaaaagtggaggagtctctgatgaactgtgctcagaatgagacatgtgaggccctgaaaaaagtaaaagatatccagaaggaactgcagagccaacagtctaatatttcttcaacccaggagaacttgaacagcctgtgtcgtaagtaccactcagcagaattggagtcgctggggcgcgctatgactggtcttatcaagaagcatgaggccgtctcacagctgtgcagtaagacacaagcaagcctgcaggagagtctggagaagcatttctctgagtcgatgcaggagttccaggagtggttcctaggagcaaaggctgcggcgaaagagagctctgaccgcaccggagacagcaaggtcttagaagcgaagctccacgacctgcagaatatcctggattccgtgagcgatggccagagcaagttggatgctgttactcaggagggccagacactgtacgcccacctgtccaaacagatcgtctcttctattcaggagcagattacaaaagccaacgaagagttccaagctttcctgaagcagtgccttaaggacaaacaggctctgcaggactgcgcatcagagctggggagcttcgaggatcagcaccggaagctgaacctgtggattcatgagatggaagaacggttcaacaccgagaacctaggcgagagtaagcagcacatccctgagaaaaagaacgaggtgcataaggtggaaatgttcttaggcgagctcctggccgctcgagagtccctcgataaactgtcacagcgaggccagttactgtctgaggaggggcacggtgctggtcaggaggggcggctatgttcccagctgttgacctcccaccagaatcttctgcgaatgactaaggagaagctaaggtcatgccaagtcgcgctgcaagaacatgaagccctcgaagaggccctccagagcatgtggttctgggttaaggcaatccaggacaggcttgcttgtgcagagagcactcttggatctaaggataccctggagaaacgattgtcgcagattcaggatatcctgctgatgaaaggggagggggaggtgaaattaaacatggcaatcggcaaaggcgaacaagcactgcgctctagcaacaaggaggggcagcgggtgatacagacccaattggagacgctcaaggaggtgtgggctgatattatgagctccagtgtgcatgcgcagtccacattagagagcgttattagtcagtggaatgactacgtggaaagaaagaatcagttggaacaatggatggagtcagttgatcagaagatcgaacatcccctccaaccccagcccggacttaaggaaaagttcgtgcttttggaccacctgcagagcatcctcagcgaagcggaagaccatacacgcgctctgcaccggctgatcgcgaaatcaagggaactctatgaaaagacagaagacgaatcttttaaagacactgcccaggaggagttaaagacgcagtttaatgacatcatgactgtggccaaggagaagatgcgtaaagtcgaagagattgtaaaggatcacctgatgtacctcgatgctgtacacgagtttaccgactggctccactccgcaaaagaggagctccacagatggtctgacatgagcggtgatagtagcgccacccaaaaaaagctgagcaagatcaaagagctgatcgactcacgcgaaattggagcatcaaggctaagccgagtcgaatccctcgccccagaggtcaagcagaacaccactgcaagtgggtgcgagctgatgcatacagaaatgcaagccctgcgggcagactggaagcagtgggaggattccgtctttcagacccagtcttgcttggaaaacttagtgtctcagatggctttatccgagcaagaatttagcggccaggttgcccaactggaacaggctctggagcagttctcagcactgctgaagacatgggctcagcaattgactcttttagaaggcaagaacacagatgaagaaatagtagagtgctggcataaggggcaagagatcctggatgccctgcagaaggctgaaccgcgcaccgaagacttgaaaagtcagcttaatgaactgtgtcgcttctcacgagatctcagcacctactctggcaaggtgtcgggcttaatcaaagagtataattgcttgtgccttcaggcttccaaaggctgccagaacaaagaacaaattctgcagcaaaggtttcgtaaggcctttagggacttccagcagtggctagtgaatgcgaaaatcaccacagctaagtgctttgacatccctcaaaacatatctgaggtgtcaacgtcattgcagaagattcaggaattcctgtcggaaagcgaaaatggccagcataaattgaatatgatgttgagtaagggagaacttctgtctacgctgttaacgaaggagaaggccaaaggcatccaagccaaagttacagccgctaaagaggattggaagaacttccacagcaatctccatcagaaagaaagcgccttggagaatctcaagatccagatgaaggactttgaggtgagtgctgagcctattcaagactggctctccaagaccgagaagatggtgcacgaatcttccaaccggctttacgatttgcctgcgaagcgcagggagcagcagaaactgcagagcgtgctagaggaaattcactgctacgagcctcaattgaacaggcttaaggagaaagcccagcagctgtgggagggccaggctgcctcgaagagttttcgccaccgagtctcacagctgtccagccagtaccttgcccttagcaacctgacgaaagagaaggtatcccgcctggataggattgtggccgagcacaatcaattttccctcgggatcaaggagttgcaagattggatgaccgatgcgatacacatgctggatagctattgccaccctacaagcgataagtccgtgttggatagcaggacactgaaactggaggccttactctctgtgaaacaggaaaaagaaatccagatgaagatgatagtgaccaggggagaaagcgttctccagaacacgtcacccgagggaatcccgactatccagcagcagctgcagtctgttaaggatatgtgggcaagcctgctgagcgcggggattcgttgcaaatcccaactggaaggcgccttgtccaaatggacgtcttatcaggatggcgtgcgccagttttccggctggatggacagcatggaggctaacttaaacgagtctgaacggcagcacgccgagctgagagataagactactatgctgggcaaggcaaaacttttgaacgaggaagttctctcttactctagtttgctggaaactatcgaggtgaagggggcagggatgaccgaacattatgtaactcagctcgaactgcaggatttgcaggaacggtaccgcgccatccaggagcgggcaaaagaggctgtgacgaaatctgagaagctcgtgaggctgcatcaagaatatcagcgagatctcaaggctttcgaggtgtggctggggcaggaacaagagaagctggatcagtactcagtattggagggagacgcccatacacacgaaacaacgcttcgagatttgcaggaactccaggtacactgcgctgagggtcaggcgctgctgaactccgtattgcatacacgggaggatgtgatcccttccgggatacctcaggccgaggaccgagcgcttgaatctcttcggcaggattggcaggcgtatcagcatcgactgtctgaaacccgtactcagtttaacaacgtcgtcaacaagctgagattgatggagcaaaagtttcagcaggtagatgaatggttaaagacagccgaagaaaagaagtggcatgaagaggtcactgcgtaccgcgacgaagtcgaagaagtcggcgccagggctcaggagatacttgacgagtcccatgtgaacagccgaatgggctgtcaagctactcaactgactagtcgttaccaggctttgcttcttcaggtcctggagcaaatcaaatttctggaagaagagatacaaagccttgaggagtcggagagttccctctctagctactccgactggtatggcagcacccacaaaaatttcaaaaatgtcgccacaaagattgacaaagtagacaccgtcatgatgggcaagaaattgaagacactggaggtgctgctgaaggacatggaaaagggccacagcctcctaaaatctgcgcgggagaagggtgagcgggccgtgaaatacctcgaagagggggaggctgaaagactcagaaaggagattcatgatcatatggagcagctgaaggaattgacaagcaccgtgcgaaaagagcatatgacattggagaaaggcctccatctcgccaaagagttcagtgataagtgtaaggctctgacacagtggattgccgagtatcaggaaattctacatgtgcctgaggaacccaagatggaactctatgagaagaaggcgcagttgtctaagtacaagtctctccagcagacagtcctctcgcacgaaccctccgtaaaaagcgtccgggaaaagggggaagcccttttggagctggtgcaagacgtgaccctgaaggataaaatcgatcagctgcagtctgattatcaggacctgtgctctatcggcaaggcaatgatggaagaaattgcaggtttcgaggataggctcaacaacctgcagatgaagggcgataccctgataggacagtgcgctgaccatcttcaggctaagctgaagcaaaacgtacacgctcatttacagggaacgaaggactcttatagtgccatttgtagcacagcgcagagaatgtaccagagtctagagcatgaactgcagaaacacgtgtccagacaggacactctgcaacagtgccaagcgtggctgagcgccgtccaacccgacctggagcccagcccccagcctccactgagcagagctgaggccattaagcaggtgaagcatttccgggcattacaggagcaggcccgcacctacctggacctcttatgtagcatgtgcgacttgtccaatgcgtctgttaagacaaccgcaaaagacatccaacagacagaacagactatcgaacagaagttagttcaggctcagaacctcacacagggctgggaagaaattaagcacctgaagagcgaactgtggatttacttgcaggatgccgatcagcagctccaaaatatgaaacgcaggcacagtgagctggaattgaacattgcacagaatatggtgtcccaagttaaggacttcgttaagaagctgcaatccaaacaagcttcagtgaataccataattgagaaagtaaacaaactgactaaaaaggaggaaagccctgagcacaaggagattaaccatctgaacgatcagtggcttgacctgtgcaggcagtccaataatctgtgccttcaacgcgaggaggacctgcaaaggactagagactaccacgactgcatgaatgtcgtggaggtttttctcgagaaattcaccaccgagtgggacaatctcgctcgatcggatgcggagtccaccgccgttcacctggaggctcttaaaaagttagcccttgccctacaggagcgtaagtacgccatagaggacctgaaggaccaaaagcagaaaatgatagagcacttaaacctggacgacaaggagctggtaaaggaacagacatcacaccttgagcagaggtggtttcagctggaagacctcatcaagcgaaagattcaggtctctgtgactaatctggaggagctgaatgttgtccagtccaggtttcaggaactgatggagtgggcggaggagcagcagcctaatatagccgaagcgctcaaacagagtcccccacctgacatggcccaaaatctgttaatggatcacctggcgatctgcagcgagctggaggccaagcaaatgctgttgaagtctttgatcaaggatgctgaccgggtgatggccgacctaggtctcaatgagcgccaggtcatccaaaaagcattaagtgatgcccagagccacgtgaattgcctcagtgacctggtgggccaacgccgaaagtatctgaataaggcactaagcgagaagacacaattcttgatggcggtgttccaagccacgtcacagattcagcaacacgagcggaagatcatgttccgggagcatatctgtctcctgcccgacgacgtatccaaacaagtgaaaacatgtaagtccgcccaggcatctctgaaaacgtaccagaatgaggttaccggtctctgggcacagggtcgcgaactcatgaaggaagttacggagcaggagaaaagcgaagtactggggaaattgcaggaactgcagtcggtatatgactcagtcctgcagaagtgtagtcaccggttgcaggagctagagaagaacctcgtgtcgagaaagcactttaaagaggattttgataaagcttgccattggctgaagcaggccgacatcgttaccttccctgaaatcaatttaatgaacgaatccagcgaactgcacacgcagcttgccaaataccagaatattcttgaacaaagtcctgagtatgagaacctccttcttaccctgcagcgaaccggacagacaattctaccgtccctgaatgaggtggatcactcttaccttagcgaaaaattaaacgcactgcctaggcaatttaacgtgatcgtggcactggctaaggataaattttacaaagtgcaagaagcaattttagcaagaaaagagtatgcaagtctcatagagcttactacccagtccctgagcgaactggaagcgcagttcctgaggatgagtaaggttcccacggatcttgccgtagaggaagcccttagtcttcaggacggctgccgggctatactcgacgaggtcgctggcctcggcgaagctgtggacgaattgaaccagaagaaagagggctttcggagcactggccagccttggcagcccgacaaaatgctgcacttggtcacattatatcacaggctgaaacggcaaactgagcaacgtgtatcactgctcgaggatacaaccagtgcataccaggaacacgaaaaaatgtgtcaacagctcgaaaggcaactgaagtctgtgaaagaggagcaatccaaagttaacgaggagaccctgcctgccgaggagaagttgaaaatgtatcacagcctggccggatccttgcaggactccggcattgtgctaaagagagttacaatccatcttgaggacctcgctcctcaccttgaccccctcgcatacgaaaaggctcggcaccaaattcagtcttggcagggggagctaaagctgctgaccagcgccatcggggagacagtcaccgaatgcgaaagcaggatggttcaatcaatcgacttccaaacggaaatgtcccgctctcttgactggctgaggagggttaaggcggaactaagtggaccagtgtacctggatctgaacctccaggatatacaggaggagatcaggaagattcagatccatcaagaggaagtgcagtcctcactacgaattatgaatgcactgagccacaaggagaaagaaaaattcacaaaggcaaaggagttgatctccgctgacctggaacactcgctggcagagctcagtgagctcgatggcgacatccaagaagcattgaggacacggcaggccaccttgaccgagatttactctcaatgtcaacgctattatcaggtctttcaggcagcaaacgactggcttgaggatgcccaggagttattgcagttggccggcaacggattggacgtggagtctgcagaggagaacttaaagtcgcatatggagtttttttctacagaggatcaattccacagtaaccttgaagaactgcatagtttggttgccactctggatcctttaatcaagcccacgggaaaagaggacctggaacagaaagtggcctccctggagctgagatcccagaggatgtccagggatagcggggcccaggttgatttgctccagcgatgtacagcccagtggcatgattaccagaaagcacgggaagaagtgatcgaactgatgaacgatacagagaaaaaactcagtgaattctccctgctgaagaccagctcttcccacgaagctgaagagaaactctcggagcataaggccctcgtgagcgtcgtgaattccttccatgagaagattgtggccttagaggagaaggcaagtcagttagagaagaccgggaacgatgctagcaaggctaccctctcccgttctatgactaccgtatggcagcgctggacccgtttacgagcggttgcccaggaccaggaaaagatcttagaggacgctgtggacgagtggacagggtttaataacaaggtcaagaaagccacagaaatgatcgaccagctccaggataaattacccggatcttctgccgagaaggcatctaaggcagaattactgaccctgttagagtaccacgacacttttgtcctcgagctggaacagcagcaatctgcacttggcatgcttcggcagcagacactgtccatgctgcaagacggggctgcacccacacccggggaggagccaccactgatgcaggagattacagctatgcaggaccgctgcctcaatatgcaggagaaggtgaaaaccaacggaaagctcgttaagcaagaattgaaggatcgggaaatggtggaaactcaaatcaattctgtaaaatgttgggtgcaggaaacaaaagaatacctgggtaatccgacaatcgaaatcgacgcccaattagaggaactacaaattctcctcacggaagcgaccaaccatcggcaaaatattgaaaaaatggctgaagagcaaaaagaaaagtacctgggtctgtacactatattaccgagtgagctgtccttgcagctagctgaggtggctctggacttgaagatccgggaccagatccaagataagattaaggaggtcgaacagagcaaagctaccagccaagagctgtctcgacaaattcaaaagctggcgaaggatctcaccaccatcctgactaagctgaaggctaagacagataacgttgtacaggctaaaaccgatcagaaggtgctaggagaggaactggatggctgcaactcaaagctgatggagctggatgcagcagtgcagaagtttttggaacaaaacgggcaactgggtaaacctttagctaaaaagatcggcaaactcactgagctccaccagcagacgatcaggcaggcggagaaccgcctgagtaaactgaatcaggcagcatctcatctggaagaatacaatgagatgctcgagctaatactgaaatggattgaaaaagcgaaggttctcgcccatggtaccatagcctggaacagcgcttctcagcttcgagagcagtacatccttcaccagacactgctggaagagtcaaaagaaattgactctgagcttgaagcaatgactgaaaaactgcaatacctgacctcagtgtattgtacagaaaagatgagccagcaagtcgccgagctcgggagggagacggaggaattgcgtcaaatgattaaaattcggctgcagaaccttcaggatgccgctaaggatatgaagaagtttgaagccgagctcaagaaactgcaagcagctctggagcaagctcaagctacgttaacgtcgcccgaagtgggtagattatccttgaaggaacaattgagccacaggcagcaccttttaagtgaaatggagagtctcaagcctaaggtgcaggccgtgcagctgtgtcagtctgccttacgcattccagaagacgtcgtggcttccttacccctgtgccatgcagcccttcggttgcaggaggaggcctctcgactccagcacaccgcaatccaacagtgcaatatcatgcaagctgctgtcgtccagtacgaacaatatgagcaggagatgaagcacttacagcagctgatcgaaggcgcccacagagaaattgaggataagcctgtggctacttcaaacattcaggagttacaggcacaaatttctagacatgaggagttggcccagaagatcaaaggctaccaagaacagatcgcttctttgaatagcaagtgcaaaatgttgacaatgaaggccaagcatgccaccatgctactcacagtcacggaagttgaaggattggctgagggcacagaggacctggacggggaactgctgcccaccccatccgcccaccctagcgtggtgatgatgactgcagggcgttgccacaccctgctcagcccagtgaccgaggaatccggggaggaaggtacaaacagtgagataagcagtcctcctgcttgcagaagcccctcacccgtggcaaacactgacgcatctgtgaaccaggatattgcctactaccaggcccttagcgctgagcggctgcagacagacgcagccaagatccacccttcaacctccgcttcccaggagttctatgagcccggactggagccatcggctaccgctaagcttggcgacttgcagcgatcctgggagactctgaagaacgttatcagcgagaaacagcgcaccttgtacgaggcgttggaacgccaacagaagtatcaagactccctccagtcgatcagcaccaaaatggaagctatcgagctgaagctttcagaatcaccagaaccagggagatcccccgaatcacaaatggccgagcaccaggcactgatggacgaaattctgatgttgcaagatgaaattaatgagctacagagttcgctcgccgaagaattagtctccgagtcttgtgaggccgaccctgccgaacagctggccctacagtccaccctcacggtgctggcagagagaatgtccaccatcaggatgaaagcctccggaaagaggcaattactggaggaaaagctgaacgaccaactggaggagcagaggcaggagcaagccctacaacggtatagatgcgaggccgacgaactagatagctggcttctttctacaaaggccactttggacacagcccttagccctcctaaggaacccatggacatggaggcccagctaatggattgccaaaatatgttggtggagatagagcagaaggtggtggccctgagcgagctcagtgtgcacaacgaaaatctgctcctggaaggcaaggcccacacaaaagacgaggccgagcagctcgccggcaaactccgccgtctcaagggctcactgttggaactgcagcgtgctctccacgataaacagctcaacatgcagggaaccgctcaggagaaagaggagagcgatgttgacctgaccgcgacccagtcacccggagtacaggaatggctggcccaggcccgaactacctggacgcagcagaggcagtcttccctacagcagcagaaagaactcgagcaggagcttgcggagcagaaatcactgttgaggagtgtggcaagcagaggcgaagagattttaatccaacacagtgccgcagagacctctggggatgcgggcgaaaagccagacgtgttgtcccaagagctgggaatggaaggagaaaagagctcagccgaagatcagatgagaatgaagtgggaatctttgcatcaggagtttagtactaaacagaagctgctgcagaacgtgctcgagcaggaacaagagcaggtcctatacagtcgcccgaataggttgttgtccggcgtgcctctttacaagggcgatgtgcctactcaagataaatcagccgtcacctctcttctggacgggctcaaccaggcattcgaggaagtgagctctcaatcgggtggggccaagaggcagtccattcacctagagcaaaaactctatgacggggtttcggcaactagtacctggcttgatgacgtggaagagcgactgtttgtggccacggctctgcttcctgaggagaccgagacttgtctgtttaatcaagagatactggctaaggacatcaaagagatgtctgaggagatggacaagaacaagaatctgtttagtcaggccttcccagagaacggcgacaacagagatgtaattgaagatacattaggatgcctgctgggacgcctaagccttctcgactcagtggtaaaccagcgatgtcatcagatgaaagaacgcctccagcagatcctcaatttccaaaatgacctgaaggtgctgttcacatccctagccgacaacaaatatattatccttcagaaactggcaaacgtgttcgaacaacctgttgccgaacaaatcgaggctatccagcaagcagaggatgggctcaaggaatttgacgcagggatcatcgagttgaaaagacgcggggataagcttcaggtggagcaaccaagtatgcaagaactgtccaagctgcaagacatgtacgacgaactgatgatgataatcgggtccagaaggagtggactcaatcagaatttgactctcaaatcccagtatgagcgagctttgcaggacttggccgatcttctggaaaccggacaggagaagatggcgggcgatcagaaaattatcgttagtagcaaagaagaaatccaacagcttctggataaacacaaagaatattttcaggggttggaatcccacatgatcctgaccgagacattgttccgaaagatcatttcatttgcagtgcagaaagagacgcaattccacaccgagctaatggctcaagcgtctgccgtcttaaagcgcgcacacaagaggggggtggaactggaatacatcctggaaacatggtctcatcttgacgaggatcagcaggaattgtcaagacaactggaggtagtggagtctagcatcccatctgttggcctagtagaggaaaatgaagatagactcattgacaggatcacattataccagcacctcaaatcttctctgaacgaataccagcccaaattgtatcaggtccttgatgacggtaagagattgctgattagtatctcatgctcagatctggaatcccagttgaaccagttaggggaatgttggcttagcaatactaacaaaatgagtaaagaacttcacagacttgagaccattcttaaacactggaccagataccagtcagagagtgccgacctgatccattggttacaatccgcaaaggatagattggagttctggacccagcagtcggtgaccgtgccacaggaacttgagatggtgagagaccacctgaacgcttttctcgaattttccaaagaggtggacgcgcagtcatcattgaagagttccgtcctgtctaccggtaatcagctcctcaggttaaagaaggtagacacagccactctgaggagtgaactgtcccgaatcgattctcaatggacagaccttctgaccaacataccggcagtccaggaaaaactccatcagctgcagatggataaactgccctcacggcacgcaattagtgaagtgatgtcctggatttcattaatggaaaacgttattcagaaggacgaggacaatatcaagaacagcatcggttacaaagcaattcacgaatacctgcagaagtataagggattcaagatcgatataaactgtaaacagctgacggtcgacttcgttaaccagtctgtactgcagatctcttctcaggacgtggagagtaaacgctcagacaaaaccgattttgccgaacaactcggagccatgaataagagttggcaaatcctgcaggggctagtcactgaaaaaatacagctccttgagggcctgcttgagagttggtctgagtacgaaaacaacgtgcaatgtctgaagacatggtttgaaactcaagagaaacgcttgaagcagcagcacaggatcggggatcaggctagtgtgcaaaacgccctgaaagactgccaggatctcgaggacctcattaaagccaaggagaaagaggtggagaagatcgaacagaacgggctggctttaatccagaacaaaaaggaagatgtgagttcaatcgtaatgagtactttgcgggagttaggccaaacttgggctaatcttgaccacatggtggggcaactcaaaatcctgctcaagtccgttcttgaccaatggtccagccacaaggtggcatttgacaagattaactcttatctgatggaggcccggtactctctgagcagatttcgcctgctcacaggtagtcttgaagccgtacaggtccaggtggataatctacagaatctccaagacgacctcgagaagcaggaaaggtccttacagaaattcggcagcattacgaaccagctgctaaaagagtgtcacccacctgtaacagagaccctgactaacactttgaaggaagtaaacatgcgctggaataacctactagaggagatcgctgaacagcttcaatcttcaaaggccctgctgcagctctggcagcggtataaagattatagcaaacagtgtgcatccaccgtgcagcaacaggaggacaggactaatgagcttcttaaggcagccacaaacaaggacatcgctgacgatgaagtcgctacctggatccaggattgcaacgacctcctcaaagggcttggcacagtgaaagactccctcttcttcttgcatgagctaggcgaacagcttaagcagcaggtcgacgcttccgccgccagcgcaatccaatctgaccagctatccctgtcccagcatctctgtgcccttgaacaggccctgtgcaaacaacagacaagcctgcaggccggagttctcgattatgagacatttgccaaatcgctggaggcactggaagcgtggattgtggaagccgaagaaatactccaaggccaggacccatcccactcttccgaccttagcacgatccaagagcgcatggaagagctaaaggggcagatgttgaagttcagtagtatggctccagatctcgatagattgaatgagctcggctaccgcctgccattaaatgacaaggaaatcaaacgaatgcagaacttaaaccgccattggagcctcatctccagccagactaccgagaggttttccaaattgcagagctttttacttcagcatcaaacattccttgaaaagtgcgagacctggatggaatttcttgttcagactgagcaaaagcttgcggtggagatctctggaaactaccagcatttgctcgagcagcagagagcccatgagttgtttcaggccgagatgttctcccgtcagcagattctacactctatcatcatcgatggccagagacttttggaacagggccaggtcgacgaccgagacgagttcaatttgaagctgacgttactttccaaccagtggcagggggtcattcgaagggcgcagcagcgccggggcattattgactcccagatcaggcagtggcagcgctatagggaaatggccgagaaactgcgtaagtggcttgtagaggtttcatatctccctatgtctggtctcggaagtgtgcctatcccattgcagcaggcacggaccctattcgatgaagtccagtttaaggagaaggtcttcctcaggcaacagggatcctatatcctcacggtcgaggccggcaaacagctgttgttatcagccgattcaggagcagaggcagcccttcaggccgagttagcggagatccaagagaagtggaagagcgcatcaatgaggcttgaagagcagaagaaaaaacttgcctttctcttgaaagactgggagaaatgcgagaaagggatcgcagacagcctggagaagctgcgtacattcaaaaaaaagctgagccagtcacttccggatcatcacgaggagctgcacgctgagcagatgcggtgcaaagaacttgagaacgcagtggggtcttggacggacgacctcacccagctgagtctccttaaggatactctctcagcctacatatccgctgacgatatcagtatacttaacgaaagagtggagctgttacaaagacagtgggaggagttatgccatcagctttcattgaggcgacagcagatcggagaaagactcaacgaatgggctgtgttttctgagaagaacaaagagctgtgtgaatggctgactcagatggaatccaaagtgtcacagaatggagatatacttatcgaggaaatgattgaaaaactcaagaaagattatcaagaagagatcgcaatagcccaggagaacaagattcagctccaacagatgggggaacgactggcgaaagcctctcatgagagcaaagcctcagaaatcgagtataaactgggcaaggttaatgacaggtggcaacacctactggatcttatcgctgcacgggttaaaaaactgaaggaaaccctcgtcgctgttcaacagcttgataagaatatgagcagtctgcggacctggcttgctcatattgagagcgaattggccaaaccaatagtgtacgacagctgtaattctgaggaaatacagcgcaagctcaacgagcaacaggagttacaaagggatatcgaaaaacatagcactggcgtggcgagcgtgctgaacctgtgcgaagtcctcctgcatgactgtgacgcttgtgctacggatgctgaatgcgattccatccagcaggctactagaaacttagacaggagatggcgaaacatttgtgctatgtcaatggaacgcaggttaaagatcgaggaaacatggagactgtggcagaaatttcttgacgactacagccgtttcgaggattggttgaaatctagcgagaggactgccgcttttcccagcagttctggggtgatctataccgttgcaaaagaagagctgaagaagttcgaggcattccagaggcaggtgcatgagtgtctgacccagctagaactgatcaataagcagtacagacgcctcgcacgcgagaatcggacggactccgcttgctccttgaagcagatggtgcatgaaggcaaccagagatgggataaccttcaaaagcgagtgacaagtattctgcgcagactgaaacacttcatcgggcagagggaagagttcgagacagcccgcgatagcatcttggtgtggttgactgagatggaccttcagttgactaatatcgaacatttctcggagtgcgacgtgcaggcaaagattaaacagctgaaagcttttcagcaggaaatctccctgaaccacaataaaattgaacaaataatcgcccagggggaacagctaatcgaaaagagtgagcctttggacgccgcaattatagaggaagaactcgatgagttacgtcggtactgccaggaggtattcgggcgggttgagaggtatcacaagaagctgattagactcccacttcccgatgatgaacacgacctgtctgatagagagctcgagctggaagattcggccgcattatcagacctgcactggcacgaccgctctgcagactccctgctctctccccaaccttcctctaacctgtccctgtccctggcccagcctctgaggagcgaaaggtctgggagagacaccccggcatccgttgatagcattccactcgagtgggaccatgactacgacctgtccagggatctggaatcagccatgagcagggcactgccaagcgaagacgaggagggccaagacgacaaagatttctacctgcgaggcgcagtgggactgtctgatgttatgattccagagtcccctgaagcctatgtaaaactgacagagaacgcaattaaaaacacctctggcgatcactcagctctggagtctcagataagacagctggggaaagccctggatgactctcggttccaaattcagcaaactgagaatatcattcgaagcaaaacgcccaccggacccgagcttgacacttcctacaaaggatacatgaagctgttaggtgagtgctccagctcgatcgatagtgtgaagagactggagcacaaactgaaagaagaggaggaatcactgccaggtttcgtcaatctgcattccactgagacacagacggccggcgtgatcgaccgctgggagctgttgcaggctcaggccttaagtaaagagctgaggatgaaacagaatctgcagaagtggcaacagttcaacagcgacctgaatagcatctgggcctggttgggagatacagaggaagagctggagcaattgcagcgtttggagctcagtacagatatacagacaattgagttacaaatcaaaaaactcaaggagctgcaaaaggcggttgatcatagaaaggccatcatcctgagcattaatctgtgctcaccagagtttacccaggcagactctaaagagagcagggacctacaagatagactgagtcagatgaatggaaggtgggatagagtgtgtagcctcttagaagagtggcgtgggcttttgcaggatgcactgatgcagtgccagggctttcacgagatgtcccatgggctattactcatgctcgagaatattgaccggcggaagaatgagatagtacctatcgactctaacctggacgctgagatactccaggatcaccacaagcagctgatgcaaatcaaacatgaactacttgagagccagttgcgcgtggcgagcctacaggacatgtcttgtcaactgttggtcaatgccgagggtactgactgtctggaagcaaaagagaaagtccatgtaatcggcaaccgtctcaagctgctgctgaaagaggtgtccagacacatcaaggagctcgaaaaactgctggacgtgtcatcatcccagcaggatctgtctagttggagttccgccgatgaattggatactagcggctctgtaagccctaccagcggaaggtctaccccaaatcggcagaagactcctcgcgggaagtgctccctctctcagcctggaccatctgtaagttcaccgcattcaagatcaacaaaggggggctcagattcctccctaagcgagccaggtcccggtcgctcagggaggggttttttgtttcgggtgctgagggccgccctccccctacagctgcttctcttgctattaatcggactcgcgtgcctggtcccaatgagtgaggaggattacagttgcgccctgtccaataacttcgctaggtcgtttcacccaatgttgagatacactaatggcccccccccactctag

SEQ ID NO: 206672 - DNA, 26250 bp, synthetic construct
  misc_feature 1..26250: note = Description of Artificial Sequence: Synthetic coding sequence
  source 1..26250: mol_type = other DNA
atggccaccagccggggcgccagccggtgcccccgggacatcgccaacgtcatgcagagactgcaggatgaacaagagatcgtccagaagagaacattcaccaagtggatcaatagccatctggcaaagcgtaagcccccgatggtagtagatgatctgttcgaagatatgaaggatggagtaaaactgttggcccttctggaagtgctttctggacagaaactcccttgcgaacagggtcgtcgaatgaaacggatccacgcagtggctaatatagggacggcactcaaatttctggagggaagaaaaagtatgcatcgcggctcacccatcaagctcgtgaatattaactctacggacatcgccgacgggcggcctagcatcgtgctgggactgatgtggacaatcatcctgtacttccagatcgaagaactaacaagcaacctgcctcaactccagtctttgtcttcgtccgcttcctctgttgactcaattgtgtccagcgaaaccccttctccaccctcaaaacggaaggtcaccactaagattcaaggcaatgccaagaaggcattgctgaagtgggtccagtatacagcgggcaagcagaccggtattgaagtaaaggactttggcaaatcttggagaagtggcgtcgcattccattccgtaattcacgcaattagaccagagttggtggacctggagacagttaaggggagatctaatcgggagaatctcgaggacgcctttacaattgccgagaccgaactgggcatacccaggcttctagatccggaagatgtggacgtggacaaacccgatgaaaagtcaattatgacatacgtggctcaattcctcaaacactatcccgacatacataacgcatctaccgatggtcaggaagatgacgagatcctgccgggttttccctcattcgctaactccgttcagaatttcaagcgtgaggatcgggtcatcttcaaggaaatgaaggtgtggattgagcaatttgaacgagatctcacccgcgcacaaatggtcgagtcaaatttgcaggataagtaccagagcttcaaacatttcagggtgcagtatgaaatgaagcgcaagcagattgaacatctgatccagcccctccatcgcgacgggaaactgtccttggaccaagctctagtgaagcaatcatgggatagggttacctccaggttattcgattggcacattcagctggataaaagccttccagctcctctgggtaccatcggcgcctggctgtaccgcgctgaggttgcactcagagaggagatcactgtgcagcaggttcacgaagaaacggccaataccatccaacgcaaattggaacagcataaggacctgctgcaaaacactgatgcacacaagcgggcttttcacgagatctatcgcacacggagcgtcaatgggatccccgtgcctcccgatcagttagaggatatggccgagaggtttcacttcgttagctcgacttcagagctgcacttaatgaaaatggagtttttggagctgaagtaccgtctcctctccttgctggtgctcgcagaatccaaactgaaaagttggattatcaaatatggacgccgagagtctgtggagcagctcttgcagaactacgtgtcatttattgagaatagtaagttctttgaacaatacgaagtcacttaccaaatcttaaaacagaccgccgaaatgtatgtgaaagccgacggatccgtagaagaggccgagaatgtgatgaagttcatgaacgagactactgcccaatggcggaacctgtccgttgaggttagatctgtgagatcaatgctggaggaggttatctctaactgggaccgctatggtaacaccgtcgctagtctgcaggcctggctggaggacgctgaaaagatgttaaaccaatcagagaatgcaaaaaaagactttttccgcaacctgccacactggatccagcaacacactgcgatgaacgacgccggcaactttctgattgaaacatgcgacgagatggtttcccgggacttaaagcaacaactgttgctgttgaatggtcgctggagagaattgtttatggaggtaaaacaatatgcccaggcggacgagatggaccgcatgaagaaagagtataccgattgtgttgtaacgctctcagccttcgcgacagaagctcacaaaaagctctcggaacctctagaggtgagctttatgaatgtgaagcttctgattcaggaccttgaagacattgaacaaagagtccccgtgatggacgcccagtacaagatcattaccaaaactgctcacctcatcaccaaagagtctccacaagaggagggaaaggagatgttcgcaacgatgagcaaactcaaggaacagttaaccaaagtgaaagagtgctactctcctctcctctatgaatcgcagcaactactcattcccctggaagaattggagaaacagatgacctctttctacgatagcctcggaaagattaacgagataatcacagtgctggagcgagaggcccagagcagtgctttgttcaaacagaaacatcaagaactgctggcatgccaggagaactgcaagaagacgctcacgctcatcgagaagggatcccagagtgtgcagaagttcgttaccctcagcaacgtcctgaaacactttgatcagactagactgcaacgccaaatcgctgacatccacgttgcatttcagagcatggtgaaaaaaactggggactggaaaaaacatgttgagaccaatagccggctgatgaagaaattcgaagaatctcgagccgaactcgagaaggtgctgcggatcgcacaggaagggttagaagagaaaggggacccggaggagctcctgcgcaggcataccgaattcttctcccaattagatcagcgagtgctgaatgcattcttgaaggcatgcgatgagctgaccgatatcctgcccgagcaggaacagcagggtctgcaagaagccgtgcgaaagctgcacaagcagtggaaggaccttcaaggcgaggccccataccaccttcttcatctaaagatcgatgtcgaaaagaaccgattcctggccagcgttgaggaatgcaggacagagctcgatcgggaaacgaaactcatgccgcaggagggctctgaaaagattatcaaggaacatagagtgtttttcagcgacaagggaccacatcacctctgtgagaaaaggcttcagcttattgaggagctctgcgtcaaacttccagtgcgggatcctgttagggatactccaggaacctgccatgtcactctaaaagagctgagggctgccatagacagcacataccgcaagctcatggaagatcctgataaatggaaggactataccagccgctttagtgaattttcctcctggatttccaccaacgagacccaactgaaggggatcaaaggagaagctatagacaccgccaaccacggtgaggtaaagcgtgccgtagaggagatcaggaatggggttactaagaggggggaaactttgagctggcttaagagtagacttaaggtccttaccgaggtgtccagtgagaacgaagcccagaaacagggcgacgaattggcaaagctttcctcatcattcaaagccctggtgaccctgctgagcgaggtggagaagatgttatccaacttcggcgactgtgtacagtacaaggagattgtcaagaacagtctcgaggaactgatttccggatctaaggaggtccaggagcaggccgagaaaattttggatactgagaacctctttgaggctcagcagctgttgctccatcatcaacaaaagacaaagcggataagtgccaagaagcgggacgtgcagcagcaaatcgcacaggcacaacagggcgagggcgggttgcctgatcgtgggcacgaggagctgcgcaaactcgagtcgacactcgatggcctggaacgcagtcgggagcggcaggaacgaagaatacaagtgaccctaagaaaatgggagcgttttgagacaaacaaggagactgttgtgcgctacctctttcaaaccggctcttcgcatgagaggttccttagtttcagtagtttggagtccctgtctagcgaattagagcagacaaaggaattctcaaagcgtactgagagcatcgcagtgcaagccgaaaacctggtcaaggaagcatccgagatcccgctaggacctcaaaataagcagctgctacagcagcaggccaagtctatcaaagagcaggtgaaaaagctcgaggataccttggaagaagatataaaaacaatggagatggtgaagacgaagtgggaccacttcgggagcaactttgagacactgtctgtgtggattaccgaaaaagagaaggaactgaatgctttggagacatcctcttctgccatggatatgcagatctcacaaatcaaggtcaccattcaggagatcgagagtaagctctcgtctatcgtcggacttgaagaggaagcccagagctttgcccagttcgttactactggagagtctgcacggatcaaggcaaaattaacacaaatcagacgctatggcgaagaactgagagagcatgcccagtgcctcgagggaacaatcctgggccacttgagccagcagcagaaattcgaagagaatctgcgcaaaatccagcagagcgtaagtgaattcgaggacaagctggctgtacccatcaagatctgttcttccgcgaccgaaacatacaaggtgctgcaggagcatatggatctttgtcaggccctcgagagcctgtctagtgccatcactgccttctcggcgtcggctaggaaggtcgtgaaccgagattcttgcgttcaggaggccgcggccctgcaacaacaatatgaggacatccttagaagagctaaggaaaggcagaccgctctagaaaatctcttggcacattggcagcggctggagaaggaactctcctccttcttaacatggctcgagcggggggaggctaaagccagctccccagagatggatatatcagccgaccgcgtgaaggtggaaggcgagctgcagctcatacaggcctcgtccaggaagtttgtgagccaggctagcttttatagcaaacttctgcagctgaaagagtcactcttctccgtcgcctctaaggacgacgtgaagatgatgaagctgcacctggagcaacttgatgaaagatggcgcgaccttccccagatcatcaataaacgcatcaattttcttcagtctgttgttgccgaacaccagcaattcgacgagttgctgctttccttttcagtgtggatcaaattatttctctccgaattgcagacaaccagcgagattagcattatggaccaccaggtggccctgactaggcataaagaccatgctgcagaggtcgagagcaaaaagggagagctgcaatctctgcaaggtcatctggccaagctaggaagccttggacgcgcagaagacctccatctgctgcaagggaaagccgaagactgcttccagctctttgaagaggcctctcaggtggtcgaaaggcggcagctggcgctgagccacctcgcagagtttctgcagtctcacgcttcgctatctggcatattaaggcagctgcgtcagaccgtcgaggctactaactccatgaataagaatgagagtgacctcatcgagaaggatttaaatgatgctttgcaaaacgccaaagcgctggaatcagctgccgttagcctggatgggatactatctaaagctcagtaccacctgaaaataggcagttccgaacaacggacttcatgccgtgccacggctgaccaactctgtggcgaggtggagaggattcaaaacctgttagggaccaaacaaagcgaagccgatgccctggcagtgctgaaaaaagcattccaggatcagaaagaggagctgcttaagtctattgaggacatcgaggaacgaaccgacaaagagcgcttaaaggaacccaccagacaggctctgcaacagagattgcgggtgtttaaccagctggaggacgagcttaattctcacgaacacgagctgtgttggctgaaagataaggccaagcaaattgcacaaaaggatgtcgccttcgctccagaagtggacagagagatcaatagactagaagtgacttgggatgacacaaagcgactgatacacgaaaatcagggccaatgctgcggcctgatcgatttgatgagggaataccagaatctcaaatcagccgttagtaaggtgctggagaacgcctcatccgtgattgtgacccgcacaacaattaaggaccaggaggacctcaaatgggcattttctaagcacgagaccgcaaaaaataaaatgaactataagcagaaggacctggacaactttacctctaagggtaagcatctgctgagcgagctgaagaagattcacagcagtgacttttccctcgtaaaaacagatatggaatcaacagtcgacaagtggcttgatgtgagtgaaaaattggaggaaaacatggaccgcctgcgggtgagtctgtcgatttgggacgacgtcctgtcaacaagggatgagatcgagggttggtctaacaattgcgttcctcaaatggccgagaacatcagtaacctcgataaccacttgagggcagaggagttgttgaaagaatttgaatcggaggtcaagaataaggctctgaggctggaggaactgcacagcaaagtgaatgatctcaaggaactgacaaaaaatctcgaaaccccccccgacctgcagtttattgaggcagatctgatgcaaaaactggaacacgccaaggagattaccgaagtggctaagggaaccctgaaggacttcactgctcagtcgacacaggtggagaaatttataaatgatatcaccacgtggtttacgaaagtcgaagagagcctgatgaattgcgcacagaacgaaacatgcgaagccctgaaaaaagttaaagatattcagaaagaattacagtctcagcagagcaacattagcagcactcaggaaaacctgaactccctgtgtcgaaagtatcactcagcagagctcgaatcattaggtcgggcgatgactgggctgatcaaaaaacacgaggctgtgagccagctatgttcaaaaacacaggctagccttcaggaatcactcgaaaaacatttcagcgaatctatgcaggaatttcaggaatggttcctgggcgcgaaggcagcagcgaaagagtccagcgaccggaccggagacagcaaggtgctggaggctaagctgcacgatctacaaaatatcctggactcagtttccgatggacagagcaaactggacgcggtgacgcaagaagggcagaccttgtatgcccatctttccaagcagatagtgtcaagcatccaagagcagatcaccaaggctaatgaggaattccaagcattcctcaaacagtgcctcaaggataagcaggccttgcaggattgcgcaagcgaactcgggtcatttgaggaccaacataggaagttgaatctgtggatccacgaaatggaggaacgattcaacacagagaacctgggcgaaagcaagcagcacattcccgagaaaaagaacgaggttcacaaggttgagatgtttctaggcgagttgctcgccgcaagagagagtctggacaagctttcccagagaggtcagttactgtctgaggaaggacacggggccggccaagaggggaggctgtgctcccaattgttgacgtctcatcagaacttattgagaatgaccaaggaaaagctgcgctcctgtcaagtggcactacaggaacacgaggccttagaggaggcattacagagcatgtggttctgggttaaagctatccaggacagactggcttgcgctgagtctacgcttggctcgaaagacaccctggagaaacgtctgagccagattcaggatatacttctcatgaagggcgaaggggaggtaaagttaaacatggccattgggaaaggagaacaggcactgaggtcatccaacaaggagggccagcgtgtcattcaaacccagctggagactttgaaagaagtttgggccgatattatgtcatcatctgtacatgcacagtcaacactcgagtctgtcatctctcaatggaacgactacgtggaacggaagaaccagctggaacagtggatggaaagcgtagatcagaaaattgagcaccccctgcagccccagcctggcctcaaggaaaaatttgtactcctcgatcatctacagtcaatccttagcgaggcagaagatcatacgagggccctccaccggcttatcgccaaatcccgtgagctttacgagaagaccgaggacgagtccttcaaggatacggcccaggaagaactcaagacccaattcaacgatataatgacagtggcaaaggagaaaatgcgcaaggtggaggaaattgtgaaagatcatctgatgtatcttgacgccgtccatgaattcacagactggctccactctgccaaagaagagttacatagatggtctgacatgagtggagatagttctgcaacgcagaaaaaactcagcaaaataaaagaattaattgattcccgggaaatcggagcatcaaggctgagcagagtggagtccttggctccggaggtcaaacaaaatacgacggcttctggatgtgaactgatgcacacagaaatgcaggctcttagagctgattggaaacaatgggaagacagtgtgtttcagacacaaagctgccttgagaatttggtgagtcagatggcattgtctgagcaggagttctcgggacaggtagcacagctggagcaggcccttgagcagttctctgcattgctaaaaacttgggcccaacagttgaccctgcttgagggcaagaatacggatgaagagatcgtcgagtgctggcacaagggccaggagattctggatgccttgcagaaagcagagccacggaccgaagacctgaaatcccagctgaacgaattatgccggttttctagagacttatctacctacagcggaaaggtgtctggactgatcaaggagtataactgtctctgtctgcaggctagcaaaggctgccaaaacaaagagcagattctccagcagcgctttagaaaggccttccgggacttccagcagtggctcgtcaatgcaaaaattaccaccgccaagtgttttgacatccctcagaatatatccgaggtttccacatccctacagaaaatccaggaattcttgagcgagtccgagaacggccaacataagcttaatatgatgcttagtaaaggggagctgctttcaaccctcctgactaaagagaaagccaaggggattcaggccaaagtcacagccgcaaaggaagattggaaaaacttccattccaacttgcaccagaaagagtctgcactagagaatttaaaaattcagatgaaagactttgaagtctctgccgaacctatccaggattggctgtccaagacggaaaagatggtccatgaatcgtcaaataggctctacgacctccctgccaaaagaagggaacaacagaaattacagagtgtcttggaggagattcactgttatgagccccagctcaatcggctcaaggaaaaggcacaacagctgtgggaaggccaggctgcatccaagtcctttagacaccgcgtctctcagctcagcagccagtatctggcactctccaatttaacaaaggaaaaagtgtcacggcttgaccgtattgtcgctgagcacaatcagtttagcttaggaataaaggaactacaggactggatgactgacgcgatccacatgctagactcctactgccacccaacatcagacaaatctgtgctggatagcaggacactgaaactggaggcgttattgagtgttaaacaggagaaagaaatccagatgaagatgatagtgacaagaggcgaatctgttctgcagaatacttcacccgaaggaattccgaccattcagcagcaactgcaatccgttaaggacatgtgggcttccctgctgagtgcaggcatcagatgtaaatctcaactggaaggggccctgagcaaatggacaagctaccaggatggtgttcgccaattttcggggtggatggactccatggaagcgaatctgaatgaatccgagcggcagcacgcagagttacgtgacaagacgactatgctagggaaagccaagcttcttaacgaggaagtcctaagttattcctctctgttagagaccattgaagttaagggggcagggatgacggaacactacgtaacgcaactcgaactgcaggatcttcaggagaggtatcgcgctatccaggaaagggccaaggaggcggttacgaaatcagaaaaacttgtgcgactccaccaggaatatcagagagatctgaaagctttcgaagtttggctgggccaggaacaggaaaagctggatcagtattctgtgctagaaggcgacgcccatacccacgagacgactctgcgggatttgcaagagctgcaggtccactgtgcagaaggccaagcccttctgaactctgtgctgcataccagggaagatgtgatcccctccggtatacctcaggccgaggacagggccctggagagccttcggcaagactggcaggcataccagcaccgcctgtcggaaacacgaactcaattcaataatgtcgttaacaaattacgtttgatggaacagaaattccagcaggtggacgaatggctcaaaacagctgaagaaaaaaagtggcacgaagaggtgactgcataccgggacgaagttgaggaggtgggggccagggctcaggaaatactcgatgagtcccacgttaacagtaggatgggatgtcaagctactcagctgacttcccgataccaggcactactactccaggtgttggaacagatcaagtttctggaggaggagattcaatcgctcgaggagagcgaaagcagtctgtcctcctactctgattggtatggcagcacacataaaaatttcaagaacgttgctactaagatcgataaggttgacacagttatgatgggtaagaagcttaagacattagaggtgctcctgaaagacatggagaagggccacagtctgctgaagagcgcccgcgagaagggggaacgagccgtcaagtatctcgaagaaggcgaagccgagcgactgaggaaggagatacatgatcacatggaacagttgaaggaactcacaagcacagtccggaaggagcacatgaccttggagaaaggtctgcacctggcaaaagagttttctgataagtgtaaggccctgacacagtggattgctgagtaccaggaaatcctgcacgtaccagaagaaccgaaaatggaactctacgaaaagaaagcacagctcagcaaatacaaaagtctccagcagacggtactcagtcatgaaccctctgtgaaaagcgtcagagagaagggtgaggcacttctggaattggtccaggatgtgactctgaaggacaaaatcgaccaattacagtctgattatcaagacctttgctctatcggaaaagctatgatggaggagatcgccgggttcgaagaccggcttaataaccttcagatgaagggagataccctcataggacagtgtgccgatcacttgcaggctaaactgaaacagaatgtgcacgctcatctccagggcacaaaagactcctactccgcaatctgctcaacagcccagcgcatgtaccagagccttgaacacgagctgcaaaaacacgtgagccgccaggatactttgcagcaatgccaagcctggctctcagccgtacagcccgacttggagccgtctccccaacctccgctgagccgcgccgaagcaatcaaacaggttaaacacttccgagctttgcaggagcaggcaagaacctacctggacctcctgtgctctatgtgcgatcttagtaacgccagtgtcaagactacggcaaaggatatccagcagaccgagcaaaccatcgaacagaagctggtccaggcacagaacttaacccagggctgggaagaaattaagcatctgaaatccgagctctggatatacctgcaggatgcagaccagcaactgcagaatatgaaacgaagacacagcgaactggagctgaatatcgctcaaaacatggtgagccaggtaaaagactttgtcaagaagttgcaatcaaagcaagccagcgtcaacactatcatcgaaaaagtgaacaaactgaccaaaaaagaggagtcacctgaacataaggagataaatcatctgaacgatcagtggcttgacctttgcagacagagcaacaacctgtgcctccaaagggaagaagatttacaacggacccgagattaccatgactgcatgaacgttgtggaagtattcctggagaagtttacaactgagtgggataacctcgcgaggtccgacgcggagagcacagcagtccacttagaagctctgaaaaaactcgccctcgccctccaggagcggaaatatgcaatcgaagatctcaaggatcagaagcagaagatgattgaacacctaaatctggatgataaagagctggtgaaggagcaaacttcccacctagagcagcggtggtttcaactggaggacctgatcaaaagaaaaattcaagtgagtgtgaccaacctggaagagctgaacgtggtgcagagccggttccaggaattaatggaatgggctgaagagcagcagcccaacatcgcagaggccctcaagcaatccccgcctcccgacatggcacagaacctactgatggatcacctggccatctgtagcgaactggaagctaaacagatgctactgaaatctctgataaaggatgcagacagagtcatggcagacttgggccttaacgaaaggcaggtgattcagaaggctctcagcgacgcccaaagccatgtgaattgtctgtccgaccttgtgggccagagacggaagtacttaaacaaagcactgagcgaaaagacccagttcttgatggcagtgttccaagccacgtcacaaatccagcaacacgaacgcaaaatcatgttcagagagcacatttgtctactcccagatgatgtttcaaagcaggtgaagacatgtaagtccgcacaggcaagcctcaagacctaccagaatgaggtcactggattgtgggcgcaggggcgcgaattgatgaaagaagttaccgaacaggagaaatctgaggttctcgggaagctgcaggaacttcaatctgtttatgactcagtgctgcagaaatgttcgcatagactgcaagagctcgagaaaaacttggtttccagaaaacattttaaagaagacttcgacaaggcttgccactggcttaaacaggcggacattgtgacttttcccgagattaacctgatgaacgagtcctccgaattacacacacagttggccaaataccagaacatcttagagcagtctcctgaatacgaaaatttactactaacactacagaggaccggacagaccatactgccatcactaaatgaggtggatcattcatacctgtctgagaaactgaacgctttgcctcggcagttcaacgtaattgtcgcactagctaaagacaagttctacaaggtccaggaggctatactggcacgtaaagagtacgcctctcttatcgaactgacaactcagagcctctctgagctggaggcgcaattccttaggatgagcaaagtgcccaccgatctagcagtggaggaggctttgagcctccaagatggatgcagagccatcctggacgaggtagcagggctgggcgaagctgtcgatgaattgaatcagaagaaagaggggttccgttcaaccggccagccctggcaacccgacaaaatgctgcacctcgtaaccctatatcaccgcctgaaaagacagacagagcagcgcgttagtctcttggaagatacgacaagcgcttatcaggagcatgaaaaaatgtgccagcagctggagagacaactgaaatccgtcaaagaggagcaaagcaaagtgaacgaggagacactgcccgctgaagagaaactcaaaatgtaccacagtttggctggaagtctgcaagatagtggtattgtgcttaaaagggtgaccatccatttggaagacctggccccgcatctggacccgctggcgtacgagaaggccagacatcagattcaaagttggcagggcgaactcaagctgctaactagtgctatcggtgagactgtcaccgagtgtgaatccagaatggtgcagagcatcgatttccaaacggagatgtcccggtctctggattggctccgaagggtgaaagccgaattgagcggacccgtctacttagacctgaacctccaagatatacaagaggagattcgtaaaatccagatccaccaagaggaagttcagagctccctgcgaataatgaacgccttgtcacacaaggaaaaggaaaaatttaccaaggccaaagaactaatatccgcggatctggaacactcgctggccgagttaagtgaactcgatggagatatacaggaggccctgcggaccaggcaggcaaccctgacagaaatatactctcaatgccagaggtactaccaggtgtttcaggccgccaacgattggctggaagatgctcaggaactcctgcaattagcgggaaacgggttagacgtcgagagcgccgaggagaacctcaagtctcatatggaattcttttcaaccgaagaccagttccacagcaacctggaagaactgcacagcttagtggccacattagatccactcatcaagcccactggaaaagaggacctggagcagaaggtggcatctctcgagctgagaagccagaggatgtccagggatagtggcgcccaggtggacctgcttcagcgctgcactgcccagtggcatgattatcagaaagcgcgcgaggaagtaattgagctcatgaatgatacagaaaagaaactgagcgagttttccctgctgaagacttcttctagccatgaggccgaggagaaactttcagaacacaaggccctggtaagcgtggtgaacagctttcatgagaaaatcgttgccctggaggaaaaagccagtcagttggaaaaaactggcaatgatgcatcaaaagccacactgtcacggagcatgacgaccgtctggcagcggtggacaaggctacgagctgtcgcacaggaccaggagaagatcctcgaggacgcagtggacgagtggactgggtttaacaataaggttaagaaagctaccgagatgattgaccagctgcaggataagctgcccgggagctccgccgaaaaggcttctaaggcggagttgctgacgctgcttgaatatcacgacacattcgtgctggaactagagcagcagcagtctgctctcggcatgttaagacagcagaccctctccatgctccaggacggcgccgcacccactccgggcgaagaaccgccattgatgcaagagatcacagccatgcaggataggtgtctaaatatgcaggaaaaagtaaaaactaacgggaaactcgtaaaacaggaactgaaggatcgtgagatggtagaaacccagattaactcagtgaagtgctgggtgcaagagacgaaagagtacctcgggaaccctacgatcgagattgacgcacagctggaggagctccagatactgctgaccgaagccaccaaccaccgacagaacattgagaaaatggctgaggagcagaaagaaaagtatctcgggctctataccatccttcccagtgagctgagcctgcagctggccgaggtggctctcgatcttaagattcgtgatcagatccaggacaaaattaaagaagtggaacagtccaaggctacctctcaagagttgtcccgccagatccagaagctagcaaaagacctgacgaccatcttgactaaactcaaagccaagaccgataacgtagtgcaagccaagaccgatcagaaagttctcggggaagaactggatggctgcaactccaagctgatggagctggatgccgcagtacagaagttcctggagcagaacggacagctgggaaaaccgcttgccaagaagatcgggaaattaaccgagctgcatcagcaaactattcggcaagcagagaaccggctgagtaaactgaaccaggccgcaagccacctcgaagagtacaacgagatgcttgagttaatcctgaagtggatcgagaaggccaaggtgctggcccatggaacaatcgcatggaacagcgccagtcagttaagggagcagtacatcctccaccagacactattagaggagtctaaggagatagactcagaattagaggccatgaccgaaaagctgcaatatcttacttccgtgtactgtaccgaaaaaatgtcacagcaggtagccgaactaggacgcgagaccgaagaattacgccaaatgatcaaaattcgacttcaaaatctgcaagacgcggctaaagacatgaaaaaatttgaggccgagctgaaaaagctgcaagccgcactggagcaagcccaggcgaccctgacatccccggaagtggggaggctgagcctaaaagagcagctgtcacacaggcaacacctgctgtccgagatggaatccctgaagccgaaggttcaggccgttcagctgtgccaatccgcgttgagaattcccgaggacgttgtggcttccctgccgctgtgtcacgctgcacttaggcttcaggaggaggcctctagactccagcacaccgctatacagcaatgcaacattatgcaggccgccgtggtgcagtatgaacagtatgaacaggagatgaaacacctgcagcagctcattgaaggtgcgcatcgggagattgaagacaaacctgtggcaacatctaatatacaggaactgcaggctcagatctctaggcatgaggagcttgctcaaaagataaagggctaccaggagcagatcgcaagcctcaacagcaagtgtaaaatgcttactatgaaagccaagcatgccacaatgcttcttaccgtgaccgaggtcgaggggctggctgagggcaccgaagacctagatggggaactgctgcccacaccttccgcgcacccttccgtggtgatgatgacagcagggcgctgccacactcttctgtctccagtgacagaagagagcggggaggaaggcaccaacagtgaaattagcagccctcccgcctgcagaagcccatccccagtggctaacacagatgctagcgtcaatcaggacattgcctattaccaggccttatctgcggagcgactccagaccgatgcggccaagatccatccaagtacctctgcctctcaagagttctatgaaccaggtttggagccgagtgcaactgcaaagctgggggacctccagcggtcttgggagacactgaaaaatgtgatatctgagaaacagcgcacgctttacgaagctctcgaacgacagcagaaataccaggactcgttacaatcaatttcgacaaaaatggaagcaatcgaattgaagctgagtgaatcccccgagcccggtaggtctcctgaaagccaaatggcagagcatcaggcccttatggacgagatcctcatgctccaggatgaaatcaacgagctgcaatcctctctggcggaagaattggtcagcgaaagctgcgaggccgatcccgctgagcagctggccttacaatcaaccctgacagttttggcagaaagaatgtccacaatccgtatgaaggcaagtgggaagaggcagctgctggaagaaaaactgaacgatcagcttgaggaacaaagacaggagcaggcactccaacgctaccggtgcgaagccgatgagctggacagctggctgttaagcaccaaggccactcttgacacagccctctcgccacccaaggagcccatggatatggaggcacaattgatggactgccagaacatgctggttgaaatcgaacagaaagtggtggctttatccgagctatcagtgcacaacgagaatctgctgttagagggcaaggcacacacaaaggatgaagctgagcaactagctgggaaattacgtcgcttgaaagggagcttgttggagctgcagagagccctccatgacaagcagctcaatatgcaggggactgcgcaggaaaaggaagagtctgacgtagacctgaccgcgacacagtctccaggcgttcaggagtggctggcccaagctcggacaacatggacgcaacagaggcagtcttcccttcagcagcaaaaagaactggagcaggaattggccgaacagaaaagtctcctcaggagcgtggcaagccgaggggaggaaatcctcatccagcactctgcagccgaaaccagtggagatgctggagagaaacctgatgtgctgagccaggaactgggtatggagggcgagaaatccagtgctgaggaccagatgagaatgaagtgggaaagcctacaccaggaattcagcactaagcagaagttactgcaaaacgtactggaacaggaacaggagcaggtgctgtacagcaggcctaaccggttgctgtctggcgtcccactgtacaagggagacgtccctactcaggataaaagcgccgttacttctctactcgacggcctgaaccaggcttttgaggaagtcagttcccagagtggtggtgccaaacgccagtccatacacttggaacaaaaattgtatgatggggtgtcagctacgtccacctggctggatgatgtggaagagcgcctcttcgtggccaccgctctgctccctgaggagactgagacatgtctcttcaatcaggagattctcgccaaggacattaaagagatgagtgaggagatggacaagaacaagaatctcttttcccaggccttccccgaaaatggcgataatcgcgacgtcatcgaggataccctgggatgtctgctgggacgcctgtctttgctggattcagtcgtcaatcaacgctgtcatcagatgaaggaaaggctgcagcagattctcaacttccagaacgacctgaaggttcttttcactagtctggcagataacaagtacatcatactgcaaaaactcgcgaacgtattcgagcaacccgtggctgagcagatcgaggcaattcagcaagcagaagatggtctgaaggagttcgacgccgggattatcgaattaaagcgtagaggagacaagttacaggtcgaacagccttcaatgcaggagctctcaaagctacaggatatgtacgatgagttaatgatgatcataggctcgagacgaagtggtctgaatcaaaatctgaccctcaagtcgcagtatgaaagggcgctgcaggacctcgctgacctgctggagaccggacaggaaaagatggcgggggatcaaaagatcatcgttagttctaaggaggagatacagcagttgctggataaacataaagaatattttcagggattggagtctcacatgatcctgactgagacgctgttcagaaagataataagctttgctgtccagaaggagacccagtttcacaccgaactcatggcccaggctagtgctgtgttaaaacgagcccacaaaaggggcgtcgaactcgaatatattttagagacatggagccacctcgacgaggatcagcaggagctttcccgtcagctagaggtggtggagagcagcattccctccgtcggactcgtggaggagaacgaggatcgcctgatcgatagaataacactctaccagcacctgaagtcgtccctcaatgaataccagccaaaactgtatcaggttctggacgacggtaagcgcttgcttatcagcatttcctgctcggaccttgagagccagctaaatcagcttggggaatgctggctctccaataccaataaaatgtccaaagaactgcaccgcctcgaaaccattctgaagcactggacacggtaccagtcagagtcagccgacctaatacactggcttcagtccgctaaggaccggctggagttctggacacagcaatcagtgaccgttccccaagaactcgaaatggtccgagaccatctgaacgcgtttcttgagttttcaaaagaggtggacgcccagtcgagtctaaagtcttccgtcctgtcgactggcaatcagctactaaggcttaagaaagtggataccgccaccctccggtctgaactctctcgtatcgactcccagtggactgacctcctgaccaacatccctgcagtccaggagaaactgcaccagctgcagatggataaactgccaagtaggcacgccatatccgaggtaatgtcctggatttcgttgatggaaaacgtaatacagaaagatgaagataatattaaaaactccatcgggtacaaggccatccatgagtatcttcagaaatacaaaggtttcaagatcgatataaactgcaagcagctcactgttgattttgttaaccagagtgttctacagatcagtagccaagatgtggagtctaagagatctgataaaaccgattttgcagagcaattaggcgcaatgaacaagtcgtggcagattctgcaggggctggtgactgaaaaaattcagctgctggaaggcctccttgaaagttggagtgagtacgagaacaacgtgcagtgcctcaagacctggtttgagacacaagagaagcgtctgaagcagcaacacagaatcggcgatcaggcctctgtgcagaacgccctcaaagactgtcaggaccttgaggacctgatcaaagctaaagaaaaagaagtggaaaaaattgaacaaaacgggctggcacttattcagaataagaaggaagatgtctcttccattgtcatgagcacactgagggagcttgggcagacctgggctaacctggaccacatggttgggcagctaaagattttattaaagtcagttttggaccagtggagcagccataaggtggcctttgacaaaataaattcttaccttatggaagcgagatattcactgtcacgctttcgcctactaactggttcccttgaagcagtgcaggtccaggtcgacaatcttcagaatttgcaggatgatctggagaagcaagagcgtagccttcaaaaatttggctccattaccaatcaactgctgaaagagtgccatccgcccgtcacggaaacacttaccaacacactgaaggaggtaaatatgagatggaataaccttctggaagagatagccgagcagctgcaatcatccaaggccctgctgcagctctggcagagatacaaggactatagtaagcagtgtgccagcacagtgcagcaacaggaggacagaactaacgaattattgaaggccgccactaataaagatatcgccgacgatgaggtcgctacatggatacaagactgcaacgatctgctcaagggacttggtacagtaaaggacagcctgtttttcctgcatgagctgggtgaacagcttaagcagcaggtcgacgcatctgctgcttccgcgatccagagcgatcaactctctttgtctcagcacctctgcgcacttgagcaggcgctgtgtaaacagcagacgtccctgcaagcgggagtgttggactatgaaacattcgctaagtctctggaagctctggaggcatggatagtggaggccgaagagattctgcagggccaggatcccagtcattcgagtgatctatcaactattcaggagcggatggaggagctgaaaggtcagatgcttaagttcagttcgatggcacctgatctcgatcggctgaacgaattaggctaccggctgccccttaatgataaagaaattaagaggatgcagaacctgaaccgccattggtccctgatttcaagccagaccacagaaagattttctaaactgcagtccttcttgctgcaacaccagaccttcctggaaaaatgtgagacatggatggaatttctggtacagactgagcagaagctggcagttgagatctctgggaactaccagcacttacttgagcagcagcgggctcatgaactgttccaagccgagatgtttagccgacagcagatactgcattccattattatcgatgggcagaggctcctggaacaaggacaggtggacgatagagatgagttcaacctgaagctgacattactcagcaaccagtggcagggagtgattcgccgcgcccaacagagaagggggatcattgattctcagatacgccagtggcaacgctaccgtgaaatggcggagaagctgagaaagtggctggtagaagtttcttacctacccatgagcggcctgggtagtgttcctatccctttgcagcaggctaggaccctctttgatgaagtgcagttcaaggaaaaggtgtttctgcgacagcagggaagctacatcctgaccgtcgaagctggcaaacagctccttctatcggcagacagcggagccgaggcagccctgcaggccgaactggcggaaattcaagaaaagtggaagtcagcctcgatgagactggaagaacaaaagaaaaaactcgccttcctgctgaaggattgggagaagtgtgaaaaaggcatcgccgacagcttagaaaagctaagaacatttaagaagaagttatcccagagtttaccagatcaccacgaagaattgcacgctgagcagatgcgctgcaaagaactggaaaatgctgtggggtcctggactgacgatctgacccagctgagcctcctcaaggatacactgtccgcgtacatttctgccgacgacattagcatcctgaatgagcgggtggagcttctgcagcgccaatgggaagaactctgccaccagctttcactgcgaaggcagcagataggggaaaggctgaatgagtgggccgtttttagtgagaaaaataaagagctttgtgagtggctcacacaaatggaatcgaaggtctctcaaaatggggacattctcatcgaagaaatgattgagaagctcaagaaagactaccaggaggaaatcgctatcgcgcaggagaataagatccaactgcagcagatgggggaacggctcgctaaagccagtcatgaaagcaaggcgtccgaaatcgagtacaagctcggcaaggtcaacgatcggtggcagcacctgctagaccttattgctgcgcgagtgaagaagctaaaggagactttggtggctgtccagcagttagacaaaaatatgtcgtctctgcggacttggctggcccacatcgaaagcgagctggccaaaccgatcgtctatgacagctgtaactcagaggaaattcagcggaagctgaacgaacagcaggaactgcagcgggacattgaaaagcattcgacaggggtggcatctgtcctgaacctatgcgaggtgctgctgcatgactgcgacgcctgcgcaactgacgctgagtgtgactccattcagcaggcaactcgaaatctggataggcgctggagaaacatctgcgcaatgtccatggaacgcaggctgaaaatagaggagacttggcggctttggcagaaatttctggacgactatagccggttcgaggactggcttaagtcatcggagcggactgctgcatttccaagtagcagcggagtgatctataccgtggcaaaggaggagctcaaaaagttcgaggccttccaacgccaagtgcatgagtgcttgacacagctggaactgatcaacaaacagtaccgcagactggctagagagaatcgcacggactcagcgtgttctctgaaacaaatggttcacgaaggcaatcaacgctgggacaatcttcaaaagagagtgaccagcattctgaggaggctgaagcactttattggccagcgggaagagttcgagacagccagggattcaatcttagtgtggcttactgaaatggaccttcaactgaccaacatcgagcacttctcagagtgcgatgtgcaggcaaagataaagcagttgaaagccttccagcaggagattagcctcaatcacaacaagatcgagcagatcatcgctcaaggggaacaactgatcgaaaaatcagaacccttggacgctgccatcatcgaagaggaattggacgaacttcgcaggtactgccaggaagtgttcggacgagtggagaggtatcataaaaaattaataaggctcccactgccagatgatgaacacgatttaagtgacagagagctcgaactggaagatagtgccgcactgtcagatctccactggcatgaccggtctgccgattccctgctctctccccaaccgtccagcaacctgagtttatcgttggctcagccacttcgttccgagcggagcggacgcgatactccagctagcgtcgattccatccccttagagtgggatcatgactacgatctttccagagatctggagtctgcaatgagccgtgctcttccctccgaagacgaagaaggccaggacgacaaggatttctatcttaggggagccgtgggtctctctgacgtgatgatccctgaaagcccggaagcatacgtgaagctgacggagaatgccattaaaaacacatcgggagatcacagcgccctggagagtcagatcaggcagctggggaaagcactggacgatagtcgctttcaaatccagcagacagagaacatcatcaggtctaagacacctacaggccctgagcttgacacctcttacaagggctatatgaagctgttgggcgagtgcagcagcagcattgacagcgtgaagcgcctggaacacaagttaaaggaagaagaagagtccttgccaggcttcgttaacctccactcgaccgaaacacagaccgccggggttatcgacagatgggagctcctccaggcccaagcccttagtaaagaactgagaatgaagcagaaccttcagaaatggcagcaatttaatagcgatcttaattctatttgggcgtggctgggcgataccgaggaggaactggagcagctccagcggctcgaacttagtacagatatacagacgatcgaattacagattaaaaaactgaaggaattgcagaaagccgtggaccaccgaaaagccataatcctttctataaacctctgctctcctgaatttacgcaggccgactcaaaggaaagtcgggatcttcaggacagattgagccagatgaatggaaggtgggatagagtatgttcactgctggaagaatggaggggccttctgcaagatgccctaatgcagtgccagggatttcacgaaatgtcacacggcttgctgctgatgcttgaaaacattgaccgccgaaagaacgagatcgtaccgattgacagtaacctggatgcggaaatattgcaggaccaccataagcagttgatgcagatcaaacacgagttgctcgagagtcagttgcgggttgcatctctgcaggacatgtcttgtcagctccttgttaatgctgaaggcaccgactgtctggaggcaaaggaaaaggttcacgtgattggcaacagattgaagctcctgcttaaggaagtgtctagacatatcaaggaacttgagaagctgctggatgtctcatcatcgcagcaagacctgtcttcctggagctcagccgatgagctggacacttctggcagcgtaagccccacaagcggtcggagcaccccaaatcgccagaagacgccaaggggtaagtgctccttgtctcagcccgggccatcagtaagcagcccacactccaggagtaccaagggcgggagcgatagttccctgagtgagccaggcccgggccggagcgggaggggctttctgtttcgagttctgcgggcggcactgccactgcagttgctactccttttgttgatcggcctggcatgtctggtgccaatgtccgaggaagactattcttgtgctctgagcaataatttcgcccggagttttcatcccatgctcagatacacaaacgggccgccaccactgtag

SEQ ID NO: 206673 - DNA, 2859 bp, synthetic construct
  misc_feature 1..2859: note = Description of Artificial Sequence: Synthetic coding sequence
  source 1..2859: mol_type = other DNA
atggtggtggccgaggacctgagcgccctgcggatggccgaggacagttgcgtggacgcagatctgccagactgtaactgcgacgtgactcgggtaaagaagctgaaggaaactctggttgcggtccagcagttagacaaaaacatgtcctccctgcgcacttggctggcacacatcgagtctgagctagccaagccaatcgtgtacgattcctgcaacagcgaagagatacagcgcaaactgaacgagcagcaagagcttcagagggacatcgaaaaacattcaactggagtggcatctgtccttaacctgtgtgaggtgttgctgcacgactgcgacgcctgtgccactgacgctgaatgcgacagcatacagcaagccactaggaatcttgaccgcaggtggaggaacatctgcgccatgagcatggagcggcgattgaaaatcgaagagacttggaggttatggcaaaagtttttggacgactacagtagatttgaagactggctgaagtcctcagagcgcaccgctgccttccccagttctagcggggtgatctatactgtcgccaaggaagagcttaagaaattcgaggccttccagcggcaggtgcacgagtgcctgacacagctggagctgatcaataagcagtaccgtagactggctcgagagaacaggacagattccgcttgctctctgaagcagatggtgcacgaagggaatcaacggtgggataacctgcaaaagagggtcactagtattctaagaaggcttaaacactttatcgggcagcgagaggaatttgaaactgctagggactccatcctcgtctggctcacggagatggatttacaattgaccaacattgaacatttcagtgagtgcgatgttcaggcgaagatcaaacaactgaaggctttccaacaggagatttccctcaatcacaacaagattgagcagatcatcgctcagggagaacagttaattgaaaagagtgagcccctggatgccgctattatcgaggaggagctcgacgagctgaggagatactgccaggaagtctttggtcgtgtagagaggtatcacaagaagcttatacgtctccccttgccagacgatgaacacgacttgagcgatcgcgagctcgagctcgaagatagtgcagccctttccgacctacattggcatgatcgatcagcggactctctcctgagcccacaaccaagtagtaatctgtccctctctttagcacagccactccgaagtgaacggagcggtagagacacccccgcctcagtcgacagtattcctctcgaatgggatcacgattatgatcttagtagagaccttgaatctgcgatgtctcgagcactgcccagtgaagatgaggagggacaagatgacaaagatttctacctgagaggagcagttgggctctccggcgaccacagcgccctagagtcacaaataaggcaactaggaaaggcattagatgatagccgattccaaattcagcaaacagagaatatcatccgctcgaagacccccactggccccgagctggatacaagctataaaggttacatgaagctcttaggtgaatgtagctcatccatcgatagtgtaaagcgtctggaacacaagttaaaagaggaggaggaaagcctgcctggcttcgttaacctccatagcactgagacacaaaccgccggagtcattgatcgctgggagttacttcaggcacaggcactcagtaaggaactgagaatgaagcagaatctgcagaagtggcagcagtttaactccgatctcaactccatctgggcatggctgggggacacggaggaggaactggaacagctacagcgcttggaactgtctaccgatattcaaaccatcgagcttcagattaaaaagctcaaggagcttcaaaaggctgtggaccaccgcaaagccatcattctctccatcaacctatgttcacccgaattcactcaagccgactccaaagagagtcgcgacttacaagatcggctctcacagatgaacgggcgatgggatcgtgtgtgctcactactggaggaatggagaggcctgctgcaggatgccctgatgcagtgtcaggggttccatgaaatgagccatgggttacttctcatgctggagaatatcgatagaagaaagaatgaaatcgtgccaatcgacagtaatctggacgcggaaatcttgcaggatcaccacaaacagcttatgcagattaaacacgagctgcttgagagtcaattacgggtggctagcctacaagacatgtcatgtcagctactggtgaacgccgaggggaccgactgcctggaggcaaaggaaaaagtccacgtaatcggaaaccgcctcaagctactgttaaaggaagtgagccgtcacatcaaggagctagagaagttactagatgttagcagctctcagcaggacctcagcagctggtctagcgccgatgagttggacactagtggaagtgtgtcacctacatccgggagatctactcctaataggcaaaaaactcctagaggaaaatgtagcttgtctcagccggggccctcggtatcaagcccccacagtcggtcaacaaagggcggctccgattcatcactgtccgaacccggaccaggtcggtctggcagggggttcctcttcagggtcttacgtgcagcactgccattacagttgctccttctgctcctcattggactagcgtgtctggtgcccatgtctgaggaggactattcctgtgccctatcgaacaatttcgcgcggagttttcaccctatgttaaggtataccaacgggcccccaccactgtag

SEQ ID NO: 206674 - DNA, 20475 bp, synthetic construct
  misc_feature 1..20475: note = Description of Artificial Sequence: Synthetic coding sequence
  source 1..20475: mol_type = other DNA
atggccagcagccccgagctgcccaccgaggacgagcagggcagctggggaatcgatgatctccacatatcactacaagcagagcaggaggatacccagaagaaggccttcacatgctggattaattcacagctagcacgacacactagtccgtctgtcattagtgacctatttacagacattaaaaagggccacgtcctccttgacctgctggaagtcctgtccggacaacagcttccccgggacaaaggcagcaatacttttcaatgccggatcaatatagagcatgctcttacgtttcttaggaatcgtagtatcaagcttataaacatacacgtgactgacattattgacggcaatcctagcattatcctgggtctgatttggaccatcatcctgcatttccacattgagaagctggcccaaaccctgtcatgcaattataatcagcccagtcttgatgacgtaagcgtggtcgattcttctcctgcatcaagtcctccagccaagaagtgttctaaagtgcaggctcgctggcaaatgtccgcaaggaaggcgctcctactgtgggcccaagagcagtgtgccacctacgagtccgtgaatgtaacggacttcaaatccagctggagaaatggcatggccttcctagccattatccatgctcttcggcctgacttgatcgacatgaagagcgtgaagcaccgatcgaataaggataacctcagggaggccttccgcatcgcagagcaggagctcaagatacctcgactgctggagcctgaagatgtggacgtcgtagatccagacgagaaatctatcatgacatacgtggcgcagtttctgcagtattctaaggacgcacctggcacaggggaggaagcgcagggtaaagtcaaagacgctatggggtggctcacgctccagaaggagaaattgcagaaactgctcaaggattccgagaacgacacttacttcaaaaaatataacagtcttctgtccttcatggagagtttcaacgaggaaaagaaatccttcctcgacgtcctaagcatcaaacgggatctggacgaactcgataaggaccacttacagcttagagaggcctgggatggcctcgaccaccagattaatgcatggaagatcaagcttaactacgctctgcccccgcccctgcatcagacagaggcttggctgcaagaggtcgaagagctgatggatgaggacctgagcgcttcacaagaccactctcaggccgtcaccctcattcaggagaaaatgaccctcttcaagagtctgatggacagattcgaacatcacagcaacattctgctgacattcgaaaataaggatgaaaatcatctgccgctggttcctcctaacaagctggaggagatgaagcgcaggatcaacaacattctcgagaaaaagtttatcttgctcctggaattccactattacaagtgtctcgtacttggtttggtggacgaagtcaaaagcaagttagacatttggaatatcaagtatggaagccgagagagcgtagagcttctgctggaagattggcacaaattcatcgaagagaaggagtttttggcacggcttgatacttcttttcagaaatgcggggaaatctacaaaaacctcgcaggagaatgccaaaacattaacaaacagtatatgatggttaaaagtgatgtttgtatgtatcgcaagaacatttataatgttaaatccacccttcagaaagtgctcgcttgctgggcaacttatgtggaaaacctgcggctattgagggcctgcttcgaggagacaaaaaaagaggagattaaagaggtgcccttcgagacactcgctcagtggaacctggaacacgctacccttaacgaggctggaaactttttggtggaggtgagtaatgacgtggtcggaagcagcatttccaaggaactgaggaggctaaacaagcgctggcgcaagctcgtgtcgaagacccagctagagatgaatctgccactgatgatcaaaaagcaagaccagcctacattcgataatagcgggaacatcctgagcaaagaggagaaagccactgttgaattcagcaccgacatgagtgtcgagttacctgaaaactacaatcaaaatatcaaagccggagaaaaacatgagaaggaaaacgaagaattcaccggtcagctgaaagtggctaaggacgtggaaaagttaatcggtcaggtggagatctgggaggcggaagcaaaaagtgtgctggatcaggacgatgtggataccagtatggaggaatccctcaagcacctcattgccaagggtagtatgttcgatgaactaatggcacgttctgaagacatgctccagatggatatacagaatatttcttctcaggaatcttttcaacatgtactgaccaccggcctgcaagccaaaatacaggaagcaaaggagaaagtgcagatcaatgtagttaagctgattgcagccctcaagaaccttaccgacgttagccctgacctggacatacgcctcaaaatggaggagtcacagaaggaactggagagttatatgatgcgcgcccagcagttacttggccaaagggagagccctggggagctaatcagcaaacataaagaagcgctgatcatatcgaatacaaaatcgctcgcaaaatacttaaaggcagtggaggagctgaagaataacgttaccgaggacatcaaaatgagtctggaagaaaagtcaagggatgtctgcgccaagtgggaatcgctgcaccatgagctttctttgtacgttcagcagttaaaaatcgacatagaaaaaggtaagttgagcgataacattctgaagttggagaagcaaatcaataaggagaaaaagctgatcagaagggggcgcacgaaagggctcatcaaagagcacgaggcgtgtttttccgaggagggctgtctgtaccagctcaatcaccacatggaagtgctcagggagctgtgcgaggaactgccaagtcagaagagccagcaggaggttaagcgcctcttaaaggattacgagcagaaaatcgagcggctgctgaagtgtgctagtgagatacacatgaccctgcagcctaccgccggcggtacgagtaaaaatgaggggaccataaccacctccgaaaatcgaggcggggacccacatagcgaagctcccttcgctaaatccgataaccaaccatcaacggagaaagcaatggagcccacaatgaagttcagcctggcctctgtgctgcgccctctccaggaagaatccatcatggagaaggactacagcgcatctattaattcgctcttggagcggtacgatacctacagagatattctcgaacaccaccttcagaacaataaattcagaatcacttctgatttctcatccgaagaagacagatcctcatcctgcctccaagccaagcttactgacctgcaggtgataaaaaatgagactgacgccagatggaaagaatttgagatcatcagtctgaagctggagaaccacgtcaacgatattaagaagcccttcgtgatcaaggagcgagacactctaaaggagagggaacgcgagctgcagatgacgctgaacactaggatggaatctctggaaaccgccttacggttggttcttcctgtggagaaggcttcactcctgctgtgtggctccgaccttcctctccacaaaatggccatacagggctttcacctaatcgatgccgaccgtatctatcagcaccttcgaaacattcaggactccattgccaaacagatcgagatctgtaaccgacttgaggagccaggaaacttcgttctgaaggagctgcatccctttgatctgcacgccatgcagaacataattctgaagtataaaacacaattcgaaggcatgaatcacagggtgcagaggagcgaagatacactgaaggctttagaagactttctggcatccttaaggaccgccaaactgtccgccgaaccagtaaccgacctgagcgctagtgatactcaggtcgcccaggaaaatactctgactgtgaagaataaagaaggtgagattcatcttatgaaggacaaagcaaagcacttagacaagtgtctgaagatgctagatatgagttttaaagatgccgagcgtggagacgacaccagctgcgaaaaccttcttgacgccttcagcataaagctgtctgagacccacggatacggggttcaagaagaatttaccgaggagaataagctactcgaagcgtgtattttcaagaataacgagctccttaaaaacatacaggacgtgcagtcgcagatcagcaagatcggactcaaagatcctacagtaccggcagtgaagcacaggaagaaatctttgattcggttggacaaagtgctagatgagtacgaagaagaaaagcgccacttacaagaaatggcgaacagcctcccccattttaaagatggccgcgaaaagaccgtcaaccagcagtgccaaaataccgtggtactctgggagaacacaaaggcactggtgactgagtgtctcgagcagtgcggtcgagtgcttgaacttctaaagcagtaccagaattttaaaagtatcctgacaaccctaatccagaaggaagaatcagtgatctcgctacaggcaagctatatgggcaaggaaaacctcaagaaaaggatcgccgaaattgaaatcgttaaagaagagtttaatgaacaccttgaagttgtagataagattaaccaggtgtgtaagaacctccagttttatttgaacaaaatgaaaacctttgaggagccacctttcgaaaaggaagccaacattatcgtggaccgttggctcgacatcaacgagaaaacggaagactattacgagaatctagggcgagccctggcactctgggacaagctgttcaatctgaagaatgtgatagatgagtggactgagaaggccctccagaaaatggagctgcaccagctgacagaggaagacagggagagactgaaagaggagcttcaggtgcacgagcagaagaccagtgaattttctcgaagagtagcggagattcaattcctgcttcagagtagcgagataccacttgaattgcaagttatggagtcttcgatattgaataaaatggaacacgtgcagaaatgccttactggggagtctaattgccacgccctctctggctctaccgccgagctgcgggaggatctggatcaggcgaaaactcagatcggcatgactgaatctctgctcaaagcattgtcccccagtgactctctggaaatctttacaaaattagaggaaatccagcagcaaattctgcagcagaagcactccatgatccttttggaaaatcagattgggtgcctcacccctgaactgagcgagttgaagaagcagtacgagagcgtgagtgatttgttcaacacaaagaaaagtgtactacaagatcatttttctaaactgctgaatgaccagtgtaagaattttaatgattggttctcaaatataaaggtcaaccttaaggagtgtttcgaatcatccgagactaaaaagtcagttgaacagaaactgcaaaagttgagtgatttcttgacacttgaaggacgaaattcgaagatcaagcaggttgattccgtgctcaaacatgtgaaaaaacatctccctaaagcgcacgtgaaagaacttatttcatggctggtgggacaagagttcgaactggagaaaatggagagtatctgccaggcccgagcaaaggaactagaagatagtctgcagcaattgcttcggctgcaggacgatcatcggaacctccgcaagtggctgacaaaccaagaagaaaagtggaaggggatggaggagcccggagagaagactgaacttttctgccaagccctcgcgagaaagcgagagcagtttgagagtgtcgcacaactgaacaactccctgaaagaatatggattcactgaagaagaagagataattatggaggcaacatgtctcatggaccggtatcagacactgctcaggcagctttcagagattgaggaggaagacaagcttttgccaacagaagatcagtcgttcaacgacctcgctcacgacgtcatccactggattaaggaaatcaaggaaagtctgatggtgctcaatagttccgagggcaagatgccattagaagaacgcattcagaaaatcaaagagatcatcttgctcaagcctgaaggagacgcacgtatcgagacaataatgaagcaggccgagagctccgaggcccccctggtgcagaaaactttgaccgatatctccaatcaatgggataatacactgcatctcgcctctacctacttatctcaccaagagaagcttctgttggagggggagaaatatctgcagtctaaagaggatctgcgtctgatgctaatagaactgaaaaagaaacaggaggccggcttcgccctgcagcacggcctgcaggaaaagaaggcccagttgaagatttataagaagttcctcaagaaagcacaggacctgacatctttacttaaggagctgaaatctcagggtaattatctgttagagtgtacaaaaaacccatcatttagcgaggagccatggctggaaattaagcacctgcatgagtccctgctgcagcagcttcaagacagtgttcagaatctggacggacatgtgcgagagcatgatagctatcaggtctgtgtgactgacctgaataccacactggataattttagcaaggagttcgtctccttttctgacaagccagtggaccaaattgccgtggaagaaaagttgcaaaagctccaggaactggaaaataggctgagtttgcaagacgggacccttaaaaagatccttgcactcgcaaagtccgtgaagcagaatacatcgagcgtcggacagaaaattattaaggacgacatcaaatctttacaatgtaaacagaaagatcttgagaacaggctggccagcgcaaaacaggaaatggagtgttgcttgaactcaatcttgaaaagcaagcgctccacagagaaaaagggcaagttcaccctgccagggcgcgagaagcaagcaacttctgacgtccaggaaagtacacaagagagtgctgcagtagaaaagctggaagaagactgggagattaacaagaacttcgtcgagaacgtgatggcagttagcaaaaattgccaccacagcatgtacatttttgaaagtattgtgaagaacttcatctccgatgagatgcaagactcggctgtggagatggccatgtcaaagcagctctcccttaacgctcaggagagtatgaagaacaccgaagacgaacgtaaggtgaatgaactgcagaatcagccactggaattggacaccatgctccgtaacgagcaactcgaggaaatagaaaaactgtatacccaactcgaggcaaagaaagcagcaataaaaccgctcgagcagaccgaatgtcttaacaaaaccgagactggagcactggtactccacaacatcgggtacagcgcgcagcatttggacaatctgcttcaggccctgattacactgaagaagaacaaagaatctcagtactgtgtgctacgggacttccaagagtatctggcagctgtcgaaagttccatgaaagctttgctgacagataaagaatccctgaaagtgggccccttggactcagtgacttaccttgacaagataaagaaatttatagctagtattgaaaaggagaaggatagtctcggcaacctgaaaatcaaatgggaaaacctgtcaaatcacgtgacggacatggataaaaagttgctggagtctcagattaagcagctcgagcatgggtgggagcaagtcgagcagcagatccagaagaagtacagccagcaggttgtcgagtacgacgagttcaccactctcatgaacaaggtgcaggatactgaaataagcttacagcagcaacagcagcatctccaactgcggctgaaatccccagaagaaagagccggcaatcagtctatgattgctctgactacagaccttcaggctacaaagcacgggtttagtgtactgaagggacaagctgaactgcagatgaaacggatttggggggagaaggaaaagaagaatttggaggacgggatcaataatctgaagaagcagtgggagaccctggagcctctgcatctcgaagctgagaaccagatcaagaaatgtgatattcgcaataagatgaaggagaccattctttgggctaaaaaccttctcggggaacttaatcccagcataccactgttgcccgatgatatcctcagccagatccgcaagtgtaaagttacacacgatgggattctggcacgccaacagagcgtagaatccctggcagaggaggtgaaggacaaggtgcccagcctgactacatacgagggaagcgatcttaataacactttagaagacctgcggaatcagtatcaaatgctggtcttaaagtcaacccaacgaagtcagcagttggaattcaagctggaggagaggtccaacttttttgccatcattcggaagttccaactgatggtgcaggagtccgaaacactcattatcccgcgcgtagagaccgcagctacagaagcagaattgaaacaccatcatgtaaccctcgaagcttcacagaaagagcttcaggagatcgattctgggatttcaacacatctccaggaactgactaatatctacgaggagctgaatgtgttcgagcggctgttcctggaagaccagttgaagaaccttaaaatccgcacaaatagaatacagaggttcatccagaacacctgtaatgaagttgaacacaagatcaagttctgtagacagtttcacgagaaaacatccgcccttcaagaggaggccgatagtatccagcgcaatgaactgctgctgaaccaggaggtgaacaagggcgtaaaagaggaaatttacaacctcaaagatcggctcaccgctattaagtgctgcattttacaggtgttgaagttgaaaaaggtattcgattatattggcctcaactgggacttctcccagttggaccagctgcagactcaagtatttgagaaagagaaggagttagaagaaaagataaaacagctggatacattcgaagaagagcatggaaagtatcaggccctcctctccaaaatgagggctatcgacctgcagataaaaaagatgacagaagtcgtgctcaaggctccagactcttccccagagtctcgcaggctgaacgctcagatcctttctcagcgaatagaaaaggcaaaatgtttatgtgatgagattattaagaaactgaacgaaaacaagactttcgatgattccttcaaggagaaggaaattcttcaaatcaaattgaacgcggaagaaaacgataagctctacaaggtgttgcaaaatatggtgctggagttaagtcccaaagagttggatgaaaagaactgtcaggacaaactagagacatctctacatgttctgaaccaaatcaaaagccagctccagcagcctctcctgatcaaccttgagattaaacacattcagaatgaaaaggacaactgcgaggctttccaagagcaggtatgggccgagatgtgctccattaaggctgtgaccgctattgaaaagcaacgcgaagaaaattcaagcgaagctagcgacgtagagaccaaacttagggagtttgaggacctgcagatgcaactgaacacttccatcgaccttaggaccaacgtgctgaacgatgcttatgagaatctaactagatataaagaggcggtcacaagggccgtggagtccatcacaagcctggaggccattattatcccctatagggtggacgtgggaaacccagaggagagcctagaaatgcctctcaggaaacaggaggaactggagtctacagtggctcacatccaggatctaacagagaaactgggaatgatctcttcgccagaggccaaactccagctacagtacaccctccaggaactagtgtcaaaaaatagcgctatgaaggaggcctttaaagcccaagagacggaggcggagcgttacctggagaactacaaatgttaccgcaagatggaggaggatatttataccaacctctccaaaatggaaaccgtgctggggcagtcaatgtcatcactgcctctgagttacagggaagcacttgaacgtctagaacaaagtaaagccctagtgtccaacctaatcagcactaaagaggaactgatgaagttgcggcaaatcctacgcctcttgagactccggtgcaccgagaacgacggcatttgcctgctgaagatcgtgtcagccttgtgggaaaagtggctaagtctcttagaagcagcaaaggaatgggaaatgtggtgtgaggaactgaaacaggaatggaaattcgtttcagaggagatagagagggaagctattatcctggataatttacaggaagaattacccgaaatttccaagactaaagaggcggccactactgaagagctgtccgaactgctggactgcctctgccagtacggcgaaaatgtagaaaagcagcaactcctcctaaccttgctgctgcagagaattagaagcattcagaacgtgccagaatccagtggagccgtagagaccgtgccagcattccaggagattacctccatgaaggaaagatgtaataagctgcttcagaaggtccaaaagaacaaggagttggttcagacagaaattcaggagcgccactcattcaccaaagagattatcgccctgaaaaactttttccagcaaaccaccaccagctttcagaacatggcgtttcaggaccatcccgagaagagcgagcagtttgaggaactgcagtctatcctgaaaaaaggaaaactcactttcgagaacatcatggagaagctgcggattaagtattccgaaatgtatacaatagtgccggctgaaatcgaaagtcaggtggaggagtgtcgtaaggccctcgaggatattgacgaaaagattagcaatgaagtactgaaatcttcccctagttatgccatgcggaggaaaatagaggaaattaacaacggactgcataacgttgagaagatgttgcagcagaagtccaagaatattgagaaggctcaggagattcagaaaaaaatgtgggacgagctcgatctttggcattcaaagctgaacgagcttgactccgaagttcaggatatcgtggagcaggatcccggacaggctcaagaatggatggacaatctaatgattccatttcagcagtatcagcaagtgagccaacgggccgagtgcaggacaagccagctcaacaaggcgacagtcaaaatggaggaatactcagatctgctgaaaagtaccgaggcctggatcgaaaataccagccatctgctggccaatcccgcagattatgatagtttgcggaccctgtcccaccacgcaagcacggtgcagatggcattggaggattctgagcagaagcataacctgctccactccattttcatggacctcgaagatctgtctattatatttgagaccgatgagttgacacagtcaattcaggagcttagcaatcaggtcacagccctgcagcaaaagatcatggaatctctcccccaaatccaacgcatggcagatgatgtcgtcgccatcgagtcagaagtcaaaagcatggaaaaaagagtctctaaaataaagacgattctcttatccaaagagatattcgactttagcccggaagaacatcttaaacatggcgaggttatcctggagaacatccgtcccatgaaaaaaactatcgccgaaatcgtgtcttatcaagtggaactcagactgccacagactgggatgaagccattgcccgtcttccagcggacaaaccaacttctgcaagatattaaacttttggaaaatgtgacccaggagcagaacgaactgttgaaggttgtaattaaacaaacaaacgaatgggacgaggaaatcgagaaccttaagcaaatacttaataactacagtgcacagttctccctggaacatatgtctcctgatcaggcagataaattgcctcagctgcaaggcgaaattgagaggatggaaaagcaaatcctctctttgaaccaaaggaaagaagatcttctcgtggacctaaaggccactgtgctcaacctccaccaacacctcaaacaggagcaagagggagttgaacgcgatcggttgcctgctgtgacctccgaggagggcggcgttgctgagcgggatgcatcagaaaggaaactgaatcgacggggaagcatgtcctacttggcagccgtggaggaagaggttgaagaatcatcagtaaaatctgatcacgataaagatatggaagaagacagggcctcctcctctagtgggacaatagtgcaggaggcttacggtaaaatctcaacctccgacaactctatggcccagatactaacccccgactcactgaatactgagcaaggtcctgagtgttcccttcgacccaaccagactgaagaggggactacccctccaatagaagcggataccctggactcctcagacgcacagggcggcctggaaccccgcgtggagaagacgcgacctgagcccactgaagttctgcatgcctgtaagacccaggtggctgagttggagctttggctgcaacaggctaatgtggcagtggagccagagaccctgaacgccgatatgcaacaagtcctcgaacagcagctggtgggctgccaggcaatgctgaccgaaatcgagcataaggtggcctttctgttagaaacctgtaaagaccaagggcttggagacaatggtgctactcagcacgaggcagaggcacttagcctgaagctgaagaccgtaaagtgtaatctggaaaaggttcaaatgatgttacaagagaagcacagtgaagaccagcatccgacaatcttgaaaaagtcctctgagccggaacatcaagaggcccttcagcctgttaacctctctgagctcgagtcgatcgtgactgaacggcctcagttctctaggcaaaaggacttccaacaacagcaagtgcttgagctgaagcccatggaacagaaggactttatcaaatttattgaattcaatgctaaaaaaatgtggccccagtactgtcagcacgataacgataccacccaggagtcatccgcaagataccccacaaccgaggagttgaagacttatacaacccagctggaggatctccggcaggaagcctccaacctgcaaactcaggaaaacatgactgaagaggcatatatcaacctagacaagaaactgtttgagttgttcctaactctctctcagtgtctgagcagtgtggaggagatgttggagatgccccggctttaccgggaggacggatctgggcagcaggtgcattatgaaaccttggcgctcgagctgaagaaactgtatcttgcgcttagcgataagaagggtgaccttttgaaggcaatgacttggccgggggaaaatacgaatttgttactggagtgtttcgacaacttgcaggtgtgtttggagcacacacaggcggcagcagtgtgccgatctaagagcctcaaagcggggttggattacaatcggtcgtaccaaaaggccgacgcttatactgtcgagctggagaacgctgaatcaagggtggcgaaactgagggacgagggagagaggcttcacctcccgtatgccctgctgcaagaagtgtacaaactggaagacgtgctggatagcatgtgggggatgttgcgtgccaggtacacagagctgtctagcccgtttgtgactgagtcacagcaagatgcactgctgcaagggatggttgagctggtaaagataggtaaagaaaagctggcccacggccatctgaaacagaccaagtccaaggtggctttgcaggcacagattgagaaccacaaagtattctttcagaagttagtggctgacatgttactcatacaggcatattctgccaagatcttaccaagcctcctgcagaatcgggagaccttctgggctgagcaagttacagaagtgaagatattggaggaaaagtcccggcagtgcggcatgaaactgcaatcattgctccagaagtgggaggagtttgacgaaaactacgcatcactggagaaggaccttgagatcctgatcagtactctccctagcgtctcactggtcgaggaaacagaagagcgtctggtggagcgaatctctttctaccagcagatcaaacgcaacattggaggtaaacacgctcggctttaccagactttaaatgaggggaagcagctggtagcaagtgtgagttgccccgagctggagggccagatcgcaaagctggaagagcagtggttgtccctcaacaaaaaaatcgaccacgagctccatagactgcaagcgctgctgaagcacctcctacgtagtgctttccttggcgtgtataatcgcgatagcgaccagctgacaaaatggcttgagagctctcagcataccctgaactactggaaggagcagtctctcaatgtctctcaggaccttgacacaattcggtctaacataaataactttttcgagttttcaaaggaggtggacgaaaagtcgagcctcaagaccgctgtgatcagcatcgggaatcagctgttgcatctgaaagagactgacacagctaccttgagggcctccctggcccaattcgagcagaagtggacaatgttgattacacaactccccgatatccaagagaagctgcatcagctgcaaatggaaaaacttccctctcgaaaggctattactgaaatgatctcctggatgaacaatgtggagcaccaaacttccgatgaggacagcgtacattcaccctccagcgcttcccaggtgaagcacctactacagaagcataaagaattccgaatggaaatggactacaagcaatggatcgtcgacttcgttaaccaatcactgttgcaacttagcacctgtgatgtcgaatccaagagatacgaacggacagaattcgccgagcacctgggagagatgaacagacagtggcacagagtacacgggatgttaaacagaaaaatccagcatttggaacagctgttagaatccataactgagagcgagaacaagattcagattcttaacaattggctcgaagctcaggaagagaggctgaaaactctgcaaaagcctgagagcgttattagcgttcagaaactgcttttagattgtcaggacatagaaaaccagcttgccattaagtcaaaggcattggatgagcttaaacaatcttaccttactttggaaagtggagccgtccctctgctagaggacaccgcatccagaattgacgagctgttccaaaagagaagctcggtactgacacaggtgaatcagctcaaaacctctatgcagagcgtccttcaggagtggaaaatttatgatcagctgtacgatgaagtaaatatgatgactatccgattttggtattgcatggagcactccaaaccagtggtgctgtctctggaaaccctgcggtgtcaggtagagaatctgcagagcctccaggatgaggccgagtcttccgagggctcttgggagaagctccaagaggtgattggcaaactgaaggggctgtgtcccagcgtcgccgaaatcatcgaggaaaagtgtcagaacacgcacaagcggtggactcaggtaaatcaggctattgctgaccaattgcagaaggctcagagcctcctgcagctgtggaaagcctatagtaacgcacacggagaagctgcggctcgtcttaaacagcaggaggcaaaattccagcagctagcaaacattagtatgagcggcaacaatctggccgaaatactcccccccgcactgcaggacattaaagagctgcagcacgacgtgcagaaaacaaaagaagcgttcttacagaattcctctgttctggacaggcttccacagcctgctgagagcagtactcacatgctcctgcctgggccccttcatagtctccagagagctgcgtacttggagaagatgctccttgtgaaagcgaacgagttcgaaaatcacgtgctggccctgaccgctcaaagtccagacattgagcatttgaacgaagtctctctgaagttgccactttccgacgtcgccgtaaaaacactgcagaatatgaatagacagtggataagagccactgcaaccgctttggagcggtgcagtgagctgcaaggtattggtctaaatgagaaatttttgtattgttgtgagaaatggatccaactgctagaaaagattgaagaggcgctcaaggtagatgttgccaactcactgcccgaattactggagcagcagaaaacatataagatgcttgaagcggaggtgtctattaatcaaactattgctgactcctacgtgacccagtcactccagctgctggacactacagagattgaaaacagacccgaattcattacagagtttagcaaattaacagaccggtggcaaaacgctgtccaaggcgtccgacagagaaagggagatgtcgacggactgaatgctcatgtcgcacgatgtggaggggcaagcttgaagaagcaagatctgcgatattctctgcacacggcttgcggagcagcactactgtgccgaagcagccacggcgctaataaggagatccattttcagaggagacggacaacttgcgctctgacattagaggctggggagaaattactgctcactaccgacttgaaaaccaaagaatctgtaggccggaggatttcgcaactccaggatagttggaaagacatggaaccgcagctggcagaaatgattaaacaattccaaagcactgttgagacttgggaccagtgcgaaaagaaaattaaggagttgaagagccgactgcaagttctgaaggcccaatcagaggatccccttcctgagctccatgaggacctgcacaacgaaaaggaattgattaaagttgccattcgcaagcaggagattgaagatcggttaaatacatgggtggtgttcaatgagaaaaataaggaactgtgcgcctggttggtgcaaatggaaaacaaggtgctgcagacggccgacatcagcatcgaggaaatgattgagaagcttcagaagcgaactgtaggcagagaagaggtccctgagaggtgggagtgtgagacaatcgtcagtgggcacgggacagaggagtcttgtttcctcagtatccggaaatttcatcagggccgcggactgcatatactgacgtgtcagttgattccccaagattgtatggaggagatcaatctcttcagcgagaacaagctgcagttaaaacagatgggggatcagcttatcaaggctagtaataagtctagggccgctgagattgacgacaaactgaacaagattaacgataggtggcagcatctctttgatgtgattggttcatccatggccgatcagaccaactcacgttggatgttcttccagtggccccggggtatccaacgaactgtgacctggccctgggaccatctgtgctcctgcgccagcaccggacataccggccccttccacagcagcgtgctgcggtgcttcgaacagcatatcgaatttggcatctacaggcgcacctacaaggtgaataaggagcttgggggagacaagaatggccagcggtgtcccattatttaccctcacgggctggtgcagtgtatcagattaggagaacccctgatcttgaaaagggttaagaaattgaaagagaccttcgctttcattcagcagctggataaaaacatgtcaaacttgcgaacctggctggctcgcattgaatcagaattgtcaaaacccgtggtttatgatgtgtgtgacgaccaggagattcagaagcgcctcgccgagcagcaagacctacaaagagacatcgaacagcattccgcgggcgtggagtctgttttcaatatctgcgacgtgctactgcacgactcagacgcatgtgcaaacgaaaccgagtgcgatagcatccagcaaacaacccgctcactagatcggagatggaggaacatttgcgcgatgtcaatggagcgaaggatgaaaattgaagaaacatggagattgtggcagaagttcctagacgattattcccgatttgaagattggttgaagagcgccgaacgcacagccgcctgcccaaactcatctgaggtgttgtacacctctgctaaagaagaactgaagagattcgaaaggcaaatccacgagcgactgactcagttggaacttatcaacaagcagtatcgcagactggcccgagaaaatcgcactgatactgcgtcacgactaaaacaaatggtacatgagggcaatcagaggtgggataatctgcagcgaagggtgaccgccgtacttaggagactacgccacttcacaaaccagagggaggaatttgaaggaactagggaatctattctggtgtggctgaccgaaatggatctgcagctgactaacgttgaacacttttccgaatcagacgcagacgataagatgcgccagctgaacggattccagcaggaaattaccctgaacaccaataaaattgatcagctgatagtgttcggggagcagctgattcagaaatctgaacccttagatgccgtgttaattgaagatgaacttgaggagctccatcggtactgtcaggaaggtctggaagacgaaaaggaagcatctgagaacgaaaccgacatggaagatcctcgtgagatccaaacggactcctggcgcaaacgcggtgaaagcgaggagccgagcagccctcagtcactgtgccatcttgtggcaccaggacacgaacgtagcggatgcgaaacccctgttagcgtagactcaatcccgctagagtgggaccatacgggcgacgtgggagggtcatccagccatgaggaagacgaggaggggccatattactctgcgctaagcggaaaaagcatctcagatggccactcttggcatgtccccgactccccgagctgcccagagcaccattataagcagatggagggagataggaatgttcccccagtccccccagcctccagcactccttataagccaccatatgtttcgctgaactttactggcagcactgcctacgtttgtgcattcgatcgctgggagatgatacaagcccaggagctacataacaagctgaaaattaaacaaaacctgcagcagttaaactcggatatctccgcaattacaacatggttgaaaaaaacggaggctgagttagaaatgcttaagatggcaaagcctccaagcgacatccaggagatcgaattacgagtcaagaggctgcaggagatcctgaaggcatttgatacatacaaggctttggtggtctccgtgaacgtatcttccaaagagttcttgcagaccgagtcaccagagagcacagaattgcagtccaggctgcgacagttgtctttactctgggaggctgcacagggagccgtcgacagttggcgtggcgggctcaggcaatccctaatgcagtgtcaagatttccaccagctgagccagaacttgctactttggctggcgtctgcaaaaaaccgacgccagaaggcgcatgtcactgatcccaaagcagacccaagagcgctcttggagtgtcggagagagctcatgcaactagagaaggagctcgtggaaagacagcctcaagtcgatatgctgcaggagattagtaattctctactgattaaaggacatggtgaggactgtatagaggccgaggagaaggtgcatgtaatcgaaaagaagttaaagcagctgcgcgagcaggtgagccaagatctgatggctttgcagggaactcagaatcccgcctcccccctcccaagcttcgacgaagttgactcaggagaccagcctcctgccacatccgtgcccgcccccagggcaaaatttctgtacccagctgtgcagagcagtgaaaattatcggagaagggggggggatagggagcagggcccccggcaacatacagctacggcccttttgcccctgaagggagggccaggaagtcccactcccgccgccgcacccccagctgctgccgcacctggacttccagcagctttattgcggcgacggctacaattgcatagcggtcagcagctgtgcccagtcttgttaccacacgctgaggtgcatcagtgggctaccccccacatagaagggatagcgggccatagcgccacccccccagcttag

SEQ ID NO: 206675 - DNA, 20658 bp, synthetic construct
  misc_feature 1..20658: note = Description of Artificial Sequence: Synthetic coding sequence
  source 1..20658: mol_type = other DNA
atggccagcagccccgagctgcccaccgaggacgagcagggcagctgggggattgacgacctacacattagtctacaggccgaacaggaggacactcagaaaaaggccttcacttgttggattaacagccagctcgcaagacacacttccccatccgtgatctcagatctctttactgacatcaaaaagggacacgttctactggacttgctagaagtattgagcggccagcaactgcctagagacaaagggtctaatacgtttcagtgtcgcattaacattgagcacgccctcacgttcctccgaaaccggtctattaagcttatcaatatccacgtgactgacataattgatggaaatccttccattattttagggctgatctggaccatcattcttcacttccacatcgagaagctcgcgcagacactgtcttgcaattacaaccagccttcccttgatgatgtttccgtggtagacagctcgccagcctcgtccccgccagctaagaaatgtagcaaagtccaggcgagatggcagatgagtgcgcgcaaagccctcctcctttgggcgcaggaacagtgtgcaacttacgagtctgtgaacgtaactgatttcaagtcttcttggagaaatggcatggcgtttctggccatcattcatgctctgagacccgatctcattgacatgaagtcagtgaagcaccggagcaataaggacaacctcagggaagcgtttagaatcgccgagcaggagctcaagatccccagactgcttgaaccagaagacgtagatgtggtggatcctgacgagaagtctatcatgacctatgtggcccagtttctacaatattcaaaggacgccccagggacaggtgaagaggcacaggggaaggtcaaggacgcaatgggctggcttactctacagaaggagaagctgcagaagctgctcaaggatagtgaaaatgacacctactttaagaagtataactccttgctgtctttcatggaatctttcaacgaagagaagaagagtttccttgatgttctgtcgattaagcgggaccttgacgagctggataaagaccacctccagttgagggaggcgtgggatggcctggatcaccaaattaatgcctggaaaattaagcttaattacgcattacctcctcctctccaccagaccgaagcatggcttcaggaggtcgaggagttaatggatgaggatctatccgcttctcaggaccattcccaggcagtgaccctgatccaggaaaagatgacactgttcaagtcattgatggatagatttgagcaccatagtaacattctcctgaccttcgagaacaaggacgagaatcacctgcccctggtgccacccaataaactagaggagatgaagagacgaataaataacatcctcgaaaagaaattcatacttttgttggaattccactactacaagtgtctggtcctcggattggttgacgaggtcaaatcgaaactggacatctggaatatcaagtatggatcacgggaaagcgtggagctgctcctagaagactggcacaaatttatcgaggagaaggaattccttgcaaggctggacactagttttcaaaagtgcggcgagatttataagaacttggcgggcgagtgccagaacattaataaacaatacatgatggtgaagtctgacgtgtgtatgtaccgtaaaaatatatataatgtgaaatccaccctgcaaaaggttttggcttgctgggcaacatacgtggagaatctgaggctgttgcgggcctgctttgaagagactaagaaggaggagattaaggaagtgccctttgagacactcgcccagtggaatctggagcatgccacacttaacgaggccggaaacttcctagttgaagtgtccaatgatgtggtggggtcgtccatctccaaagagctgcggcgattgaataagaggtggaggaagctggtaagcaagacccaactcgagatgaacctgcccctaatgatcaagaaacaggatcaacccacattcgataatagcgggaacattctcagtaaagaggaaaaggcaacggtggagttttccaccgacatgagcgtggagctgcccgagaattataatcaaaatattaaagccggggaaaaacacgaaaaggaaaacgaagaatttacaggccagttaaaagtggcaaaagatgtcgaaaagttgattgggcaggttgagatttgggaagctgaggctaaaagcgtgttggaccaagacgacgtggacacatcgatggaagaatccctgaagcaccttatcgccaagggctcaatgtttgatgagctcatggcccggagcgaggacatgctgcagatggacattcagaatatctcatcccaagagtctttccagcacgtgctcacgacgggtctgcaggccaagattcaggaggccaaggaaaaggttcagattaatgtggtcaaattgattgcagctctgaagaacttgacagatgtgtctccagatttggatattagattgaaaatggaagagtctcaaaaggagcttgagtcctacatgatgcgggctcaacagctgctgggtcagcgggaatcgcccggcgagcttatcagtaaacacaaagaagctctgattatatccaacaccaagagcctggcgaagtacttaaaggccgtggaagagctgaagaataatgtgacagaagatattaagatgtcactggaagaaaagagtcgcgatgtgtgcgcaaagtgggagtccttacatcacgagctcagtttgtacgtgcaacagcttaaaatcgatattgagaagggaaagctcagtgataatatcctcaaactggaaaagcaaatcaacaaggaaaagaagctgatcagacgcggccgcacaaagggcctgatcaaggaacacgaagcctgtttttcagaagagggctgcctttatcagcttaatcatcatatggaggtccttagggaactgtgtgaggaactgcctagccagaaaagccaacaggaggtcaagaggctcctcaaggactacgagcagaagatagaaaggttactgaagtgcgcatctgagatccacatgacgttacaacctactgcagggggaacatccaaaaatgaaggtacaatcacaacaagcgaaaatcggggaggagatccccattctgaggctccctttgctaagtccgacaatcagcccagcacggaaaaggccatggagccaacaatgaagttttctctggcttccgtgctgagacccttgcaggaggagagcatcatggagaaggattatagcgcatcaatcaacagcttgctcgaacggtacgatacgtatcgggacattctggaacaccatctgcagaataacaagttcaggataacaagcgactttagctccgaagaggataggtcgagctcctgtctgcaagcgaagcttaccgatttgcaggtgatcaaaaatgagacagacgccagatggaaagaatttgaaattatctcactaaagctcgagaaccacgtgaatgatattaagaagccattcgtcatcaaagagagagacaccctcaaggagcgcgagagagagctacaaatgacccttaacacccgcatggagtcactggaaacggccctccggctcgtccttccagtcgagaaagccagcttgttactgtgtggaagcgacctcccgctgcataaaatggcaattcaaggctttcatctaattgatgcagatagaatatatcagcacctgcgcaacatccaagactctatcgccaagcagatagaaatatgcaatcgcttagaagaaccaggcaacttcgtgctgaaagagctgcacccattcgatctccacgcaatgcaaaacatcatcctcaagtataagacccagtttgaggggatgaaccatagagtccaaaggtccgaggacacattaaaggcactggaagatttcctggcatctctgaggacagctaaactcagcgctgagcctgtgaccgatctaagtgctagcgatacacaggtggcccaggaaaacaccctgaccgtcaagaataaggagggcgagatccacctcatgaaggacaaggccaaacatctggataagtgcctcaaaatgctagatatgagctttaaggacgctgagcggggcgatgatactagctgtgaaaatttgctcgatgccttttcgattaagctatctgaaacgcatggatacggggtacaggaagaattcactgaagaaaacaaactgctagaagcttgcattttcaagaataacgagctgcttaaaaatatccaggatgttcagtcccagatctcaaagatcggcctgaaagaccccaccgtgcccgcagtcaagcaccgcaaaaaatccttgatcaggctagacaaagtgcttgatgaatatgaagaagagaagaggcatctgcaggaaatggccaattccttaccacactttaaggacgggagggagaaaactgtaaaccagcagtgtcagaatactgtggtactttgggaaaacaccaaggctctggtgaccgagtgtctggaacagtgcggtcgggtgttagaactcctgaagcagtaccaaaactttaaatctattctcactacgctgatccagaaagaagagagtgtcatcagtctccaggcctcgtacatgggtaaggaaaatctgaagaaaagaatcgcagaaatagaaatcgtcaaagaagagtttaatgagcacctggaagttgtagataagataaaccaggtttgcaagaacctgcaattctacctgaataaaatgaaaaccttcgaagagcctccattcgagaaagaggctaatatcattgtggatcgatggttggacattaatgagaaaacagaggattactatgagaatctcggcagagccctcgcactgtgggataagctgtttaatctgaagaacgttatcgacgagtggaccgaaaaagcgctacaaaaaatggagttacatcagttgacagaagaggatcgcgagaggctaaaggaggagcttcaggtgcatgaacagaaaactagcgaattctcccgcagggtggctgaaatacagttcttgctccagtcctccgagatcccccttgaactgcaggtgatggaatccagtatcctgaacaagatggaacacgtacaaaaatgtctaactggcgagagcaactgccatgccttatccggctctactgcagagctgcgcgaggatcttgaccaggctaagacccagatcggaatgaccgagtcacttctcaaagccttatcaccaagcgatagtttggagatcttcactaagttggaggaaatccagcaacaaattctgcagcagaaacacagcatgatactgctggagaaccaaatcgggtgcctgactcctgaactctctgaattgaaaaagcagtatgagtccgtgtcagacctcttcaatactaaaaaatcggtactacaagatcactttagcaagcttctgaatgatcaatgcaagaatttcaatgactggttcagcaacattaaagttaatctcaaagagtgcttcgaatcctctgagactaaaaagtctgtagaacaaaagctgcagaaactttcagattttctgactcttgagggaaggaactcaaaaattaaacaggttgatagcgttttaaaacacgtgaaaaagcacctccctaaagcccacgtcaaggagttgatcagctggctcgtcgggcaagaatttgaactggaaaaaatggaaagtatctgccaagcgagggctaaggagttggaagacagtctccagcaattgcttagactccaggacgatcaccgcaatctgcgaaaatggctcaccaaccaagaggagaaatggaaaggcatggaggaaccgggcgaaaagacagaactcttttgccaggcacttgcacgcaaacgagaacaatttgagagtgtggctcagctgaacaactctttaaaagagtatggtttcaccgaggaggaagagattatcatggaggcaacttgcctaatggatagataccagacactactgcgccaactcagcgaaatagaggaagaggataagctcctcccaacagaagatcaatccttcaacgacttggcacatgacgttatacactggatcaaggaaatcaaagagtctctgatggtgttaaactctagtgagggcaagatgcccctggaagaaaggatccaaaagattaaggagattatcctgcttaaacccgagggggacgcccgcatcgaaacaatcatgaaacaggccgagtccagcgaagctccacttgtgcaaaaaaccctgacagacattagtaatcagtgggacaatactttgcatctggcgtccacctatctgagccatcaggagaaactgctgctggaaggagaaaagtatctccagtcaaaagaggatctgagacttatgttgattgagctgaaaaaaaagcaggaagccgggtttgcccttcaacatggattacaggaaaagaaagctcagctgaaaatatataaaaaattcctgaagaaagcccaggaccttactagcctattgaaggaattaaaaagtcagggcaattatctattggaatgcaccaaaaacccaagctttagtgaggaaccttggctcgagatcaaacacttgcatgaatctctcctccagcagctgcaggatagtgtccaaaacctagatgggcacgtgcgcgaacacgatagttatcaggtctgcgtgacagatctaaatactactctggataatttttcgaaagagtttgtgtccttttcagacaagccagtggaccagattgctgtggaggagaagctacagaagcttcaggaactcgaaaaccgcctatccctgcaggatgggacgctcaagaagatcctcgcactagctaaatcagtcaagcaaaacacttctagcgtagggcagaagatcatcaaggatgacataaaatccctacagtgcaagcagaaggacttggaaaatcgactcgcatcggccaaacaggaaatggaatgttgtctcaattctatcttgaagagcaaaaggtccacagaaaagaagggcaagtttaccttgccaggccgtgagaagcaggctaccagcgacgtccaggaatcaactcaagagtccgcagcagtcgagaagctcgaggaggattgggaaatcaacaaagattccgctgtagagatggcaatgtcaaaacagctgtctctgaacgcacaggaatctatgaaaaatacagaagatgagagaaaggtgaacgaattacagaaccagcccctggagctcgacaccatgttaagaaatgaacaactggaagagatcgagaagctgtatacccagctggaggcaaagaaagctgctatcaagcctcttgagcaaactgaatgtctcaacaaaacagaaactggggcccttgtccttcataatattggatactccgcacagcacctcgataatttactgcaagcactcattaccctgaagaagaataaagagagccagtattgtgtgttgagggactttcaggagtacctggccgctgtcgaatctagcatgaaagctcttctcaccgacaaagaatcacttaaagtggggcccttagattccgtgacctacctggataaaatcaaaaaatttatagcgtcgattgaaaaggaaaaagattctcttggaaatctcaagatcaagtgggagaatcttagtaaccatgttacggacatggataagaaattgctggagtcccaaattaagcaattagagcacggttgggaacaagtggagcagcaaatacagaaaaagtactcccagcaggtggttgagtacgatgaatttaccacactgatgaacaaggtgcaggatactgagataagcctccagcagcaacagcagcatctgcagctcagattaaaatctccagaagagagagctggtaaccaaagtatgattgcccttacaacagatcttcaggcaacgaagcacggattttcggtgttgaaggggcaggcggagctacaaatgaaaaggatctggggcgagaaggaaaagaagaatctggaggacggtattaataacctcaaaaaacagtgggaaaccttagaaccgcttcacctcgaggcagagaaccagatcaagaagtgtgatatccgtaataagatgaaagagacaatcctgtgggccaagaatcttctgggtgagttaaatccctcgatccccctactccctgacgacatactgtcccagattcgcaagtgtaaagttacccatgacggaattttggctcgacagcaatcagtagagtcgctggcagaagaagtgaaggataaagtgcctagtctcacaacctatgaaggaagtgacttgaataataccctggaggacctccgtaatcaataccaaatgctcgtgttgaaatccactcagcgttcccagcagttagagtttaagctagaggaaagatccaacttttttgctattattaggaagttccagctcatggtccaggaaagtgagaccctcatcattcctcgagtggagaccgcggccacagaggcagagcttaagcatcatcacgtaaccctcgaagcgtcccaaaaagaactgcaggagattgactctggcatctcaacccatctgcaggaacttacgaacatctacgaggagctcaatgtcttcgagagactcttccttgaagatcagctaaaaaacttaaaaattcggaccaatcgaatacagagattcatccagaatacttgtaacgaggtagagcacaagatcaaattctgcagacagtttcacgagaagacttccgcccttcaggaggaggcagatagtatccaacgaaatgagttgctactcaatcaggaggtgaacaagggagtcaaagaggagatctataaccttaaggaccgcctgacggcaatcaagtgttgcattcttcaagtgctgaagctgaagaaagtgttcgattacataggactaaattgggacttctctcagctggatcagctgcagacacaagtgttcgagaaagaaaaggagctggaagagaaaattaaacagctcgatacatttgaggaagaacacggcaaatatcaggccctactgagcaagatgagggctatcgatctgcaaattaagaaaatgacggaggttgtgctgaaagctcctgattctagccctgaatctaggcgcttaaatgcccagattcttagccaacggatcgaaaaagcaaagtgtctgtgcgacgagattatcaagaagctgaacgagaacaagactttcgatgatagctttaaggagaaggagatcctccaaatcaagctcaatgccgaggagaatgataaattgtataaagttctccagaatatggtgctggagctgagcccaaaagaactggatgaaaagaactgtcaagataaattggaaacatcactccacgttctgaatcagattaaatctcagctccagcagccactgctcattaatctggaaatcaaacacattcagaacgagaaggacaattgtgaagcattccaggaacaggtgtgggctgagatgtgcagtatcaaggccgtcacggctattgaaaaacagcgggaggaaaattctagcgaagccagtgacgtggaaaccaagctgagagagtttgaggacctccagatgcagctgaacacaagcatcgatctaaggaccaatgtcctgaatgatgcgtacgagaatctcacacgctacaaggaggccgttacgagggcagtcgagtcgatcacttctctggaggccattatcatcccctatcgggttgacgtggggaatccggaggaaagcctggaaatgcctctcaggaaacaagaggaactggagagcacagttgctcatatccaggacttaaccgagaagctcggaatgatctcatcacctgaagcaaagctccagctgcaatacacacttcaggagcttgttagtaaaaatagcgcaatgaaagaagcttttaaagcgcaagaaactgaagcggagcgatacctcgagaactataagtgctataggaagatggaggaggacatatacacaaacctatccaagatggagacagtcttgggtcagtcaatgagctcgctccctctcagttaccgtgaagcactggagaggctcgagcagtctaaggcactggtatctaatctcatcagtacaaaggaagagctcatgaaactgaggcaaatcttgcgcttactacgtcttagatgcacggagaatgacggaatctgcttgcttaagatagtgagcgcactgtgggagaagtggctctccttgctcgaagcagctaaggagtgggagatgtggtgcgaagaactcaagcaggaatggaaattcgtgtccgaggaaatagagcgcgaggcaatcatcctggataacctacaggaagagcttcctgaaatcagcaagacgaaggaggctgccactaccgaggagctttctgagttgctcgactgcctgtgccagtatggtgagaacgtcgagaaacagcagttgctgctcactctattattgcagagaatcaggagcattcagaatgtgcctgaaagtagcggagcagtggaaaccgtgcccgcctttcaagagattacaagcatgaaggaacggtgtaataaactgcttcagaaagtgcaaaagaacaaagaacttgttcaaactgagatccaagagcgtcactcattcaccaaagaaataattgctctaaaaaactttttccagcagacaacaaccagcttccagaatatggcgttccaggatcacccagagaaatcggaacagttcgaagagcttcagagtatccttaagaaaggcaaactgacattcgagaatatcatggagaagctgcgaatcaaatatagtgaaatgtacaccatcgtgcctgcagagattgagagccaggtggaagagtgccgtaaggctttagaggacatcgacgagaaaattagtaacgaagtgctcaaatcctcaccatcttacgccatgcgccgtaagattgaggaaataaataatggcctgcataatgtggagaagatgctgcagcagaagtcaaagaatattgaaaaagctcaagagattcagaaaaagatgtgggacgagctggatctgtggcactcaaaactaaacgagctcgactctgaggtccaggacatcgtcgagcaagatccagggcaagctcaggaatggatggacaacttgatgattccatttcagcagtatcagcaggtaagtcagcgggccgagtgtcgcacctcgcagttgaataaggcaactgtaaagatggaagaatacagcgatctcctgaagtctacagaagcgtggatcgaaaacacaagtcatcttctcgcgaaccctgctgactacgactccctgaggacattgtcacatcacgcctccaccgtccaaatggcgcttgaagactccgagcagaagcataatctcctccattctatcttcatggatctagaagacctttccatcattttcgaaactgacgaacttacccaaagcattcaggagctgtcaaaccaagtgacagccctccagcagaaaattatggagtcactgccccagatccagagaatggccgacgacgtggtggccatagagagtgaagtcaagtctatggaaaagcgcgtgagtaaaatcaaaaccatcctgctgtccaaggaaatcttcgacttttcacctgaggaacacctgaaacatggcgaggtgattctggagaatatccggcctatgaagaaaacaatcgccgaaatcgtaagttaccaggtggaactgaggctgccacagacgggcatgaaaccgttacctgtctttcagcggaccaatcaactgttgcaggatatcaaactcctggaaaatgtgactcaagagcagaacgagttgctcaaggtggtaataaagcagacaaatgaatgggacgaggaaatcgagaatctcaagcagatcctgaacaattatagtgctcagttctcactcgagcacatgagtccagatcaggcggataagctaccccagttgcagggcgagatcgaaagaatggaaaagcaaatcctcagtctcaatcagcggaaggaggatctgttggtggatcttaaagcaaccgtcctcaacctgcatcagcacctgaagcaggaacaggaaggggttgagagagacaggcttcctgctgtgacaagcgaggagggaggagttgcggaacgcgacgcctccgagagaaagctgaaccggcgtggcagcatgagctatctggctgctgtggaagaggaagttgaggagtctagcgtgaaatccgacaacggggacgagaaggcggaaccaagccctcagtcctggagctctttatggaagcacgataaggacatggaggaggatcgagcatcttctagctccggtaccatagttcaggaagcgtacggtaaaatcagcacctcagataattccatggcacagattctcacacccgactctctgaatactgagcagggcccggaatgctcattaagacctaaccagacagaagaggggacaaccccgcctattgaggctgacacgctggactcttctgatgcacaggggggactcgagcctcgggtggaaaagaccagaccggaacctacggaagtgctgcacgcttgtaaaacacaggtggcagagctagaactgtggttgcagcaggccaatgtggctgtggagcctgaaaccttgaacgcggatatgcagcaggtgctagagcagcaactggtgggatgccaagctatgctgaccgagatcgagcataaggttgcattcctgctcgaaacatgcaaggaccaggggctgggagacaacggagccacccagcatgaggccgaagctctttccctgaaactgaaaacggtgaagtgcaatctggaaaaagtacagatgatgctgcaggagaagcatagcgaagatcagcatcccacaattttgaaaaaaagttcggagcccgagcaccaggaagcccttcagccggtcaacctcagcgaactggaaagcatcgttacagagcggccacaatttagccggcagaaagatttccaacaacagcaggtcttagaactgaaaccaatggaacaaaaggacttcatcaagttcattgaattcaatgccaagaagatgtggccccaatattgccagcacgataacgacacgactcaagaatcatccgctagtaatcaggctagcagtccggaaaacgatgtccccgattcaattctgagcccacagggccagaatggagataagtggcagtacctgcatcatgagctgtcatctaaaattaaattacctctgccccagctcgtggaaccgcaggtcagtaccaatatggggattttacccagtgtgaccatgtataactttcggtatcctaccactgaagagctcaagacctacaccactcagcttgaagacctaaggcaagaggcttccaacctgcagacacaggaaaacatgaccgaggaagcctatatcaatctcgacaaaaaattattcgagctgttcctgacgctgagtcagtgtttgtcatcagttgaggagatgcttgagatgccacggctataccgagaagacggcagcggacagcaggtgcactacgaaaccctcgccctcgagctgaaaaaactgtatcttgctctctccgacaagaagggggacctgctgaaagcaatgacctggccaggggagaacactaacctgttgctggaatgctttgacaatcttcaggtgtgtttggagcatacacaggctgcagcggtctgtagaagtaaatcccttaaagccggccttgattacaacaggtcttaccagaacgaaatcaagcgactctaccaccaactgatcaagagtaaaacgagtctgcaacaatctctgaatgagatatccggccagtctgtggctgaacagttgcagaaagctgacgcatacaccgtggaattagaaaatgcagagagccgcgttgcgaagctgagggacgagggcgaacggttgcacctgccctatgcactactgcaggaagtctacaaattggaagatgtgctggattcgatgtggggaatgctgcgcgctcgatataccgagctgagtagtccctttgtcaccgaaagtcagcaagatgcactcctgcaaggcatggtggagcttgtgaaaattggtaaggaaaaactcgcccacggacatctgaaacaaacaaaatccaaggttgccttacaggctcagattgaaaatcacaaagtatttttccagaaactggttgctgatatgttactaattcaggcctactctgctaagatcctgccaagcctgttgcagaacagagagacattttgggctgagcaagtgaccgaggttaagattctggaagaaaagtcacgccaatgtggcatgaaactgcagtctttgttgcagaagtgggaagagttcgatgagaattatgcctctctcgaaaaggatctcgagatattaatctctacccttccttcagtgtcactcgtggaggaaactgaagagaggcttgttgaacgcattagcttttatcaacagataaagagaaatattggcggaaagcatgcccgcttataccaaactctgaacgaaggcaaacaactggtcgctagtgttagctgccccgaattggaaggccaaatagctaagctggaggaacagtggctttcactaaacaaaaagatcgaccacgaactgcaccgactgcaggcacttctgaaacatttgctttcctacaatagggatagcgatcagctgactaagtggttggaatcaagccaacacactctcaactattggaaagagcagtctctaaatgtcagtcaggatctcgatacaatacgcagtaacatcaataactttttcgaattcagtaaggaagtcgatgagaagtctagtctcaaaaccgctgtcattagcataggcaatcagctcttgcacctgaaggagactgatacagccactcttagagcctcattggctcaatttgagcagaagtggactatgctgataacccagttgcccgacatacaggaaaagctccatcagctccaaatggagaaactgccttctaggaaagccataaccgagatgatcagctggatgaataatgtcgagcatcagacaagtgatgaggattcagtccactctccttcgagcgctagtcaagtgaaacatttgctgcagaagcataaagagtttcgaatggagatggattacaaacagtggatagtggattttgtcaaccagtcactcctgcagctgagcacgtgcgacgtcgagtccaagcgttacgagagaaccgaattcgccgagcatctcggggaaatgaaccggcagtggcatagagtccacgggatgctaaatcgcaaaattcagcacctggagcagctgctcgagtccatcacggaaagcgaaaacaaaatccaaattctgaataactggttggaggcccaggaggaaaggctcaagacactccagaagccagagagtgtcatttctgtccagaaactgctactggactgccaagatatcgagaaccagctggcaatcaagtcgaaggccctggacgaattgaagcaatcttatctcacactggaatccggagctgtccctctactggaggataccgcctcccgaatcgatgaactgttccagaaacgcagctccgtacttacccaggtgaatcagctgaaaacctctatgcaaagtgtgctgcaggagtggaagatctacgatcagctgtatgacgaggttaatatgatgactatcaggttctggtactgtatggaacattccaaacctgtggtcttgtctctcgagacactaagatgccaggtggagaacctgcaaagccttcaggacgaagcagagagctcagagggaagctgggagaagctgcaggaggtcatcggtaaactcaagggcttgtgtccctccgtggccgaaatcatcgaagagaaatgccaaaacacacataaacgctggacacaggtgaatcaagcaattgctgaccaacttcagaaggctcagagtctgcttcagctgtggaaggcatacagtaacgctcatggcgaagccgcagccaggctaaagcagcaggaagccaagtttcaacagctggcgaatatcagcatgagcggtaataacctcgccgaaatccttccccctgctctgcaggacattaaagaactccagcacgacgttcaaaagaccaaagaggcattcctccagaattcttccgtccttgaccggctaccccagcctgccgagtcctctactcacatgctcctgcccggaccgctacacagtctgcagcgagccgcatacctggagaaaatgctgctcgtgaaggccaacgagtttgaattcgtgctctctcaatttaaagacttcggggttaggctcgagtctctaaaaggactaatcatgcatgaggaagagaacctcgaccgactgcatcagcaggagaaagagaatccggacagcttcctgaaccatgtcctggccttgaccgcgcagtcccctgacatcgagcacctgaacgaggtttctttaaagctgcccctgagcgacgtggccgttaagaccctacaaaacatgaaccgccagtggattcgagccacagcgactgcacttgaaaggtgttcggaactacagggtattggcttgaatgagaaattcctgtactgttgcgagaagtggatacagcttttagaaaagatcgaggaggcgctgaaggtagatgtggcaaattctttaccagagctgctggaacagcagaagacatataagatgttggaagctgaagtgtccatcaatcagactatcgctgattcctacgtgacccagtcactgcagctactggacaccaccgagatcgaaaacaggccggaattcataaccgagttctcgaagctaactgaccggtggcagaacgctgtgcagggggtacgccagcggaaaggggatgtggacggcttggtccgtcagtggcaagacttcactacaagtgtagagaatctgtttaggttccttaccgataccagtcaccttctgtccgccgtcaagggtcaagaaagattttctctttaccagaccaggagtctgattcatgaactcaaaaacaaagaaatccactttcagaggaggcgcactacatgcgcactgacgctcgaggctggtgaaaagctgcttctgacaacggacctgaagacaaaagagagcgttggcaggagaatcagtcagctgcaggattcgtggaaagatatggagcctcagctggccgagatgattaaacaattccagtccaccgtggaaacttgggaccagtgcgaaaaaaagataaaggagctgaaaagccggcttcaggtgttgaaagcccagtccgaagaccccctccccgagcttcacgaagacctgcacaacgagaaagaactaattaaagaacttgagcaatccctcgcatcctggacgcaaaacctgaaagagctgcagactatgaaggccgatctcaccagacacgtgcttgtcgaggacgttatggttcttaaggaacagattgaacatctccatcgccagtgggaagacttgtgccttagggtggcaattagaaagcaggaaatcgaagatagactgaacacctgggtggtgttcaacgaaaagaacaaggaactatgtgcctggctagtgcagatggaaaataaagtacttcagacagctgatatctcaatcgaagagatgatagagaagttgcagaaagattgcatggaggagattaacctcttcagcgagaacaagctgcagttgaaacagatgggcgaccagcttattaaagccagtaataaatctagggctgcggagatagacgacaagctgaacaagatcaatgaccggtggcaacacctctttgatgtgatcgggagtcgcgtgaaaaaactcaaggagacatttgcattcatacagcagctggataagaacatgtcaaatcttcgcacatggttagccaggattgagtcagaactcagtaaacccgtggtttacgacgtgtgcgacgaccaagagatacagaaacgcttggccgagcagcaggacctccaacgtgacattgagcagcacagtgctggcgtcgaatctgtctttaatatttgtgacgtcttgcttcacgacagcgacgcttgcgcaaatgagaccgaatgtgattctatccagcagacgaccagatcccttgataggaggtggagaaatatttgcgctatgagtatggagcggagaatgaaaatcgaagagacgtggagactatggcaaaagtttttggacgattattctaggttcgaggactggctcaagtcggccgagcgaacagcagcatgtccgaactcgagtgaggtcctctacacttcagcaaaagaggaattgaaacggttcgaagcatttcaaaggcaaatccatgaacggctgactcagctggagctgattaataagcagtatcgcagactcgcgagggaaaatcgaactgatacagcttccagactcaagcagatggttcatgaagggaatcagaggtgggacaatttgcaacggcgtgtcaccgcagtgctgcgtcgtttacgccattttaccaatcagcgtgaggaatttgagggtaccagagaaagcattttggtgtggttaactgaaatggacctgcaactgacgaacgtggagcatttctctgaatcagacgcggatgataaaatgcgtcaacttaacggttttcagcaggaaattacactaaataccaataaaatagaccagttgattgtctttggagaacagctcatacagaagtctgaacctcttgacgccgtcctcattgaagacgagctggaagaactgcaccggtactgccaggaagtcttcggaagagtgtcccgatttcatcgacggctgacaagctgtaccccgggattggaggatgaaaaagaggcctccgagaacgagaccgacatggaggatccccgggagatccagactgactcttggcggaaaaggggggagtccgaagagcccagcagtccacagtctttgtgtcatctcgttgcaccaggacatgaacgttctggctgtgaaacaccggttagtgtggattctattccgctcgagtgggatcataccggggatgtgggcggcagttcctcccatgaggaagatgaagagggaccgtactattcggctctttctggcaagagcatctcagatggccatagctggcacgtgccagatagtcctagctgtccagagcaccactataaacagatggagggtgaccgaaacgttcctcctgtgcctcctgctagcagcaccccttataagcctccttacggaaagctgttgctgccgccagggaccgacgggggtaaggaaggcccaagagtgctgaatggaaatccacagcaggaggacgggggactggcaggcataacagagcagcagtcaggggcttttgatcgctgggagatgatccaggctcaagagctgcataataaactcaaaatcaaacagaacctgcagcaactgaacagcgacatcagtgctattacaacttggctgaaaaagaccgaagccgagctggaaatgctgaagatggccaagccgccgagtgacatccaagagattgaattgagagtgaagcgcctccaggaaattctgaaggcctttgatacctataaagcgctggtggtgagcgtcaatgtgagttccaaagagttccttcagaccgagagtcctgaaagtaccgaactgcagagccggctgaggcagcttagtctcctttgggaggcggcccagggcgctgtggattcctggagaggcggcttgcggcagtctcttatgcagtgtcaggacttccaccagctgtctcaaaatctgctgttgtggcttgcctcggccaaaaaccggagacagaaggctcatgtgaccgacccaaaggccgacccacgggctctgctggagtgcaggagggaattgatgcagttagaaaaagaactggttgaaagacagccacaggtggacatgctgcaagagatttctaactccctgctgataaaaggccacggagaggattgcatcgaagcggaggaaaaggtacacgtgatcgagaagaagctgaaacagctgcgcgagcaggtctctcaggacctcatggccctccaagggacccagaaccccgctagcccacttccgtcattcgacgaagtcgacagcggggatcaacccccagcaacttccgtccctgccccacgggctaaacagtttcgcgcggtgaggacaacagaaggggaagaagagacggagagcagggtgcctggtagcacacgcccccagcgttctttcctgtcccgcgtggtgcgcgccgcgctgcctctgcagctgctgctcctgctattattgctgctggcctgcctgctgccatctagcgaagaagattattcctgcacccaggcaaataacttcgccaggagcttttatcctatgcttagatataccaacgggcctcctcccacatag

SEQ ID NO: 206676 - DNA, 804 bp, synthetic construct
  misc_feature 1..804: note = Description of Artificial Sequence: Synthetic coding sequence
  source 1..804: mol_type = other DNA
atggccagcagccccgagctgcccaccgaggacgagcagggcagctggggcatcgatgaccttcacatttccctgcaggccgagcaggaggacactcagaaaaaggccttcacatgttggatcaacagccagctcgctcgccacacatccccctccgtcatctcagatctgttcactgacattaagaagggccatgtattgctcgatcttctggaggtgctgtctggacagcagcttcccagagataaagggtctaatacatttcaatgccggatcaacatcgagcacgccttgaccttcttgagaaacaggtcgattaagcttattaacattcatgtgactgacataatagacggcaatcccagtatcatccttggtctgatctggactattatacttcatttccacattgagaagctcgctcagaccctttcttgcaattataaccagccaagtcttgacgatgtctcagttgtggatagttcaccagcatcctctcctcctgccaagaaatgctccaaggttcaggcccggtggcagatgagcgcaaggaaagctcttctgctttgggcccaggagcagtgcgcaacctacgaaagtgtgaatgtgaccgacttcaagtcatcttggaggaacggaatggcctttttagcaatcatccacgctctacggccagacctgattgacatgaaatctgtcaagcacaggtcaaataaagataacttacgcgaggctttcagaattgctgagcaggagctgaaaatccccagactgctcgaaccagaagcctacaaaaatttctag

SEQ ID NO: 206677 - DNA, 9813 bp, synthetic construct
  misc_feature 1..9813: note = Description of Artificial Sequence: Synthetic coding sequence
  source 1..9813: mol_type = other DNA
atggagaagctgcggatcaagtacagcgagatgtacaccatcgtgcctgcggagattgagtcccaggttgaagagtgcagaaaggcgctggaagacatcgatgagaagatctcgaacgaggtgctgaaaagtagcccttcatacgcaatgagaaggaaaatagaggagattaacaatggcctgcacaatgtggagaaaatgctgcagcagaagagcaagaacattgaaaaggctcaagaaatacagaaaaagatgtgggatgagctcgacctctggcactccaagttgaacgagcttgatagcgaagtgcaagatattgtcgaacaggaccctggacaggctcaggagtggatggataatctgatgattcctttccagcagtatcagcaggtttcccagcgtgctgaatgcaggacgagccagctgaacaaggctacggttaaaatggaggagtacagcgatttactgaaatccaccgaggcatggatcgaaaatacctcacatttattagccaaccctgccgactatgactccctgcggaccttgagccaccacgcgtccaccgtgcaggacagtaaatgcttcaggagcggaccacggccaaacatttatgtatcctactacgtgaccgtcatccagatggcactggaggacagtgagcaaaagcataatcttttgcactccatctttatggacttggaggacctttcaatcatcttcgagaccgacgaacttacccagagcatccaggaactgagcaatcaggtgacggcactgcaacaaaaaatcatggaatcgctcccccagattcagcggatggcagatgacgtggtggctattgagtctgaggttaaaagcatggagaaacgcgtgtcgaagattaagaccatcctcctctccaaggaaatcttcgacttttcccctgaggaacacctgaagcacggcgaggtgatccttgaaaacattagaccgatgaaaaaaacgatcgccgaaattgttagctaccaagtggagctgaggctcccgcagaccggcatgaagccacttcccgtctttcaaagaactaaccagctgctacaggacattaaacttttggagaatgtgacccaggaacagaacgaactcctgaaagtcgtgataaagcagacaaatgaatgggatgaggagattgaaaacctgaagcagatcctaaacaactacagcgcccagttcagcctggagcacatgtccccagaccaggctgacaaactgccccagctgcagggcgaaattgaaagaatggagaagcagatcttatctttaaaccagcgaaaggaggacctgctggtcgacctgaaagccaccgtgttaaacctgcaccagcatctgaagcaggagcaggagggtgtagagcgggatcgcctgcctgctgtcacgagcgaggaaggtggagtagccgaaagggacgccagcgagaggaagctgaatcgccggggaagtatgtcttatcttgcggccgtggaagaggaggttgaagaaagtagtgtgaagagtgacaacggtgacgagaaggcagaacctagcccccaaagctggtcttcattatggaaacatgacaaggatatggaagaagacagagcttccagctcgtcaggaaccatcgtgcaggaagcttacgggaagatttccacctcagacaactctatggcccagatcctgacccctgactccttgaatactgagcagggaccagagtgcagtctacggcccaatcagacagaggaaggcaccacgccacctatagaggcagacaccttggactcttccgatgcacagggaggtctggaacctcgagtcgaaaagactaggcctgagcccaccgaggttctgcatgcatgcaaaacccaagttgcagagctggaactgtggctccaacaggctaacgtcgctgtagagccggaaaccttgaacgccgatatgcagcaggtactggagcagcagctcgtaggctgtcaggccatgctgaccgaaattgaacacaaagtagcattcttgctggaaacctgtaaagaccaggggctgggtgacaatggagcgacgcagcacgaggccgaggccttatctctcaagctcaaaactgtgaaatgtaacttagagaaggtgcaaatgatgctgcaggaaaagcacagtgaggatcagcatccaaccattctcaaaaaaagctctgaacccgagcatcaggaagctctccaaccagtgaacctgtcagagcttgagagcatcgtcacggagcgtccccaattcagcaggcagaaggacttccagcagcagcaagtgctagagttgaaacctatggagcagaaggacttcatcaaatttatcgagtttaacgcaaagaagatgtggccccagtactgccagcacgataacgacacaacgcaggagagtagcgcgagtaatcaggcctcctctccagagaatgacgttcccgactccatcctctcacctcaaggccagaatggcgacaagtggcagtatctccatcacgagctatcaagtaagataaagctccccctgccgcagcttgtcgagccccaagtgagtaccaatatggggatcttgccttcagtcacgatgtataactttcggtatcccaccacagaggaactgaagacatacactacccaactggaggatttaagacaagaagcctctaaccttcagacccaggaaaacatgaccgaagaagcttacattaatctggataagaaactgttcgagctctttctaaccctttctcagtgcctttcatctgtggaggaaatgcttgagatgccacggctttaccgggaagacggaagcggacaacaggtgcattatgaaaccctcgccctcgagctcaagaagctatatctggctttgagcgataagaagggcgatctgcttaaggcaatgacctggccaggcgagaacacaaatcttcttctggagtgttttgataatctgcaggtatgtctggaacacacccaggctgctgctgtgtgccggtccaagagccttaaggcagggctcgactacaacaggagctaccagaatgagattaagcgcctataccatcagctaatcaagagtaagacgagcctgcagcagtctctgaatgagatatccggtcagtctgtggccgaacagctgcagaaggccgacgcctataccgtggagttagaaaacgcagaaagcagagtcgctaaactgcgtgacgagggggaaagactgcacctcccttacgctctgctgcaggaagtctataagttggaagacgtcctggacagcatgtgggggatgctccgggcgcggtacacagagctctcctctccctttgtgaccgagtcccagcaggatgcgttgctgcagggaatggtagagctagtcaagatcggaaaggagaaactggcacatggacacttgaagcaaaccaaaagcaaggtagcactacaagcacaaattgagaatcataaggtattcttccagaaattggtggccgacatgcttcttattcaggcatattctgcgaaaatccttccttcgctccttcagaatcgcgagaccttttgggcagagcaggtgacagaggtgaaaattctcgaggagaaaagtcgccaatgtgggatgaaacttcagagtctcctgcagaagtgggaagaattcgacgagaactacgcctccctggagaaggatttggagattcttataagtacactgccatctgtgagtcttgtggaggagaccgaggagagactcgtggaacgcatctccttttatcaacaaatcaagaggaacatcggagggaaacatgcccggctgtatcagacacttaacgaaggcaagcagttagtggcatcagtgtcatgtcctgagctggaaggccagatcgcgaaactggaggagcaatggttgagtctgaacaaaaaaatcgaccacgagctacataggttgcaggctctgttaaaacacttactgagttacaatcgcgattctgatcagctgacgaaatggctagagagctctcagcacacgctgaactactggaaagagcagtcactcaacgttagtcaagatctggatacaataaggtccaacattaacaactttttcgaatttagcaaagaggttgatgagaagtcatcgctcaagacggccgtgataagtatcggaaaccaacttttacacctgaaggaaaccgatactgcaacgttacgagcaagtctggcccagtttgaacaaaagtggacaatgctcattacacagctcccagacatacaggaaaagctgcaccagctgcagatggaaaagctaccttctcgaaaggctatcactgaaatgatttcctggatgaataacgtggagcatcaaacaagcgacgaagactctgtgcattctccttcaagtgcaagtcaggtcaagcacctgttacagaaacacaaagaatttcgtatggagatggactataagcagtggatagtcgatttcgtgaaccagtctctcctgcaactctcaacttgtgacgttgagtcaaagaggtacgagaggaccgagttcgctgaacatctgggtgaaatgaatagacagtggcatcgggtccacgggatgcttaaccggaagatccagcatctagaacagctgttagagagtatcactgagtcagagaacaagattcagattctgaataactggctcgaggcccaggaggagcgtctaaagactctgcaaaagccagaaagcgtgatcagcgtacagaagctgcttttggattgccaggacatcgagaaccagctcgctatcaagtcgaaggcactagacgaactcaagcagagctacctaacccttgaatccggcgccgtccccctcctggaggataccgcaagcaggattgacgagcttttccagaaaagatcttccgtgttgactcaagtaaatcaactcaagacatccatgcagtctgtcctccaggaatggaagatatacgaccagctgtacgacgaggtcaatatgatgaccattcgcttttggtactgcatggaacattccaaacccgtcgttttatctctggagacattgcgttgtcaggttgagaacctgcaaagcctccaggatgaggctgaatcgagcgaggggagctgggagaagctccaggaggttattggcaagcttaagggcttatgtccctctgtggcagagattattgaggagaagtgtcagaacacgcacaagcgttggacgcaagtaaaccaagctatagccgatcagttgcagaaggcccagtccctcctccaactgtggaaggcctattcaaacgcccacggagaggctgccgcaagattaaaacagcaagaagccaagttccagcagcttgctaacatcagcatgagtggaaacaacttggcagagatacttccccctgccctgcaagacattaaggagttgcaacatgatgttcagaagaccaaagaggcgttccttcagaacagcagcgtgctggatcggctgccccagcctgccgaatctagtactcacatgctgttgcctggtcctctgcactctctgcagcgcgccgcctatctggaaaaaatgctgctggtaaaggctaacgagtttgaatttgtgctaagccagtttaaagatttcggcgtccgcttagagagcctcaaaggcctcatcatgcatgaggaggagaacctagaccggctccaccagcaagaaaaagagaaccctgactctttcttgaatcatgtgctggcactcaccgcccagagcccagacatcgagcacctcaatgaagtgtccctgaagctgccacttagcgatgtagcagtgaagactctgcaaaacatgaatcgtcagtggatccgagccaccgctacagccctggagagatgttcagaactgcagggcatcggtctgaacgaaaagtttttatattgctgtgagaaatggatccagttgctggagaaaattgaagaggccctcaaggttgatgttgccaacagtttgcctgaactgctcgaacagcagaaaacatataaaatgctggaggcagaagtgagcattaatcaaacaattgctgattcttacgttacgcagtcactgcagttgctggacacaactgagattgaaaacagacctgagtttatcacagaatttagcaaactgacagaccgctggcagaatgcggtacaaggcgtcagacagcggaagggcgacgtcgacggcctggttaggcagtggcaagacttcaccacatccgtggagaaccttttcaggtttctaactgatacaagtcatctgttgagcgccgttaagggccaagaacggttttcattgtatcagacccggtctttaatacatgaactgaagaacaaggagatccatttccagagacgcagaaccacatgtgccttgaccctggaagcaggagagaagctgctgttgacaactgatttgaagactaaagagtccgtgggtaggcgcatctcccagcttcaagactcgtggaaggacatggagccccagctggctgagatgataaaacagtttcagagtaccgtcgaaacgtgggaccagtgcgaaaagaagattaaggaactcaagtcacggttgcaggtcctaaaggcgcagtctgaggaccctctgccagaattgcatgaagatctacataatgagaaagagctgatcaaggagctggaacagagtctcgcaagctggacgcaaaacctgaaagaattgcagactatgaaagccgatcttactcggcacgtcctggtggaggatgtgatggtgttgaaagagcagattgagcacttgcacaggcagtgggaagacctctgtttgcgggtggccatccgaaagcaggaaatcgaagataggctgaacacgtgggtggttttcaacgagaagaacaaggaactctgtgcttggttggtgcagatggagaacaaagtgctccagactgcagacatctccatcgaggaaatgatagaaaagcttcagaaagattgcatggaagagatcaatctattttccgagaacaagttacagctgaagcagatgggggatcagcttattaaggcctccaacaaatccagggccgccgagattgatgataaactgaataaaattaacgatcgttggcagcatcttttcgacgtgattggctcacgtgtgaagaagctgaaggagacgtttgccttcatccagcaactggataagaacatgtctaaccttaggacatggttagcccgcatcgaaagcgaactctccaaacccgtggtgtatgatgtatgcgacgaccaggaaattcaaaaacgcctggccgaacaacaggatctgcagagagacatcgagcagcattcagccggggtagaaagtgtgttcaatatatgtgatgtcctgctccatgactccgatgcctgcgccaatgagaccgaatgcgattccatacagcagacaacccgctccttggatagaaggtggcgaaatatctgcgcgatgtctatggaacgcagaatgaagatcgaagaaacatggagactgtggcagaagtttctagatgattattctcggttcgaggactggttgaagtcagcggaacggaccgccgcctgtccgaactccagtgaagtgctctatacttctgccaaggaagagctgaagcgcttcgaggcctttcagaggcagattcacgagagattgacacagctggagctgattaataaacagtaccgtagacttgccagggagaaccgcacagataccgcctctaggctcaagcagatggtgcatgaaggaaaccagagatgggataacctgcaacgacgggtgactgccgtgctgcgccgattgcgccactttactaatcagcgggaggaatttgaggggactagagagagtattctggtctggctcacggagatggatctccaattgaccaacgttgagcatttcagcgagtccgatgctgacgacaagatgcggcaactgaatggatttcagcaggaaattacccttaacactaataagatagaccagctcatagtgtttggagagcagttgatccaaaagtctgagccattggatgccgttctgattgaggatgaattggaagagctgcacagatattgccaagaggtgtttggccgggttagtaggttccaccgcaggctcaccagctgtacacccggtctggaagacgagaaggaggcctccgagaacgagactgacatggaggatccgagggagattcaaaccgatagttggaggaaaagaggggaaagcgaggaaccttcatccccacagtctctgtgccaccttgtcgcacccggccacgagcggtccgggtgcgagacgccagtgagcgtcgattccataccactggagtgggatcataccggagatgtcggcggcagtagcagccatgaagaggacgaagaggggccctattattctgccctgtctggaaagagtattagcgatggccatagctggcacgtgccggactctccatcctgtcctgagcaccactacaaacagatggaaggagatcgcaatgtgcctcccgtcccaccagcaagcagtaccccatataagccgccttatgggaaactactgttgccacctggaacggatggggggaaggaaggtccacgcgtactaaacggtaacccgcaacaagaagacggtgggctcgcggggatcacagagcagcagtctggcgcattcgatcggtgggagatgattcaggcgcaggaactgcacaataaactgaaaatcaaacagaacctgcagcagctgaattcagatatcagcgccatcacaacctggctgaaaaaaaccgaggccgagttggaaatgctcaaaatggccaaaccaccatcagacatacaagagattgagctgcgagtcaaaagactacaggaaattctgaaggcgttcgacacttacaaagcactggtggttagcgtaaatgtgagcagcaaagagttcctgcagacagagtcccctgagagcacagagctgcagtcaagacttcggcagctaagtctcctgtgggaagccgctcagggcgcagtcgattcttggcgggggggactgcggcaaagtctgatgcaatgccaagatttccaccagctttcacagaatcttctgctgtggttggccagcgccaagaaccggagacagaaagcccacgtcaccgacccgaaagcggatccgcgagctctcctagaatgccggcgcgaattgatgcagctggagaaggagttggtcgagcggcagccccaggttgatatgttgcaggagatctccaactctctgctgatcaaaggacacggagaggattgcattgaagcagaagaaaaggtgcacgttattgaaaaaaagctgaaacagctgcgggagcaagttagccaggacctcatggctttacaagggacccaaaatcctgccagtcctctgccctcattcgatgaagtggatagtggggatcagcctccggcaacctccgtcccggcaccccgcgctaaacagtttcgggcagtcagaacgaccgagggagaggaagaaactgaatcgcgggtccctggttctacaaggccacagcgttccttcctcagccgggtggtccgcgctgcgctgcctctgcagctcctgctgctgctgctgttgttgctcgcctgtctgttaccaagctcagaggaggattattcatgtacccaggctaataactttgcccgcagcttctatcccatgcttcgttacacaaacggtccaccccctacctag

SEQ ID NO: 206678 - DNA, 20724 bp, synthetic construct
  misc_feature 1..20724: note = Description of Artificial Sequence: Synthetic coding sequence
  source 1..20724: mol_type = other DNA
atggccagcagccccgagctgcccaccgaggacgagcagggcagctgggggatcgatgacctgcacatctcactgcaggctgaacaagaggacacacaaaagaaggcatttacctgctggatcaacagccagctcgcccggcacacaagcccctccgtgattagtgacctgttcaccgatataaaaaagggccacgttctgctcgatcttctcgaggtactctcaggccagcagctgcctcgagacaagggatcgaacacctttcagtgccggataaacatcgaacacgccttgacatttctgcggaataggtcaatcaagctgattaacatccatgtcactgacattattgacgggaatccttccataattctcggactcatctggacaatcatcctccatttccatattgagaaactcgctcagaccctctcttgcaactataaccagccaagcctcgacgatgtatcggtggttgattcatctccggcctcgtctccccctgctaagaagtgcagcaaggtacaggcacggtggcagatgtcagccaggaaggcattattgctgtgggcccaagaacagtgtgccacttacgaaagtgtgaacgtaaccgattttaaaagttcttggcgtaacggcatggcgttcctagcgatcattcatgcattgaggccagatttgattgatatgaagtcagtaaagcacagaagcaacaaagataatctgcgtgaggcatttcgcatagctgaacaggagctgaaaattccaagacttctggaaccggaggacgttgacgtcgtggaccccgatgagaagagtatcatgacatatgtcgcacagttcctacaatatagcaaggatgccccgggcaccggcgaagaagcacagggcaaggtgaaagacgcgatgggatggcttactctgcagaaagagaaactccagaagctcctcaaggactctgagaacgatacatatttcaaaaagtataactctttgctcagcttcatggagtcattcaacgaggagaagaagagttttctggacgtccttagcatcaaaagggatttggatgagctagataaagaccacctgcaactcagggaggcatgggacgggctagaccatcagataaatgcatggaagattaaactaaattatgcccttccccctccgttgcaccagaccgaggcatggctgcaagaagtggaagagcttatggacgaggatctgtccgccagccaggaccatagtcaggcggtgacgcttattcaggaaaagatgaccctgttcaagtctctcatggaccgcttcgaacatcactcgaatatcctgctgacttttgaaaacaaagacgaaaaccatctgccactggtgccacccaacaagctcgaggaaatgaagcgccggataaacaatatactggaaaagaagtttatcctacttctggaattccactactacaaatgtcttgtcctgggtttggttgacgaagtgaaatcaaaacttgacatatggaacattaagtacggatctcgagaaagtgttgaactcctgcttgaggactggcacaaattcatcgaggaaaaagaatttctggcccggctggacacctcttttcagaagtgcggtgagatctataagaatcttgccggggaatgccagaacatcaacaaacagtacatgatggtgaagtcagacgtgtgcatgtacagaaaaaacatatacaacgtgaagagtacattgcagaaagtcctcgcctgttgggcgacatatgtcgagaacctgaggctgcttagagcctgctttgaagagacaaagaaagaggagattaaagaagttccttttgaaaccttggctcagtggaatctcgagcacgcaactcttaatgaggccgggaatttcctcgtggaagtttccaatgatgtggtgggctcgagcatttcaaaggaacttaggcgcctgaataaacggtggagaaagctcgtgtctaagactcagttggagatgaacttaccactgatgatcaaaaagcaggatcaacctacctttgataattctggaaacatactgtccaaggaagaaaaagctacagtcgaattctctactgatatgagtgtcgagcttccagagaattacaatcagaacatcaaagccggcgaaaaacacgagaaggagaatgaggaattcaccggccagttgaaagtggccaaggacgtcgaaaaattgatcggccaggttgaaatctgggaagctgaagcaaagtccgtccttgatcaggatgacgtagacaccagcatggaggaatccctcaagcacctcatcgcgaagggctccatgtttgatgaactgatggcacggtccgaggacatgcttcagatggatattcagaatatctcatcccaggagtccttccaacacgtcctgaccaccggcctgcaggctaagattcaagaggccaaagagaaggtacagatcaatgtcgtgaagctcatcgccgcgttgaagaacctgactgacgtgtcccctgacctggacattagactgaagatggaagagtcccagaaggaactcgagtcctacatgatgcgagcacagcagctcctggggcaaagggagtcccctggcgagttaatcagtaagcacaaggaggccctcattattagcaacacaaagtctcttgcaaagtacctgaaagctgtagaagagctgaagaacaatgttaccgaggatatcaagatgtcccttgaggagaaatcccgcgatgtttgtgctaaatgggagtccctgcatcacgagctgtctctttatgtgcagcagctgaaaatcgacatcgagaaaggtaagctgtccgacaacatactgaagctcgaaaagcagataaacaaagagaagaaactcatacgtagaggcagaacaaaggggttaatcaaagaacacgaagcatgcttttctgaggagggctgtctgtatcagctgaaccaccacatggaggtcctgcgcgaactgtgtgaggagcttccaagccaaaagagccagcaggaggtcaagcgcctcttgaaagactacgagcagaagatcgagcggctgcttaaatgcgcttcagagatccacatgactttacaacctaccgccggcggtaccagtaagaatgaagggaccatcacaacgagtgagaataggggaggcgatccacattcagaagccccattcgccaagtccgacaaccagccgtcaacggaaaaagctatggaaccgacaatgaaattcagtctcgccagcgtactcagacctctccaagaggaatcgataatggaaaaagattactcagcaagcatcaattcactactcgaacggtacgatacttaccgagatatccttgagcaccacctgcagaataacaagtttcgaatcacctccgacttttcttccgaagaggatagaagcagttcatgcctgcaggcgaagcttactgaccttcaggtaattaagaacgagacggatgccaggtggaaagaattcgaaataatcagcctgaagcttgaaaaccacgttaacgatattaagaaacccttcgtgatcaaggagcgggacacactgaaggagcgtgagcgagagcttcagatgacactgaacacccgcatggagagtcttgagacagctttgaggctcgtgctgccagtggagaaagcatctttactgctctgcggaagtgatctgcctctacataagatggcgatacagggctttcacttgatcgatgctgaccgtatttatcagcacctccggaacatacaggatagtattgcaaagcagatcgagatatgtaatagactcgaagagccaggaaacttcgtgcttaaggagctgcacccattcgatctgcatgcaatgcaaaatattatcctgaagtacaagacgcagtttgaaggcatgaatcatcgggtccagcggagcgaggatactctgaaagctctggaggattttctggcctcattgcggaccgccaagttatcggctgagcccgtcaccgacttgtccgcttcggatacccaagttgcgcaggagaacacgttgaccgtgaagaacaaggagggtgaaatccatctaatgaaggataaggccaaacacctggacaagtgtctgaagatgctcgatatgtcctttaaagatgctgaacgaggagatgatacatcatgcgaaaacttgctggatgctttctccattaagttgagcgaaacccatggttacggagtgcaggaggagttcacggaagaaaataaactgctggaggcctgtattttcaaaaacaacgaacttctgaagaatattcaggacgtccagtcacagatatctaagataggcctgaaggacccaacggttcctgccgtcaaacataggaagaaaagtctcataagactggacaaggtcttggacgagtacgaggaagagaaaaggcatctgcaggagatggctaatagcctaccgcacttcaaagacgggcgcgagaaaactgtcaaccagcagtgccagaatacagtagttctgtgggagaacacaaaggcccttgtgaccgaatgccttgaacagtgcggccgtgttctggagctgcttaaacagtaccaaaacttcaaatcaatcctgaccacactgatccaaaaggaggagagcgtcatctctctgcaggcctcctacatgggcaaagagaacctgaagaagaggattgcagaaatagagatcgtcaaagaggaatttaatgaacacctagaggttgtcgacaaaatcaatcaagtttgcaaaaacctccagttctacctgaacaaaatgaaaactttcgaggagcctccgtttgaaaaggaagctaatatcattgtggaccgatggctggacattaatgaaaaaactgaggactactacgagaacctgggtagagctttggctctatgggataaactgttcaatctcaaaaacgtgattgatgagtggacagaaaaggcattgcaaaagatggaattacaccagctgactgaggaggaccgtgaaaggctgaaggaggaattgcaggtgcacgagcagaagactagtgagttcagtcgaagagtagctgagatccagtttttactgcagagctccgagattcccctagagctgcaggtcatggaatcctcgatcctgaataagatggaacacgtgcaaaaatgtttaaccggcgagtccaactgtcatgccctgtctggatctacagccgaactgcgggaagatttggatcaagctaagactcagattggtatgacagaaagcctgcttaaggctctgtctccgtctgatagcctggagatcttcactaagctggaagagatccagcagcagatactgcagcagaaacattccatgattttgctggagaaccagatcggctgtcttacacccgaattgtctgagcttaagaagcaatacgaaagcgtttcggacctttttaacaccaaaaagagcgtgcttcaggatcacttctctaagctgctgaatgaccagtgtaagaattttaatgattggttcagtaatatcaaggtaaaccttaaggagtgcttcgagagctcagagacgaagaagtcagtggaacaaaaacttcagaaactgagtgattttttaaccttggaaggacgtaacagtaagatcaagcaggtggactctgttctcaagcatgtgaaaaaacacttaccaaaggcacacgtgaaggaattaatctcctggctggtcggtcaggagttcgagctggaaaaaatggaaagcatatgtcaagcccgagccaaggaattggaggactcattacaacagctcctgagactgcaggacgaccaccgaaacctgaggaaatggctgactaatcaggaggagaagtggaagggtatggaggaacccggcgagaagaccgagctcttctgtcaggctctcgctcggaagcgggagcagtttgagagcgtggcgcagctgaacaacagcctgaaggaatatggctttaccgaggaggaagagattatcatggaggccacttgcctgatggatcgctaccagacacttctcaggcagctgagcgagatcgaggaagaggataagctgctcccaactgaggatcagtcctttaacgatttggctcatgacgttatccactggatcaaggagattaaggagagcctaatggtcctcaatagcagcgaaggaaagatgccactcgaggaaaggattcagaagataaaagagatcattttgttaaaaccagaaggtgacgctaggatcgaaacaatcatgaaacaggccgaatctagcgaagcgccgcttgttcagaaaacgctcacggacatttcgaatcaatgggacaacaccctgcatcttgccagtacgtacctttcacatcaggagaagctgctgctggaaggagaaaaatacttgcaatcaaaggaggatctgcgacttatgcttatagagctgaagaagaaacaggaagccggctttgcactgcagcatggcctgcaggagaagaaggcccagctgaagatttataagaagttcctcaagaaggcccaggatctgacttcacttctgaaagaactgaagtctcagggtaactatctgctggagtgtacgaagaaccctagcttctcagaggagccttggctagagatcaagcacctccatgaaagcctgctccagcagctccaagactcagtgcagaatttggacggccatgtgcgtgagcacgactcttaccaagtgtgtgtcacagatctgaacaccacattagacaacttttcgaaggaattcgtcagtttctcagataagcccgtcgaccagattgctgtggaagaaaagctccagaagctgcaggaactagagaatcgcttgagcctccaagatggaacactgaaaaaaattctggccctggcgaagagcgtaaagcagaatacttcctccgtcggtcagaagattattaaagatgacataaagagcctccagtgcaaacagaaggacctggaaaatcgattagcgagtgccaagcaagaaatggagtgttgcttgaacagcatacttaagagcaagagatccaccgagaagaagggtaaattcactctccccggtcgcgaaaagcaagccaccagtgacgtgcaggaaagcacacaggagagcgctgcggtggaaaagctggaagaggattgggagattaataaggactctgcagtcgagatggcaatgagtaagcagttgagtctcaacgcccaggagagcatgaagaacacggaggacgagcggaaagtaaatgagctacaaaaccagcctctcgagctggatacaatgttgcgaaatgaacagttggaagaaatcgaaaagctctatactcagctagaagcgaaaaaggccgccatcaaaccactggaacagactgaatgcctgaataagaccgagaccggtgctttggtcctgcacaatatcggctactcggcacagcacctcgataatcttctgcaggcacttataaccctgaagaagaataaggaaagccaatactgcgttctgagggactttcaggaatatttggccgcagttgaaagtagcatgaaggccctgcttacagacaaggagagcctcaaggttggtcccttagactccgtgacgtacctcgacaagatcaaaaaattcatagcaagcatcgagaaggaaaaagatagcctcggcaacctcaagatcaagtgggaaaacttatcaaaccatgtgaccgacatggataagaagttactggagagccagatcaaacagctcgaacacgggtgggagcaggtggagcagcagattcagaaaaagtattcacagcaggtggtggagtatgacgagttcacgacacttatgaataaggtacaggacacagagattagtctgcagcaacagcagcaacatctgcagcttcgcctcaaatcaccagaggagagggcaggaaaccagagcatgattgctctaactacagatttacaagctacaaaacacggtttcagcgtgctcaaggggcaggcggagctgcaaatgaagcggatctggggtgagaaggaaaagaagaatctagaggatgggattaacaacctgaagaaacagtgggagacactggaacctctccacctggaggccgagaaccagattaagaaatgcgacatcagaaataagatgaaggaaacaatcctatgggctaagaacctgctcggagagttaaatccatccatccctctcttgcctgacgacatcctttcccagattagaaaatgtaaagttactcacgacggaatcctggccagacagcagagcgtagagagtctagctgaagaggtcaaggataaggtaccaagcctgactacgtatgaaggatccgatttaaacaacacgctggaggatctcaggaatcagtaccagatgctcgtgctcaagagtactcagcgatcacagcagttggagttcaaactggaagaacggtcaaacttctttgccatcatacgcaaattccagcttatggtccaggaaagcgagactcttattattccaagggtggagaccgccgcaaccgaggcagaactcaaacaccaccatgtgaccctggaagcttcccagaaagagttgcaggagattgacagtggcatcagcacacacctgcaggagcttacgaatatctatgaagagttgaatgtcttcgaacgtctatttttggaagaccaactgaaaaatctgaagatacgcaccaacagaatacagcgctttatccagaacacgtgcaatgaagtggagcataaaatcaagttctgccggcaattccatgaaaagaccagcgctttacaagaggaggctgactctattcaacgcaatgagctgctgctgaaccaagaagtcaacaagggcgtgaaagaggagatctataatctcaaggataggctgacggcgataaaatgctgcatcttgcaggtactgaaacttaagaaggttttcgactacattggactgaattgggattttagccagctggaccagctgcagacacaagtgtttgagaaggagaaggaactggaggaaaagattaaacagctggacactttcgaagaggaacacggcaagtatcaggctctgctctccaagatgcgagcaattgaccttcagatcaagaagatgaccgaagtggtacttaaggcgccagacagtagtcccgaaagccgtcgtctcaacgctcaaatcctgtcacagcggatcgaaaaggctaaatgtctctgcgacgagattatcaagaagctgaacgaaaataagacatttgacgacagctttaaagagaaggaaatcctgcaaatcaaattaaacgctgaggaaaacgacaagctgtataaggttctgcagaacatggtattggaactctcacctaaggagctagatgagaagaactgtcaagacaaattggaaacgtctctgcatgttctgaaccagattaagtctcaacttcagcagccactgctcatcaacctcgaaattaaacatattcagaacgaaaaggataattgcgaggcttttcaggaacaggtgtgggcagagatgtgtagtatcaaagccgtcaccgcaatagagaagcaacgagaagagaattcctcggaagcttccgatgtggagaccaaactgagggagtttgaggatctgcagatgcaactaaatacgtcaattgacctcagaactaacgtgctgaacgacgcttatgaaaatctgactcgatataaagaagcagtcacgagagctgtcgaatccataacctccttagaagcgataataatcccttaccgcgtagacgttggaaacccagaggaaagtctggagatgcccctcagaaagcaggaagagctggagtccactgtggcccatattcaggacttgactgagaaactcggcatgatctcctctcccgaagcgaagctccagctacagtacactctgcaggaattggtgagtaagaatagtgctatgaaggaggcctttaaagcacaggagactgaggcggaacgctacctagagaattacaagtgttacagaaagatggaagaggatatttacacaaacctctctaaaatggaaactgtgctcggacagtccatgagttccctccctctgagttatcgcgaagccctggaaaggctcgagcagtcaaaagccctggtgagcaacctgatctctaccaaggaggagctaatgaaattgagacagatcctccggcttctgcggctcagatgtactgagaatgacgggatttgtcttcttaaaattgtttcagccttgtgggagaaatggttaagtttgcttgaggctgcaaaagagtgggaaatgtggtgcgaagaactgaagcaagagtggaagtttgtgagcgaagagatcgaacgggaagcaattattcttgacaatcttcaggaagagctacccgaaatctctaagactaaggaagcagcgacaaccgaggaactcagtgagcttctggattgcctgtgccagtacggtgagaatgttgaaaaacagcagctcctgctgaccttgttgctgcagcgtatcaggagcatacagaatgtccccgagtcatcaggcgctgtggagaccgtccccgccttccaggaaataacctccatgaaagagcgctgtaacaagctgctgcaaaaagtacagaaaaataaagagctggtgcagaccgaaatccaagagagacattcattcactaaagagattatcgctctcaagaatttctttcagcagaccactacctcatttcaaaatatggccttccaggaccatcctgagaagtcagaacagttcgaggagttgcaaagtatattaaaaaaaggcaagctgacatttgagaacattatggagaagctaagaattaaatactctgagatgtacacaattgttccagccgagatcgagagccaagtggaggagtgtcggaaggctctcgaggatattgacgaaaaaatctccaatgaagtgctgaagagctccccctcctatgccatgcgaagaaagatcgaggagattaacaacggcctgcacaacgtggaaaagatgttacagcagaagtccaagaacatcgaaaaggcccaggaaattcagaagaaaatgtgggacgaattggacctgtggcatagcaaactgaacgaattggatagcgaagtgcaggacattgtcgaacaagatccaggacaagcgcaggagtggatggacaacctcatgattcctttccagcagtatcaacaagtgtcgcagagagccgagtgtaggacgtcacagctgaacaaagctaccgtgaaaatggaagagtactccgacctgctcaagtccacggaagcctggatcgagaacacatcccacctacttgctaatcctgcagattacgattctctccgaaccctgagccaccacgcttccaccgtccagatggctttagaagacagtgagcagaaacacaacctgctacacagcatattcatggaccttgaggatctctctattatatttgagactgatgagctgacccagtccattcaggagttgtctaaccaggtcaccgccctgcagcagaagatcatggagagcctgccacagatccagcgaatggctgatgacgtagtggcaattgagtccgaggtaaaaagcatggagaaacgcgtgtcgaaaattaagaccattttgctgtccaaggagatctttgacttcagccctgaagaacacctgaaacacggagaggtgattctcgaaaatattcgccccatgaaaaagacaatcgcagagatcgtgtcgtatcaggtggaactgcgcctgccacagactggtatgaaaccattaccagtgtttcagcgcaccaatcagctgctgcaggacatcaagctacttgaaaacgtgactcaggaacagaacgaattattgaaggtagtcattaagcagactaacgagtgggatgaagaaatcgaaaatctgaaacagatcctaaataactatagcgcccagttctccctcgagcatatgtctcctgatcaggctgacaaattgccccagctccagggagagatcgagagaatggagaagcagatcctgagcttgaatcagcgcaaggaggatcttctcgtcgacctgaaagctacagtattaaatctgcaccagcacctcaaacaggagcaggagggggtggaaagagatagactgccagctgttacctctgaagaggggggagtagctgaaagggacgcgtcggagcggaagctcaataggcggggctctatgagctatctggctgcagttgaggaggaagtagaagagtcaagcgttaaatctgataatggtgatgagaaagcagagccatcaccccaatcttggtcttctctttggaaacacgataaggatatggaagaggaccgcgctagtagttccagtggaacaattgtccaggaagcctacggaaagatctctacgtcggataactcaatggcacagattctgacccctgactcccttaatactgagcaggggcctgagtgctcactgaggccaaatcaaaccgaagaagggaccactcctccaatcgaggccgatactctggactcatctgacgcacaagggggactcgagccgagggtagaaaaaacaagacctgagccgaccgaagtgctacatgcctgcaagactcaggtagcagagcttgagctttggcttcagcaggcgaatgtggccgtagagccagagacccttaacgccgacatgcagcaggtgcttgaacagcagcttgttggttgccaggccatgctcactgagattgaacacaaggtcgcttttctactagaaacatgcaaggatcaggggctgggcgataacggagccacacagcacgaggccgaggccctgtccctgaaattgaagaccgttaagtgtaatctggagaaggtgcagatgatgcttcaggaaaaacactcggaggatcagcaccctaccattctcaagaaaagctctgaaccagaacaccaggaggccctgcaacccgtgaacctctcagaactcgagtccatcgtaactgagcgccctcagttttctcgccagaaagattttcaacagcaacaagtgctggagctgaaaccaatggagcagaaagatttcattaaattcattgaattcaacgccaaaaaaatgtggccacagtattgtcaacacgacaatgacacgacccaggagtcgtcggccagcaatcaggcttcctcccctgagaacgacgttcccgactcaattctgagccctcaagggcagaacggtgataaatggcagtacctccaccatgagctatcttccaagattaagctcccgctaccgcagctcgtagaaccccaggtttctaccaacatgggaattctcccttctgtaaccatgtacaactttaggtatccaacaaccgaggaactaaaaacatatacaacacagctcgaagatctcagacaagaggcttctaatttacagacgcaagaaaacatgacagaagaggcatacattaacctcgataagaagctgttcgaactctttctgaccctgtctcagtgtctctccagtgtcgaggaaatgctggagatgcctcggttgtaccgtgaagatggcagcgggcagcaggtgcattatgaaacactcgctctggagctgaaaaaactgtacctggctttgtctgataaaaagggcgatctcctgaaggcaatgacctggccaggcgaaaacaccaacttgctcctagagtgtttcgataatcttcaggtttgtctcgaacacacacaggcagccgcagtttgtcggagtaaatctctgaaagcgggcctggactacaatcgtagttatcagaacgaaatcaagcgtttgtatcatcagctgattaagtctaagacaagtttgcagcagtctttgaacgaaatctcgggtcagtcagtggctgaacagctccagaaagccgacgcttacactgtggaactggaaaacgcagaatctcgagtggctaaacttagagacgaaggcgagaggctacacttgccctacgcgttactgcaagaggtctataagttggaggacgttctggattctatgtggggaatgctgcgggctcgctacactgagttatctagcccatttgttaccgaatctcagcaagatgcactgctccagggaatggtggagctcgttaagattggcaaagagaagctggcacatggtcacctaaaacagaccaaatcaaaagtcgcactgcaggctcaaatcgagaaccataaagtgttctttcagaagctcgtcgcagacatgctgttgattcaggcctactctgccaagattcttccatccctactgcagaatcgggagactttttgggctgagcaggtcacggaggtgaagatcctagaagaaaagtcgaggcagtgcggcatgaagctgcagtctttactacaaaagtgggaggagttcgatgaaaattacgcatccctggaaaaagacctcgaaattttaatttcgaccctacctagtgtgtctctggttgaagagactgaggagaggcttgtggagagaatatccttttaccagcagatcaaaagaaacataggcggaaaacatgctcgcctttatcaaacgcttaacgaggggaaacaactcgtcgcaagcgtgagctgtcccgaacttgagggccagattgctaaactggaggagcagtggctctctctaaataagaaaatagaccacgagctacacaggctccaggccttgttgaagcacctgctctcctataatcgggactccgaccagctcaccaagtggctggaatcttctcaacacacacttaactactggaaggaacagagcctcaacgtatctcaggatttggataccatcagatccaatattaataatttctttgagttttcgaaggaggtcgatgagaaaagcagcctgaagacagccgtcatctctataggtaatcaattgcttcatcttaaggagaccgataccgcgaccttgcgggcatctctggctcaattcgagcaaaagtggacaatgctgattactcagctccctgacatccaggagaaactgcatcagctgcagatggaaaaactcccctcacgtaaagcaatcaccgagatgatctcatggatgaacaacgtcgagcatcagaccagcgacgaagactccgtacactcaccaagcagtgctagtcaggtgaaacaccttctgcaaaaacacaaggagttcaggatggagatggattacaagcagtggattgtcgactttgtcaaccagtccctacttcaactgtccacctgcgatgtggagagtaagaggtatgagcggaccgagttcgctgaacacctgggcgaaatgaatcgccagtggcacagagttcatggcatgctaaatcgcaagatccagcatctagagcagcttttggagagcattaccgaatctgagaataaaatccaaatcctgaacaattggcttgaggcgcaggaagagcggctcaagaccttgcagaaaccagaatccgtgattagcgtccagaagctactgctggactgccaggacatcgagaaccagctggccatcaagtccaaagctctggacgagctgaaacaatcctaccttactctagagtcgggggctgtaccattgctagaggacaccgcgagcagaatagatgagcttttccagaagaggtcctccgttctgacccaggtgaatcagctcaagacttccatgcagagtgtccttcaagagtggaagatatacgaccaactgtatgatgaagtgaacatgatgactatcaggttctggtattgtatggagcattcaaagccagtggtgctctcattggaaaccctgcggtgtcaggtggagaatttacaatctctgcaggatgaggccgaaagctctgaaggcagctgggagaaactgcaggaagtgatcggcaagcttaaagggttgtgcccctcagtagcagagattattgaagaaaaatgtcagaatactcataagcggtggacacaggtcaatcaagccatcgcagaccaactccagaaagcacagtcgttgctgcagctttggaaggcttactcaaacgcccacggagaggcagccgcgagactgaagcagcaagaggccaagttccagcaactagctaatatctccatgtcaggaaacaatttagccgaaatccttccccctgctcttcaggatattaaggagctgcagcacgacgtccagaagaccaaggaggctttcctgcagaatagctcagtcctcgatcggttacctcagcctgcagagtcaagcacacacatgttactgcctggccccctgcactcccttcagagagctgcatacctggaaaaaatgctgttagtgaaggccaatgaattcgagttcgtcctttcccagtttaaggattttggggtacggcttgagtcactcaagggcctgattatgcacgaagaagagaacttagataggctccaccagcaagagaaggagaacccggacagctttctgaatcatgtgctggccctaaccgctcaatcccctgatatcgagcatctgaatgaggtcagcctaaaactccctctaagcgacgtggccgtaaagactctgcagaacatgaaccgccagtggatacgcgccacagccacagcactggagagatgttctgaacttcagggcatcggccttaacgagaaatttttatactgctgcgagaagtggatccagctactagagaaaatcgaagaagcgctgaaggtggatgtggcgaacagcctccccgagttactggagcagcaaaagacctataaaatgctggaggccgaggtgtccatcaatcagactatagctgactcctacgtaactcagtccctacagctcctggacaccactgaaatagaaaatcgcccagaatttatcaccgagttcagtaaacttacagataggtggcagaacgctgtccagggagttagacagcgaaaaggcgatgtggacggcctggttcgtcagtggcaggactttaccacgagcgtggagaacctattccgctttcttaccgacacatctcacttactctcagctgttaagggccaggaacgtttttccttataccagaccaggagcctgatccacgagcttaagaacaaagaaatccactttcagcgcagaagaaccacctgcgccctcactctggaggcaggagagaaactgttgcttacaacggacctgaagactaaagaatctgtcggacgcaggatctctcagctgcaggactcatggaaggacatggagccgcagctggctgagatgatcaagcagttccagtcaactgtagagacctgggatcagtgtgagaaaaaaatcaaggagctgaagagccgactgcaggtgctcaaagcacaatccgaagaccctctgccagagctgcacgaggatctgcataacgaaaaggagctcatcaaggagctggaacagagcttggctagttggacccagaatctcaaggaactccagaccatgaaggccgacctgacccgccacgtactagtggaagacgtgatggtattgaaggagcagattgagcatttgcatagacaatgggaagatctgtgcctgcgggtagccattaggaaacaggaaattgaggacagactcaatacgtgggtagtgttcaatgaaaagaacaaagagctgtgtgcatggttggtgcagatggaaaacaaagtgctccaaaccgcagacattagcattgaggaaatgatagaaaagttgcagaaagattgtatggaggaaatcaatcttttcagtgagaacaaactgcagttaaagcagatgggtgaccagctgatcaaggcttcaaataagtctagggccgctgagatcgatgataaactgaacaagataaatgacagatggcagcacttattcgatgtaataggttccagggtgaagaagctgaaagagaccttcgcctttatccaacagttagacaaaaatatgtcaaatttgagaacatggttagcccggatagaaagtgagctgagcaaacctgtggtttatgacgtctgtgacgaccaagaaatccagaagcgcctcgctgaacaacaggatctccagcgagacatagagcagcactccgcaggagtggagtctgtttttaatatctgtgacgtcctcttgcacgactcagatgcctgtgcaaatgaaaccgagtgcgactccatccagcagaccacaaggtcacttgaccgtcgatggcggaatatctgtgcaatgagcatggagcgccgcatgaagattgaggaaacttggagactatggcagaagtttctggacgactactctcgatttgaagactggttgaagagtgccgaaagaacagctgcgtgcccaaatagctccgaagttctctacaccagcgctaaggaagagctcaagagattcgaggcttttcagagacagatccatgagcggcttacacagttagaattgataaacaaacagtatcggcgactcgctagggagaatagaaccgataccgcaagccggctgaagcagatggtgcatgagggtaatcagcgttgggataacttgcagcgtagagtgacagcagttttgaggcggttgagacacttcactaaccagcgggaggaattcgagggcaccagagaaagcatccttgtgtggctgacagagatggatctacaattgacaaatgtggagcacttttctgaaagcgatgctgacgacaagatgcgccagctgaacggattccagcaggagatcactctgaatacaaacaaaatcgaccagcttattgttttcggcgagcaattgatccagaagagcgagcccctggacgcagtacttattgaagacgagttggaagaactccatagatattgccaggaggtgtttgggcgcgtgtctaggtttcacagacgcttgacatcctgcacgccaggtcttgaggatgagaaggaagcttcagaaaacgaaaccgacatggaggacccccgagaaatccagacagattcatggaggaagcggggtgaatcagaggagccaagctctcctcagtcactctgtcacctcgttgcccctggacatgagcggagcggctgcgaaacacccgtcagcgttgactccatccctctggagtgggaccacactggggacgtcggcggctcaagttcccacgaggaggacgaggagggtccatactattccgcactgagcgatgtggagattcccgaaaatcccgaagcgtacctgaagatgactactaaaactctaaaggccagctctgggaagtcgatttctgacggccacagctggcatgtgcctgattcaccatcctgccctgagcatcactataagcagatggaaggggatcgaaatgtgccgcctgtcccccccgcctctagtacaccttacaagcctccttacggcaagctgcttttgccgccaggcacagacggcggaaaggaggggcctagagtgctgaacggcaatccacagcaggaagacggagggttggccggcatcaccgagcaacaatccggcgcatttgaccgttgggaaatgattcaggcccaggaactgcacaataagttaaaaattaagcagaatttgcagcagctcaattccgacatctccgccattactacctggctcaagaagaccgaagcagaattggagatgctgaagatggctaagccaccatccgatatccaggagatagagctcagggtgaaacggttacaggaaattctgaaggcattcgacacctataaggctctcgtcgttagcgtgaatgtttcgagcaaagaattcctccagactgaatctccagagtctacagagctacagtccagacttagacagttgtcccttctgtgggaggctgctcaaggagctgttgacagttggcgtgggggtcttagacagtccctgatgcagtgccaggactttcaccagctcagccagaacctgttgctatggctcgcctccgccaagaaccggaggcagaaagcccacgtgaccgatcctaaggctgaccctcgggcactattggaatgtaggcgtgaactgatgcaactggaaaaagagcttgttgagcggcaacctcaggtcgatatgctgcaagaaatcagtaattctctcctgatcaagggacatggcgaggattgcatcgaggctgaggagaaagtgcacgtgatcgagaaaaaactgaagcagctgcgtgagcaggtttctcaggatcttatggctctacagggcacgcaaaatcctgccagccccctgcctagctttgacgaagtggacagtggcgaccagcccccagctacatctgttccagcccctagggccaaatttcgagcggtgcgcacaaccgagggcgaagaagaaactgaaagccgtgtgcctgggagtacaagaccacagcgaagctttttgtcaagagtggtccgagccgctctgccactgcagctcctcctgctcctcctgctattactagcatgcctattaccctcttctgaagaggattattcttgcacacaggccaacaattttgccagatccttctaccccatgttaagatataccaacggcccaccacctacatag

SEQ ID NO: 206679 - DNA, 9813 bp, synthetic construct
  misc_feature 1..9813: note = Description of Artificial Sequence: Synthetic coding sequence
  source 1..9813: mol_type = other DNA
atggagaagctgcggatcaagtacagcgagatgtacaccatcgtgcccgccgagatcgagtcgcaggtggaagagtgtcggaaggccctggaggatattgacgaaaagatatccaacgaggtgctgaaaagttctccttcttacgccatgcggcggaaaattgaagagatcaacaacggactgcataatgtggaaaaaatgctgcagcagaagagcaagaatattgagaaggctcaggagatccagaagaagatgtgggacgagctggacctgtggcattccaaactgaatgaactggatagcgaggttcaagacatagtggaacaggaccctgggcaagcgcaggaatggatggacaatttaatgatcccttttcagcaataccagcaggtttctcaacgggccgagtgtagaacctcccagctcaataaggccactgtcaaaatggaagagtactctgatctccttaaatctactgaagcttggattgagaataccagtcatctgctggcaaatccagccgattacgactcactgagaacactatctcaccacgcgtcgacggtgcaggattccaagtgtttcaggagtggcccccggcccaacatctatgtgtcatattatgtcaccgtcattcagatggcacttgaagactccgaacagaagcacaatctcttgcattctatcttcatggacctcgaagatttgtccataatcttcgagacagatgagctgacccagtccattcaggagctgtccaatcaggtcacagccctgcagcagaaaattatggagtcccttcctcagatccagaggatggcagacgacgtggtcgcgatcgaaagcgaagtcaagagtatggagaagcgcgtgtctaaaataaagaccatcttgttatccaaagagatcttcgatttctcacccgaagaacatcttaagcacggcgaggtcatcttggagaatattaggcctatgaagaagactatagctgagattgtgtcttatcaagtagagttgaggctcccacaaaccgggatgaaacctttaccggtattccagcggaccaaccagctcttacaagatattaagttactagagaacgtcactcaggagcaaaacgagctgcttaaggtagtgatcaagcagaccaacgaatgggacgaggaaatagaaaacctcaagcagattctgaataactacagcgcccagttttccctggagcatatgtctccagaccaagccgataaactgccccagctccagggggagattgagcgaatggaaaagcagatcctttccttaaaccaacggaaggaagacctcctggtggacctcaaagctaccgtactgaacctgcaccagcacctgaaacaggaacaggaaggcgtggaacgcgacaggttgccagctgtgacctctgaagaaggtggggtcgcggaaagggacgcctcagagaggaaactgaatagacgcgggagtatgagctatctggcagcagttgaggaagaagtggaggaaagcagcgtgaagtcagataatggagacgaaaaggccgagccctccccacagagctggagttccttatggaagcacgataaggacatggaggaagaccgagcgtcctctagctctggcacgatagtccaggaggcctatggcaaaatttctacaagtgataactcaatggcccaaattctcactcctgatagcctgaacacggagcagggaccggaatgtagcctgcgccctaatcagaccgaggagggaactactccccccattgaggctgatacccttgactcctctgatgcccagggtggacttgaacctcgggtcgagaaaacaagacccgagcccactgaagtgcttcatgcatgtaagactcaagtcgccgagttggaactttggctccagcaggccaatgtcgctgtcgagcctgaaacactgaacgcagacatgcaacaagttctagaacaacagttggtcgggtgtcaggccatgctaacagaaatcgagcataaagtggccttcctactggagacttgtaaggatcagggattaggagacaacggcgcgacccaacacgaggcagaagcactctcacttaaactcaagactgtaaagtgtaatctggagaaagttcagatgatgttacaggaaaaacatagcgaggaccaacaccctacaatcctgaaaaaatccagtgaacccgagcaccaggaggcactgcagcctgtgaatctcagtgaactggagtccatcgtgactgagaggccccagttcagtagacagaaagattttcagcagcagcaggtgctggaactgaagccaatggagcagaaggatttcattaagtttatcgagttcaacgcgaagaagatgtggcctcagtattgccaacacgataatgacacaactcaagagtctagcgcttccaaccaagcgtcttccccggaaaacgacgttccagactccatactatcacctcagggccagaacggtgacaaatggcagtacttgcaccacgaactgagttctaaaattaagctgccccttccacaattggtcgaaccccaagttagtaccaatatgggaatccttccctcagtgactatgtataacttccggtatcccactacggaggagctcaaaacttatacaactcagctcgaggatctgcgccaggaagcatcgaaccttcagacgcaggagaatatgactgaggaagcttatatcaatcttgataaaaaactgttcgagttattcttaactctgtcccagtgcttgtcctccgtcgaggaaatgctagaaatgccaagactttacagggaagacggtagcggccagcaggtgcactacgaaacactggccctcgaattaaaaaagctgtacctggcccttagcgacaagaaaggagacctgctcaaagcgatgacatggcctggagagaatacaaatctgctgctggaatgtttcgataatctgcaagtttgcctcgagcacacccaggcagccgccgtatgtcgttcgaaatccctgaaagcaggcttagattacaatagaagctaccagaatgaaataaagcgcctgtatcatcaactgataaagtctaaaacttcgctgcaacaaagtctgaatgaaatctcaggtcaatctgtcgctgagcaactccaaaaggcagatgcctacaccgtagaacttgagaacgcagaaagcagggtggctaaactgcgggacgagggggaacggcttcacctgccatacgcgttattgcaagaagtctacaaactcgaggatgtcctcgactcgatgtggggcatgttgagagcccgctatactgaactgtccagccctttcgtgaccgagagccagcaagatgctttacttcaggggatggtcgagttggtcaaaattggaaaagaaaaactcgcacatggacacctgaagcaaacaaagtcaaaggtggccctgcaggcgcagatcgaaaatcataaagtgttcttccagaaactggtggccgatatgctcctgatccaggcatacagcgccaaaattttgccgtccctgttgcagaacagggaaacgttttgggccgaacaggttactgaagtcaaaatccttgaggaaaagagccggcaatgcggaatgaagttgcagtcactgctgcagaaatgggaggagttcgatgaaaactacgcctctctggaaaaagacctggaaattttaattagtactttaccaagcgtcagcctggtggaggagactgaggagcggttggtcgagaggatcagcttctatcaacagattaagcggaacattggtggaaagcatgctcggctataccagacactgaacgagggtaaacagctggtcgcatcagtcagctgtcctgaactcgaaggtcagatcgccaaactggaggagcagtggctctcactgaataagaaaatcgaccacgagcttcataggctgcaggcattactgaaacatctcctcagttacaatcgggatagtgatcagctgacaaagtggctcgaaagcagccaacacactctgaattactggaaagagcagtcactgaacgtgtcccaggatctggacacaatacggagcaatatcaataacttctttgagttctctaaggaggttgacgaaaagtcttcattgaaaacagcggtaatttctatcggaaaccagctgctgcacctgaaggagaccgacacagcaacgctacgagcctctctcgcccagttcgagcagaagtggactatgctcataacccaactgccagatatacaagagaaattgcaccaactgcagatggaaaagctcccctccaggaaggccatcaccgagatgatatcatggatgaacaacgtggagcatcagacgagtgacgaagactcggtgcacagcccgagttctgcaagccaggttaaacacctactccagaaacacaaggaatttcgtatggagatggattataaacagtggatcgtggattttgttaatcagagcttgcttcagctcagtacgtgcgacgtcgagagcaagcggtacgaaaggaccgagtttgcagaacacctgggggagatgaacaggcagtggcacagggtccacgggatgctgaataggaagattcaacatttggaacagctgcttgagtcaatcacagagtctgaaaataagattcaaatccttaacaactggttggaagcacaggaagagcgcctgaagacactgcaaaaacccgaaagcgtgatcagtgtccaaaagctgttgctcgactgccaggatatcgaaaaccagctggccatcaagtccaaggcgctcgatgaactaaaacagtcctacctcactctagagagcggcgccgtgccccttctggaggataccgcctctcgaatagacgaactgttccagaagcgaagttcagtcttgacccaggtcaatcagctcaagacttccatgcagtcagttctgcaggaatggaagatctacgatcagttatacgatgaggtgaatatgatgactatccgcttttggtattgcatggaacacagtaaacccgtggtgctaagcctagagaccctccgatgccaggtggaaaacttacagagcctccaggatgaggccgagtcctcagagggcagctgggagaagctccaagaggtcattgggaagttgaagggtttatgtccttccgtcgcggagattatagaggaaaagtgtcaaaatacccacaaacggtggacacaggtgaaccaggctatagctgatcagctacagaaagctcaaagcctcctccaactgtggaaggcctatagtaatgcccacggagaggccgcggcccgcctaaagcagcaagaggctaaattccaacaacttgccaacatctctatgtccggcaacaacctggccgagattttaccacccgccctccaggacattaaggagctgcaacacgacgtgcagaagactaaagaggctttcttgcagaatagtagcgtgctggatcggctgccacagcctgcggaaagttctacacatatgctactcccggggccccttcatagcctccagagagcggcatatcttgaaaaaatgctgctggtgaaagccaacgaatttgaatttgtgctaagtcagttcaaggattttggagtcagacttgagtctctaaagggtttaatcatgcatgaagaggaaaatctcgatcggttgcaccagcaagagaaagaaaacccagatagttttctgaaccacgtcttggccttaacggcacaatctcccgatattgaacatctgaatgaggtctcgctgaaactgccgctgtctgatgttgcggttaaaacactccagaatatgaacagacagtggatcagagcaaccgctaccgcactggagcgctgctcagagttacagggcatcgggttaaacgagaagtttctgtattgctgtgagaagtggatccaactgctcgaaaagattgaggaggctttgaaggtggacgtggccaactcactgcctgaacttttggaacagcagaagacttacaaaatgctggaagccgaggtgtcaattaatcaaaccatcgctgactcgtacgtgacccagtcgctgcagttactcgatacaaccgagatagagaaccgacctgagtttattacggaattcagcaagctcacagaccgctggcagaatgccgtgcaaggggtaagacagcgaaagggagatgttgatgggctggtgagacagtggcaggactttactacgagtgtggagaatctcttccggttcctcaccgatacttctcatttgctctctgcagttaagggccaggaaaggttctctctgtatcagacacgcagtctcatccacgaactgaagaacaaggagattcacttccagcggaggagaaccacatgcgccctgactctagaagcgggagagaagttgctgctcactaccgacttgaagactaaagagtcagtaggaagaaggataagtcagctgcaagactcttggaaagatatggagccgcagctcgccgaaatgataaaacagttccagagtacggtagagacttgggaccagtgcgaaaagaagatcaaggagctcaagagccggctgcaggtccttaaggcgcagagcgaggaccccctccccgagctgcacgaggatcttcacaatgaaaaagaactgattaaggaactcgaacagtcgctcgccagttggacccagaacctcaaggaacttcaaaccatgaaggcagacctaacgagacacgtactcgttgaggacgtgatggttctcaaggagcagatcgagcatttgcaccggcagtgggaagacctctgcctgagggtggccatccgaaaacaggagattgaagatcgactgaatacttgggtcgtgtttaacgagaaaaataaagaactgtgcgcctggctggtgcagatggaaaataaggttctgcaaaccgcagacatcagtattgaagaaatgatcgagaagttgcagaaagactgcatggaggaaatcaacctcttttcagagaataagctgcaactgaaacaaatgggcgaccaactgatcaaagcatccaacaagagcagggcggctgagatcgacgataaacttaacaagatcaatgaccggtggcaacacctctttgacgtcatagggtcgagagttaaaaaactgaaggaaacctttgcttttattcagcagcttgataaaaatatgtcaaaccttcgtacatggcttgccagaattgaatccgaactgtcaaaaccggtggtatacgatgtgtgcgatgatcaggagatccagaagcgcctagctgagcagcaagatcttcaacgcgacattgaacagcactctgcgggcgttgagagcgtgtttaatatctgcgacgtgctgctccacgactctgacgcttgcgcaaacgagacggagtgtgattcgatccagcagacaacacgtagccttgatcgacggtggagaaatatatgtgcgatgtccatggaaagacggatgaaaatagaggagacctggaggctgtggcagaagtttctggacgattattccaggttcgaagactggctgaaaagcgcagagagaacagcagcttgccctaattctagcgaagtgctgtacacaagcgccaaggaggaacttaagcggttcgaagcgttccagcggcagatccacgagaggcttacccagctcgagctgataaacaagcagtaccggaggctagctagagaaaataggactgacacagcatcccggctgaagcagatggttcacgaggggaatcagcggtgggacaatctccaaagacgagtaactgccgtgctgagaagattgcggcattttacaaaccaacgcgaggagttcgagggtacgcgcgaatcgattctggtttggctcaccgagatggaccttcaactgactaacgtggaacactttagcgaatctgatgcagatgataaaatgagacagctgaacggattccagcaggaaatcacactgaacactaacaaaattgatcaactgatcgtgttcggggagcagctgatacagaagtccgagcctttggatgctgtgctcattgaggatgaattagaggaactccatcgctactgccaggaagtatttggtagggtgtcccggttccatcggaggcttaccagctgtacaccaggtctagaggacgaaaaggaggcaagtgagaacgaaaccgacatggaagacccacgggagattcagacagacagctggagaaaacgaggggaatcagaggaaccaagttccccccaatccctgtgccacttagttgcgcctggccacgagagatccggttgtgaaacgcctgtcagtgtggactccatccctctggaatgggaccatactggcgatgtcgggggatcctcttctcatgaggaagatgaagagggcccatactacagcgccctgtcaggaaagtcaatttctgacggtcattcatggcacgtgccggattctccatcttgtcctgagcatcattacaagcaaatggagggggatcgtaacgtcccgcccgtgcctcctgcgtcatccacaccatataagcccccttatggcaagctccttttaccccccggaaccgacggagggaaagaaggacctagagtccttaatgggaacccccagcaggaggacggcggccttgcaggcatcactgaacaacagtctggggcattcgaccgttgggaaatgattcaggctcaagagctgcacaataaactgaagattaaacagaatctccagcagttaaactcagacatttctgccattacaacttggctaaagaaaaccgaagcggagttggaaatgttaaagatggccaaacccccaagtgacattcaagaaatcgaattgagggtgaaacggcttcaggagattttgaaagcttttgatacgtataaggccttggttgtgtcagtaaacgtcagctctaaagagttcctacagacagagtctcctgaatccacagagctccagtcccgcctaaggcagctgtccctcttatgggaagcagctcagggggctgtggactcctggcgaggaggcctcaggcagagtctgatgcagtgtcaggattttcaccagctgtcacaaaatctgctcctttggctggccagcgctaagaaccggcgtcagaaggcgcacgtgaccgaccccaaggccgacccccgagcactcttggagtgtagacgagagctgatgcaactggagaaggaacttgtggaacgtcagccccaggtggacatgctccaggaaatatctaacagcctgctgattaaaggacacggagaggactgcatcgaggcagaggagaaagttcatgtcatcgaaaagaagctcaagcagttgcgcgaacaggtgagtcaggatctaatggccctgcaaggtacacagaacccagcatccccactaccctcctttgatgaagtggactccggggaccagccaccagctacatccgtgcccgcgccacgggcgaaacagtttcgcgccgtacgcactacagaaggtgaggaagagaccgagtcacgcgtgccagggtctacgcgaccccagcggagcttcttgagccgcgtcgtaagagccgcactgccattgcagctcttattgttgttgctgctactgctggcctgcctgctcccgtcaagcgaggaggactactcatgtactcaggccaataactttgcccgttcattctatccaatgcttcggtacacaaacgggcccccgcctacctag

SEQ ID NO: 206680 - DNA, 1290 bp, synthetic construct
  misc_feature 1..1290: note = Description of Artificial Sequence: Synthetic coding sequence
  source 1..1290: mol_type = other DNA
atggagggcgaccggaacgtgccccccgtgccccccgccagcagcacgccctataaaccaccctacggaaaactccttctcccccctggaaccgatggcgggaaggagggcccccgcgtcctcaatggcaatccccagcaggaagacggagggctggcagggattactgaacagcagagcggcgcctttgatcgttgggaaatgattcaggcacaggagttgcataataagctgaaaatcaaacagaatctgcagcagttgaatagcgatatcagtgccattactacctggctcaaaaagaccgaggccgagctggagatgctgaagatggccaaacctcctagcgacatccaggaaattgagcttcgtgtcaagcgacttcaagaaatactcaaagcattcgacacttataaagccctggtagtctccgttaatgtctcttcaaaagagtttctgcagacggagtctccagaatcaacagagctccagtcacggctcaggcagttgagcttgctgtgggaagccgcccagggggccgtggacagttggagaggggggctccgccagtcattaatgcaatgtcagggctcgaagacacgacctcgttcagatgtgctgtttttcaaagacttccatcagctttcacagaaccttctgctctggctagccagtgccaagaataggcgccaaaaggctcatgtaacagatccaaaggctgacccacgggctctcctggaatgtagacgcgagctaatgcagctggagaaggaactagttgagcgtcaacctcaggttgatatgctccaggagatctccaatagcctgctcattaaagggcatggagaggactgcattgaagccgaagaaaaagtgcatgtgatcgaaaagaaactcaagcagctcagagagcaggtgtcccaagatctgatggctcttcagggaacccagaaccctgcaagtcccttgcccagcttcgatgaggtggactccggagaccagcctccagccacatctgtgcctgccccaagggcaaaatttagggccgtacgcaccacggagggcgaggaggaaaccgagagtcgagttcccgggtcaacaagacctcagaggtcattcctttcgcgagttgtgcgggccgccctgcccttgcagctgctccttctgctgcttctgctccttgcctgccttctgccatcttctgaggaagactactcatgtactcaggctaataattttgcacggagtttctatccaatgttgcgctataccaatggccctccacctacatag

SEQ ID NO: 206681 - DNA, 1671 bp, synthetic construct
  misc_feature 1..1671: note = Description of Artificial Sequence: Synthetic coding sequence
  source 1..1671: mol_type = other DNA
atggaggacccccgggagatccagaccgacagctggcggaagcggggcgaatcagaagaaccaagttcaccgcagtcactctgccatctggtcgcaccaggacacgagcggagtggttgcgaaactcccgtcagcgtggattcaatccccctggaatgggatcacaccggggatgtgggagggtcaagtagccacgaggaggacgaggaggggccctattactccgccctttccgatgttgaaattccggaaaaccctgaggcctaccttaaaatgactaccaagacgttgaaagctagctccggtaagtcaatttccgacgggcatagctggcacgtgcctgattcacctagctgtcctgagcatcactacaagcagatggagggtgacagaaacgtcccccccgttccaccagcttcttccacgccctacaaacccccgtacggcaaactgctcctcccacccggaacggacggcggaaaggagggtcccagggttctaaatggtaatccccagcaggaagacggaggactggctggaatcactgaacagcagtctggtgcgttcgacaggtgggagatgatccaggctcaggagctgcataacaaacttaagatcaagcagaacctccagcagttgaattctgacatctcggccatcactacatggctcaagaaaacagaggctgaattagagatgctcaagatggccaaaccaccgtctgacattcaggagatagagctgcgagtcaagcggctccaggagattttgaaagcctttgatacctacaaggctcttgtggtgagcgttaacgtttcttctaaggagttcctgcaaacagagagccctgagagcaccgaacttcagagccgattgcgtcagcttagtcttctctgggaggccgcacaaggtgccgttgacagttggagaggaggactgcgacagagcctcatgcagtgccagggctccaagacacgccctcgcagtgatgtgctgtttttcaaggatttccaccagctctcccagaacctgttgttgtggctggcgtccgccaagaatagacgacagaaggcgcacgtgacagacccaaaggcagatcctagagcactgcttgagtgtcggcgtgagttgatgcagctggagaaggagctcgttgagaggcaaccacaagtagatatgctgcaggaaattagcaacagtctccttataaaaggccacggggaagactgcatcgaagccgaagaaaaagtccacgtcattgagaagaaactcaagcagctgcgagaacaggtgagccaggacctaatggcattacaaggcacccagaaccctgcaagtccccttccaagctttgacgaagtcgactccggagaccaaccacctgctaccagtgtgcccgctcctcgcgccaagcagttcagggctgtgcgtactaccgaaggggaggaagagacagagtccagggtgcctggctcgacaagaccgcaaagaagtttcctctccagagtggttcgcgccgccttgccactgcagctgttacttctccttctcctgctgctggcctgcttgctgccctcctcagaagaggattacagctgtactcaggcgaacaactttgcccgctcattttacccaatgctcaggtatacaaacgggcctcctcctacctag

SEQ ID NO: 206682 - DNA, 2007 bp, synthetic construct
  misc_feature 1..2007: note = Description of Artificial Sequence: Synthetic coding sequence
  source 1..2007: mol_type = other DNA
atggtgcacgagggcaaccagcggtgggacaacctgcagcggcgggtcaccgcggttttacggcgactgaggcattttacaaatcaacgagaggaattcgagggaacacgtgagtctatccttgtgtggctgaccgaaatggacctccagctgacaaatgtggagcacttcagtgaatcagatgctgacgataaaatgagacagttgaacggtttccagcaagaaattaccttaaacacgaacaagatcgatcagctgatagtatttggggaacagcttattcagaaatcagagcctctggatgcagtcctgatcgaggacgagttggaggagttgcatagatattgtcaggaggtcttcggccgtgtctcgcgattccaccggagattaacatcctgcacacccggcctggaggacgagaaggaggcttccgagaacgagacggatatggaggacccccgtgagatccagactgactcgtggcggaaacgcggggagtctgaagaacctagttctccccagagtttgtgccaccttgtggcacccgggcacgaacggagcggctgcgaaactcctgttagtgtcgattctatccctctggagtgggaccacaccggcgatgtcggagggtcaagctcacatgaagaggacgaggaaggcccctattactctgccttgagtgggaaatctatcagcgacgggcactcctggcatgtccccgatagtccttcctgtccggagcaccactacaagcagatggagggcgatagaaatgtgccacccgtgcctcccgcgagctcaaccccttataagcccccatatgggaagttgcttctacctcccggcactgatggcggaaaggagggcccccgtgtgctcaatggaaatccacaacaggaagatggagggcttgcaggcatcacagagcaacagtctggggcctttgatcgttgggagatgatccaagcgcaggaactgcacaacaagctgaaaatcaaacaaaatctgcaacagctcaattcagatattagcgccatcactacctggctcaaaaagacggaggcagagctcgagatgctaaagatggcgaagcctcctagtgacatccaggaaatagaactgagagtcaaaagacttcaggaaatattgaaggccttcgacacatacaaagccctggtggtatctgtgaatgtgagctctaaggagtttctgcaaaccgagagtcctgaaagtactgagctccagtctcgcctgcggcagttgagtttactctgggaggccgcccagggggctgtggacagctggcggggcggattaagacagagtttaatgcagtgtcaggattttcaccagctgtctcaaaatctgctcttgtggctcgccagcgccaaaaatcgccggcagaaggcccacgtgacggatccaaaagcagatccacgggccctgctcgagtgcagaagagaactgatgcaactggagaaagagctggtggaacgtcagccacaggtcgacatgcttcaggagatctccaactccctgctcatcaagggacatggagaagattgcatcgaagctgaagaaaaagtccacgtcatcgagaaaaagctcaagcagttgcgggagcaggttagccaggatttgatggctttgcagggaacccaaaacccggcttcacctttgccctcattcgatgaggtcgatagcggagatcagccgcccgccaccagcgtacctgccccgagagcgaaacagttccgggcggtgcggactacagagggtgaggaggagacagaaagcagagtgccaggcagcacacgcccccagcggtcctttctctcacgggtggttcgcgctgccctgcctctgcagctgcttctgctgctcctgctccttctggcgtgcctcctgccaagctctgaggaggattattcatgcacacaggctaacaatttcgcccggagcttctaccctatgcttagatacaccaacggcccgcccccgacttag

SEQ ID NO: 206683 - DNA, 10626 bp, synthetic construct
  misc_feature 1..10626: note = Description of Artificial Sequence: Synthetic coding sequence
  source 1..10626: mol_type = other DNA
atggaggaggacatctacaccaacctgagcaagatggagaccgtgctcgggcagtcaatgagctcactccctctgagttatcgagaagctttagagcgattggaacagtccaaagcactggtgagcaaccttattagcaccaaagaagaactgatgaagctgagacaaatactccgactgctgcggctccgatgcaccgagaacgacgggatttgcctgctgaagattgtgtccgcactgtgggaaaagtggctctccctgctggaggccgctaaagagtgggagatgtggtgtgaggagctgaagcaggaatggaagtttgttagcgaggagatcgagagagaagctataatccttgacaatctacaggaggagctgcccgaaattagtaaaacaaaggaagcggcgacaacggaggagctgtctgaactgttggattgcctttgtcaatatggggaaaatgtggaaaagcagcaactgctcctgaccctgctgcttcagcggatccgcagcatccaaaatgttcccgaatcctcaggggccgtcgagactgtccccgcattccaggagatcacctcaatgaaggagcggtgcaataaattgctgcagaaagtacagaaaaacaaagaactggtgcaaactgagatccaggaaagacactcttttaccaaagaaatcatcgctctgaaaaacttctttcagcagacaaccacctccttccaaaacatggctttccaggatcacccagagaaaagcgagcagttcgaggaactgcagtcaatccttaaaaagggtaaactgacgttcgaaaacattatggaaaaactacgcatcaagtactccgagatgtatactattgtacctgcggaaatcgagagccaagtcgaagaatgcaggaaggccctagaggacattgacgaaaaaattagcaacgaggtgcttaaatcaagtccctcttatgccatgcggcgtaagattgaagagattaataatggactgcataatgtggaaaagatgctccaacaaaagagcaaaaacattgagaaagcacaggaaatccagaaaaagatgtgggatgaactggatctgtggcatagcaaactgaacgaattggattctgaggtccaggacattgtggaacaggaccccggccaagctcaggagtggatggataatctgatgattccctttcaacagtatcagcaggtctcccagcgtgctgaatgccgaacttcacagctcaataaagctactgtcaaaatggaagaatatagcgacttgctgaaaagcaccgaagcatggatcgagaatacatcccaccttctcgcaaatcccgcagattatgatagcttgaggacgctgtctcatcacgcaagcaccgtgcagatggctctcgaggactcagagcagaaacacaatctcctgcactcgatctttatggacctggaggacttatctattatcttcgagaccgatgagctcacccagagcatccaggagttgagcaaccaagtgaccgctctgcagcagaaaatcatggagagcctcccccagattcagcgtatggccgacgacgtcgtggctattgagtctgaggtgaagtctatggaaaagcgcgtttcaaaaataaaaaccattcttctgagcaaagagattttcgacttcagccctgaagaacacttaaagcatggggaagtgatcctggagaacattaggccaatgaaaaagactattgccgagatcgtctcttatcaggtggagctgaggctgccgcagaccggcatgaagccacttccagtctttcagaggacaaatcagctcctgcaggatattaagctgctcgagaacgtaacacaggagcaaaacgagttgctgaaagtggtcatcaaacaaactaacgagtgggacgaagaaattgaaaacctaaaacaaatactcaacaattactcggcccagtttagtctggagcatatgagtccagaccaggccgacaaactaccacagttacagggcgagatagagcgcatggagaagcaaatcttgagtctcaaccagcggaaggaggacctgctggtggacctaaaagcaacagtcctgaacctgcaccagcatctcaaacaagagcaggaaggtgtagaaagggatcgcctgccagccgtaacttcggaggaaggcggggtcgcagagcgggatgcctcagaaagaaaattgaacagacgtggctctatgtcctatcttgctgccgtcgaggaggaagtagaagagtctagtgtgaaatccgacaacggcgacgaaaaagctgaaccttccccacagagttggtcaagtctgtggaagcacgacaaggatatggaggaggaccgggcctcatcgagcagcggaactatagttcaggaggcttacggcaaaatttccactagtgataattctatggcacagatcctgactcctgactcactcaacaccgaacaaggacctgaatgttccttgcgaccaaaccagacagaggaggggactacccctccaatcgaggctgacaccttagattcctccgatgcccaggggggacttgagccacgggttgaaaagaccagaccggaacctaccgaagtcttgcacgcgtgcaagacccaagtggcagagctggaactttggctgcaacaggctaatgtggccgtggagcccgagacactgaatgccgacatgcagcaagtgctggaacaacaactggttggctgccaggctatgctgaccgagatcgaacataaggtggccttccttcttgaaacttgcaaagaccagggactgggtgataatggcgccacccaacacgaggcagaggcactttcactcaagctcaaaacagtgaaatgtaacctggagaaggtccaaatgatgctgcaggagaagcattcagaagaccagcacccaacaatccttaaaaagtcttctgagccagagcatcaagaggcgctccagccggtgaatttaagtgaactcgagtccattgtaactgaacgtccacagttcagccgccagaaagacttccaacagcaacaggtgcttgagctcaagcccatggaacaaaaagactttattaaatttatcgagttcaacgctaagaagatgtggccacagtactgccagcacgacaatgacaccacccaggagtctagtgcctctaatcaagcaagttcgcccgagaacgatgttcccgattccattttatccccccagggccaaaacggggataagtggcagtatttacatcatgaactgtctagtaagataaaattacccctgcctcagttggttgagccccaggtcagcaccaatatgggcatactgccatctgtgacgatgtacaacttccgatatccaaccacagaggaactgaaaacctatacaacgcaactcgaagacctgcgccaggaggctagcaacctgcagactcaagaaaacatgacagaggaggcctacatcaacctagacaagaaactgtttgaactgttcttaaccctctcacagtgcttatcatccgttgaagaaatgcttgagatgccgcgcctttaccgggaggacggatcaggccagcaggtacattacgagacgctggctttagaactgaaaaaactctacctggctctgagcgataagaagggcgacctcttgaaggcgatgacgtggccaggagagaacacgaaccttctgctggaatgtttcgataaccttcaggtttgcctcgaacatactcaggctgctgctgtgtgtagatccaaaagtttgaaggctggcctcgactataatcgcagctaccaaaatgagatcaaacggttgtatcaccagcttattaagagtaagacctcactccaacagtccctaaatgaaattagtggacagtccgtagcagaacaattgcaaaaggcagacgcctatacagttgaacttgagaacgcagaatccagagtagctaagctgcgcgacgaaggcgaaaggctgcacttaccctatgcactgctgcaggaggtgtataagctggaggatgtcctagactccatgtggggcatgctccgcgctagatatactgaactgagttccccattcgttactgagtctcaacaggacgcactcctacaagggatggtggaactggtcaagatcgggaaagaaaagttagcccacggccacctaaagcagacaaagagtaaagtggccctccaggcccagatcgagaatcataaggtgttctttcaaaagctcgtggccgacatgctgcttattcaggcctatagtgcaaagatcctgccctctttgctgcagaatcgggagaccttctgggctgagcaggtgaccgaggttaagattctggaggaaaagtctcgtcagtgtggtatgaagctgcagtcattattgcagaagtgggaggagttcgacgagaattatgcctcccttgagaaggacctcgagattctgatttccaccctgccctctgtctctttggtggaggaaaccgaggaacggctcgtggaaaggatatcgttctaccagcagatcaagaggaacataggtggtaaacatgcaaggctgtaccaaaccttaaacgaaggaaaacagctcgtggcaagcgtcagttgtcccgaactcgagggacagatcgccaagctggaagagcaatggttgtctctgaacaaaaaaattgatcacgaactccacagacttcaggccctactgaagcacttactgtcatataatagagatagtgatcaactcacaaaatggttggagagcagccagcataccctcaattactggaaggaacagtctctgaatgtgtcccaagatttggacacaattcgctctaacataaacaacttcttcgagttctccaaggaagtagacgagaaaagcagccttaaaactgcagtgatctctatagggaaccagctgctgcacctcaaagaaaccgatactgccaccctccgagccagtctggctcagtttgagcaaaagtggacaatgctgattacacagctacccgacattcaagaaaagcttcatcagctgcagatggagaagttgccatcccgcaaggcgatcaccgaaatgatttcctggatgaataatgttgaacatcagacatcggacgaagactcagtccactctccatcttcagcctcccaggtgaagcacctgctgcagaagcacaaagaattcagaatggaaatggattataagcagtggatcgtggactttgttaatcagagtctgcttcagctgagcacttgcgacgtggaaagtaaaaggtatgagagaacagaatttgcggaacatctcggcgaaatgaacagacagtggcacagagtccacggcatgctgaatcggaagatacaacacctggaacagttgctggagtccatcacagagagcgaaaacaaaattcagattctgaataattggctggaggcacaggaagaacgcctgaaaacattgcagaaacccgagtctgtgataagcgtgcagaaattactcctcgattgtcaagacatagagaatcagctggctattaagtcaaaggccctggacgagctgaagcagagctatcttactttagagtccggagccgtccctctgctcgaagataccgcgtctcggatcgatgagctgtttcaaaagagatcaagcgttctgacacaggtaaatcagctcaaaacttctatgcagagcgtgctccaggagtggaagatctacgatcaactctatgacgaggtgaacatgatgactatcaggttctggtattgtatggaacactcaaagccggtggtccttagccttgagaccctgcggtgccaagtggagaatctgcagagtcttcaggatgaggcagaatccagcgaaggcagttgggaaaaactccaggaggtgatcggaaagctgaaaggactgtgccccagtgttgcggaaattattgaggaaaaatgccagaacacccacaagcggtggacacaggtgaaccaggcgatcgccgatcaattgcaaaaggctcagtctctcttgcaactatggaaagcctactctaatgcccacggcgaagccgccgcccggctcaagcagcaagaagccaagtttcagcagttagcaaatatttctatgtccggaaataatctggccgaaatattgccaccggccttgcaggacataaaggagctccagcatgatgtgcagaagaccaaagaggccttcctccaaaattcgtcagtattagaccgcctcccacaacctgccgaatcctcaacgcacatgctgttaccaggacccctgcatagtctgcagcgtgcggcctatctggagaagatgctcttggtaaaagcaaatgaatttgaatttgtactaagccaattcaaggacttcggagtacgactggaaagtttgaaaggcttaatcatgcatgaggaggaaaatttggacaggctgcatcagcaggaaaaggagaaccccgactcattcctgaatcatgtacttgccctgaccgctcagtctcctgatatcgagcaccttaacgaagtcagcctgaagctacccctcagtgacgtcgccgttaagactctacagaatatgaacaggcagtggatacgggccactgctactgcactcgagcggtgttccgagctccagggcattggcttgaatgaaaaatttctgtattgctgtgaaaagtggatccagctgctggagaagattgaggaagctctgaaagttgacgtcgctaactcactgccagaactactggaacagcaaaaaacatataagatgctggaggccgaagtctccatcaatcagacgattgccgactcgtacgtaacacagtccctccagttgctggatacaactgaaattgagaatcgcccagagttcataactgaattcagtaaactcaccgatcgctggcagaacgcggtgcaaggtgttcggcaacggaagggcgatgttgacggtctggtgcgccagtggcaggactttaccacctcggtggagaacctcttcagattcctcacagacacgtcgcatttgctgtccgcggtaaaaggccaggagaggttctcattgtaccagacgcggagcctcattcatgaacttaagaataaggagattcacttccagagacggagaacgacttgcgccctgaccctagaagcaggagaaaagctgctcctgaccactgatcttaaaacaaaagagtccgtaggccggcggatttcacaactgcaagactcatggaaagatatggagcctcaactggcggaaatgatcaaacaatttcaatctaccgtggaaacctgggaccaatgtgaaaagaaaattaaggaactgaagagtcgtctgcaggtgctgaaggcgcagtcagaggatcctctacctgagcttcacgaggacctacataacgaaaaggagctgattaaagagctggagcaatcattagcctcttggactcagaacctaaaggagctgcaaacaatgaaggcagacctgactagacatgtgctggttgaggatgtgatggtgcttaaagaacagattgagcacctgcatagacagtgggaggacctgtgtcttagggttgcgatccggaaacaggaaatagaagacagattgaacacatgggtggtattcaatgaaaagaacaaagaattgtgcgcgtggctggtgcagatggagaacaaggtgctccagacagccgatatctccattgaagagatgattgaaaagctgcagaaagattgtatggaagagatcaatctcttttcggaaaacaaactacaactgaagcaaatgggggaccaactcatcaaagctagtaataagagccgggccgccgaaatcgatgataaactcaacaagattaacgaccggtggcagcatttattcgatgttattgggtctagagttaagaagctcaaggagaccttcgctttcatccagcagctcgacaaaaacatgtcaaatcttaggacatggctagctcgcattgagtcagagttgtccaagcccgttgtgtacgacgtgtgtgatgatcaggagatacaaaagcgactcgctgagcagcaggatctgcaacgcgatatcgaacaacactcagccggcgttgagagtgtatttaacatctgcgacgtcctgctccacgacagcgacgcatgtgcgaacgagactgagtgcgatagcattcagcagacaacacgaagtctggatcggaggtggcgcaatatctgtgctatgtccatggagaggaggatgaagatcgaggagacctggcgcctctggcagaagttccttgacgactactcgaggttcgaggattggctcaagagcgcagagcgaactgctgcctgccctaattcctccgaggtactctacacctctgctaaggaagaactgaaaaggttcgaggcgttccaacgccaaatccatgaaaggctgacccagcttgaactgattaataaacagtaccgtcgcttggcccgcgaaaacagaacagatactgcctcgaggctgaaacagatggtccacgaaggaaaccaacgctgggacaacttacaacgccgcgtaactgcagtgctgcggcgactacgtcattttacgaaccagcgcgaggagtttgagggcacccgagaaagcatactagtttggttgacagagatggacctgcagctgaccaacgtggaacacttttctgaatccgacgccgacgacaagatgcggcagctgaacggattccaacaggagatcaccttaaatactaacaaaatagaccagcttattgtcttcggggagcagctgatccagaagagcgaaccgttagacgcagtcctaatagaagacgagctcgaggaactgcacaggtactgccaggaggtcttcggtcgggtctcccgattccataggcgcctgacatcctgcacgccaggcttagaagatgaaaaagaggcctcagagaacgaaactgatatggaggaccctcgggaaatacagaccgatagctggaggaagcgtggcgagagtgaggaaccatcatccccccaaagcctgtgccacctcgttgcacccggccatgaacgatctggctgcgaaactcccgtgtccgttgacagcattccgctggagtgggaccataccggagatgtaggcgggtccagctcgcacgaggaggacgaagaggggccctactactctgctctttccgatgtggagatccccgaaaaccccgaagcctacttgaaaatgactacaaaaacacttaaggcctcttcgggcaagagcatctcagacggacatagttggcatgtgcctgactcgccctcttgcccagagcatcactataagcagatggagggcgacaggaacgtacctcccgtcccccctgcatctagcactccttacaagcccccttatggcaagcttctgctgccacccggcactgatggagggaaggaggggccacgcgtgctgaatggcaacccacagcaggaggacggaggcttagccggcatcactgagcagcagtccggagcctttgataggtgggaaatgattcaggcacaagaactacataacaagctgaagatcaaacagaatctgcagcagcttaatagtgatatctccgcaatcacaacttggctgaaaaagactgaagctgagctggaaatgctgaagatggccaaacctccaagcgatattcaggaaatagaactgagggtgaagaggctgcaagaaatcctgaaggcctttgacacgtataaagcgcttgtcgtctcggtcaatgtgagctccaaagaatttctgcagaccgagagtccagagtcaaccgaactccaatcacgtctgaggcaactgtcactgttgtgggaagcagcccaaggagcagtagacagctggcggggcggcctcaggcagtccctgatgcagtgtcaagactttcatcaattatctcaaaatctcctgctttggctcgccagcgctaagaataggcggcaaaaagctcatgtgacggacccgaaagccgatccaagggcactgctggagtgcaggagagagctgatgcagctggagaaggaactggtggaacgccagccccaagtagatatgcttcaggagatttcgaacagtcttctgatcaagggccacggggaggactgcatagaagctgaggaaaaagtacatgtaatagaaaagaaacttaagcaattgcgggaacaggtgtcccaagacctgatggcccttcaggggacccagaatcccgctagtccactccctagcttcgatgaggtggactccggcgaccagccacccgccacaagtgttccagcccctagagccaagtttagagcagttaggaccaccgagggggaagaggagacagaatcaagagtgccgggttccacgcgaccacagcgctcctttctcagccgcgttgtcagagcggcactgcccttgcagctactcctgttattattgctactcctcgcctgcctgctgccaagctctgaggaggactacagttgcacccaggcaaacaactttgcccgctcattttaccccatgctgaggtacacaaatgggcccccccctacttag

SEQ ID NO: 206684 - DNA, 2292 bp, synthetic construct
  misc_feature 1..2292: note = Description of Artificial Sequence: Synthetic coding sequence
  source 1..2292: mol_type = other DNA
atgagcatggagcggcggatgaagatcgaggagacctggcggctgtggcagaagtttctggacgactattcgcgcttcgaggactggttaaaatctgccgagcgaactgccgcgtgtcctaactcttcagaggtcctttacacctcagccaaagaggaacttaagaggtttgaggcctttcagcgtcagatccatgagcgtttgacccagctggagcttatcaacaagcaatacagaaggctcgcaagagaaaacagaaccgacacagcgtctcggctcaagcagatggtgcacgagggaaaccagaggtgggacaacctccagaggagggtgactgcggtgctgagaaggctgcgccactttaccaatcagagggaggaattcgaaggtacccgggagagcattctcgtgtggctgactgagatggaccttcagctcacaaatgtagagcactttagcgagtccgacgctgacgacaagatgcgtcagctgaacgggttccagcaggagattacactcaatacaaacaagatcgatcaattgatcgtctttggtgaacaactgatacagaagtcagagcctctggacgccgtccttattgaggatgaactcgaggagttgcacagatactgccaggaagtcttcgggagggtgagccgctttcaccgccgccttacaagctgtacacccggcctcgaggacgagaaagaggcttcagaaaatgagactgatatggaggatcctagagaaatccaaacagactcatggcgaaagcgcggggaatcagaagagccctccagcccccagagcttgtgtcacctggtggcaccaggccatgaacgaagcggctgtgagacaccagtttccgtggatagcatccccctagagtgggatcatacaggggatgtcgggggcagcagcagtcacgaggaagacgaagaaggcccatactactcagctctctccggtaagagtatttccgatggccatagctggcacgtgccagacagccccagctgccctgaacaccactacaaacaaatggaaggcgataggaatgttcctccagtgccccctgccagcagtactccttataaacctccttacgggaaactcctgctcccccctggcacagatggcgggaaggagggccctagggtgctgaatggcaacccgcaacaggaggatgggggcctggctggaatcaccgagcagcaatctggcgccttcgatcgatgggagatgattcaggcccaggaactgcacaacaagctgaaaattaaacagaacctccagcagctgaattcagacatcagcgccatcactacctggctgaagaagactgaggccgagttagagatgctgaagatggccaagccaccatctgatatacaggagatcgagctcagagttaagcggttgcaggagatcctgaaagcatttgatacttataaggccctggttgtgtctgtgaatgtctcctccaaggagttcttgcagacagagtcaccagagtccacagaattgcagtcacgcctgcggcaactgagcttgttatgggaggcagcccagggcgccgtcgactcctggagaggcggtctgaggcagagtttgatgcagtgtcaggactttcatcagctttctcaaaaccttcttttatggttggcctcggccaagaaccgacggcagaaagcacacgtgacggacccaaaagccgacccccgcgccctgctcgagtgtcgaagggagctgatgcagttagaaaaagaacttgtggaaaggcagcctcaggtagatatgctgcaggagatttcaaatagtcttctgattaagggccacggcgaagactgcatagaggccgaggagaaggtgcatgtcattgagaagaagttgaaacagctcagagagcaagtgtcgcaggacctcatggctctgcagggcacacagaatcccgcctcccctcttccctcgtttgacgaggtggactcgggagaccagccgcctgccacctctgtaccagcacctcgcgctaaacagttccgggccgtgcgcacaaccgagggagaggaggagacggaatcaagggtcccggggagtactaggcctcaacgcagtttcctatctcgggtggtccgtgctgcattgccgctgcagttactgctgctcctgctgcttctcttggcctgtctcctgccatcatctgaggaggactacagctgcacacaggcaaataatttcgctaggagcttctacccaatgcttcggtatacgaacgggcccccccccacttag

SEQ ID NO: 206685 - DNA, 7251 bp, synthetic construct
  misc_feature 1..7251: note = Description of Artificial Sequence: Synthetic coding sequence
  source 1..7251: mol_type = other DNA
atggagcagttccccaaggagaccgtggtggagagcagcggccccaaggtactggaaacagcggaggagattcaggagcgacggcaggaggtcttgacacgctatcagtcctttaaagagcgcgtagccgagagagggcagaaactcgaagatagttatcaccttcaagtctttaaaagggacgcggacgaccttggcaagtggatcatggagaaagtgaacattctaacagacaagtcatacgaggaccccactaatattcagggcaagtaccaaaaacatcagtccctggaggccgaggtgcagacgaagtcacggctcatgtctgagctggagaagaccagggaagagcggtttaccatggggcattccgcccacgaggagactaaggctcacatagaggagctgcgccacctgtgggacctgttactggagctaacactggaaaagggggatcaactgcttcgggctctcaaattccaacagtatgtgcaagagtgcgctgatattcttgaatggataggtgataaggaagccatcgcgacctccgtagagctgggggaggattgggagcgcaccgaggttctacacaagaagtttgaagactttcaggtggagctcgtcgccaaagagggaagagtcgtggaggtgaatcagtacgctaacgagtgtgcggaagagaatcaccctgacctccccttaattcagtccaagcagaatgaggtgaatgctgcctgggagcggttgagggggttagccttgcaaagacagaaagctcttagcaatgctgcgaacctccagaggttcaagcgagatgtgacggaggcgattcagtggattaaggagaaggagcccgtgctaacatctgaagactacggaaaggatctcgtggcgagtgaggggctgtttcactctcacaaaggcctggagcgaaaccttgcagtcatgtcagacaaggtgaaagagctatgcgctaaggctgagaagttgaccctttcacatccatctgacgctccacagattcaggaaatgaaagaggatttggttagttcttgggagcacatccgagccctcgcaaccagccgctacgagaagctgcaggcaacttattggtaccatagattcagctctgatttcgacgagctcagcggatggatgaacgagaaaaccgccgccattaatgctgacgagctgcccacagacgtagccgggggtgaagtgctcctcgacagacaccagcagcacaagcatgagatcgattcttatgatgacagatttcagagcgcggatgagacaggccaggatctcgtgaacgccaatcacgaagcttctgacgaagtgcgtgagaagatggagatcttggataataattggaccgccctcctcgagctttgggatgaaagacacaggcagtatgaacagtgcctcgacttccacttattttatagagattccgaacaggttgatagttggatgagcaggcaggaggctttcctggaaaatgaggaccttggaaatagtctggggagcgctgaagcccttctgcagaagcacgaggattttgaggaagcttttaccgcacaggaggaaaagataatcactgtcgataaaaccgcgaccaaattgattggcgacgaccattatgactccgaaaacatcaaagctattcgagacgggctgctcgcccgaagagatgccttgcgcgaaaaggcagcaaccagacgaagactgctcaaggaatctctgttgctccagaaactgtatgaggattccgatgatttaaagaactggataaataagaagaaaaagttagccgatgatgaagactataaggatatacagaacctcaagtcgcgtgtgcagaagcagcaagtgtttgagaaggaactggcagtcaataaaacacagctcgaaaatatccagaaaacaggacaggaaatgatagagggaggacactatgcctccgataacgtgaccactaggctgtctgaggtagcctccctgtgggaggaactgcttgaagcgactaagcaaaaggggactcagcttcatgaggcaaaccagcagctacagtttgaaaacaatgccgaggacttacagagatggctagaggacgtagagtggcaggtcaccagcgaggactacgggaagggactggctgaagtgcagaatagattacggaaacacggcctgttggaatccgctgtggccgcgcgtcaagatcaggttgacatccttaccgatctggctgcctatttcgaagaaatcggccacccagacagcaaggacatacgggccaggcaagaaagtctcgtttgccgctttgaggctctgaaggagcctctagctacccggaaaaagaagcttctggatttacttcacctgcaactcatctgccgggacaccgaagatgaagaggcctggattcaggaaaccgagccctctgctactagtacctacctaggaaaagatttgattgccagcaagaaactactcaacagacaccgggttatcctcgaaaacattgcatctcatgagccccgaatccaggaaattacagagcgcggcaacaaaatggtggaagaagggcatttcgccgcggaggatgtggccagccgagtgaaaagtctcaaccagaacatggaatccttaagggcgcgcgccgcccgaagacaaaacgaccttgaagcaaacgttcagttccagcagtaccttgctgatttacacgaagccgaaacgtggatacgcgagaaggagcctattgtcgacaatactaactacggggcagatgaagaagcagccggggcattgttaaaaaaacatgaggctttcctcctggacctgaactcttttggggatagtatgaaggctctgaggaatcaagctaatgcatgccagcagcagcaggccgccccagttgagggggtggctggagagcagcgcgtgatggctctgtacgacttccaagctcgtagtccgagggaggtgaccatgaagaagggcgatgtccttacccttctgtcttccattaataaggactggtggaaggtggaggccgccgatcatcagggtattgtacccgccgtgtacgttagacgcctggcacatgacgagttccccatgttaccccaaaggcgtcgggaagagcctggaaatatcacgcagcgccaggaacagatcgaaaatcagtatagaagcctgcttgacagggctgaggaaaggaggaggcggctgctgcagcggtataatgagtttctgctcgcctacgaggcaggagacatgctggagtggatccaggagaaaaaggccgagaacaccggagtggaactggatgacgtctgggagctgcagaaaaaattcgatgaattccaaaaggatctcaatacaaacgaaccacgcctccgggacatcaataaggtggccgacgaccttctattcgaaggactgctgacacctgaaggagcccagattcgtcaggagctcaactcccggtggggaagcctgcaaaggcttgctgatgagcagagacaactcctgggctccgcacatgcagtagaggtgttccatagggaggccgatgacactaaggaacaaatcgagaaaaaatgccaggccctgagtgctgccgacccagggtcagacttgttctcagtccaggcccttcaaagaagacatgagggattcgagcgagatctcgtgcccctcggagacaaggttactatcctgggagagacggcagaacggctcagcgagagccaccctgacgccactgaggacctgcaaaggcagaagatggagctgaacgaggcttgggaggacctccaggggaggactaaggacagaaaagagagtctcaatgaggcacagaagttttacttgtttctgagcaaggcgagagaccttcagaactggatatcttcaatcggcggcatggttagcagtcaagagctggccgaggacctgaccggtatcgaaatcctattggaaagacatcaggagcacagagctgacatggaagccgaagcacctactttccaggctctggaggactttagcgccgagctcattgactctggacaccatgcctccccagagattgaaaaaaaactccaggcggtaaagctagagcgcgacgatctcgagaaagcttgggagaagcgaaaaaagatcctggaccagtgcttggagctccaaatgttccagggcaattgtgaccaggttgagagctggatggtcgctagggaaaatagcctcaggtcagacgataagtcctcgctggattcactggaggctcttatgaagaaacgcgatgatcttgataaggctatcacggctcaggagggcaaaatcaccgacctggaacacttcgctgagtccctgattgccgatgagcactacgcaaaagaagagatcgcgacaaggctgcagcgcgtgctggacaggtggaaagcactcaaggcgcagcttattgatgagcgtacaaagctcggagactacgccaatctgaagcaattttatcgtgacctcgaagagctggaggagtggatcagcgagatgctgcccaccgcatgcgacgaatcatacaaagacgcaactaacatacaacgcaagtatctgaaacaccagacattcgcccacgaggttgacggcaggtctgagcaggtccacggtgtcatcaatcttggcaactccctcatagagtgttccgcatgcgacggcaacgaagaggcaatgaaagaacagctggaacagctgaaagagcactgggaccacttactggagcgaactaatgacaaggggaagaagttgaacgaggccagcaggcagcagcgcttcaatacaagtatccgtgatttcgagttctggttgagtgaggccgagaccctactggcaatgaaggaccaggcacgcgacttagcctccgcagggaaccttctgaaaaaacaccagctgttagagcgggagatgctggcccgcgaagatgctctgaaagatcttaatacacttgcagaagacctgttatcgtcggggactttcaatgtcgatcagatcgtaaagaagaaggacaatgtcaacaaacgctttttgaatgttcaggaattggccgctgcacatcacgagaaattaaaggaggcctacgccctctttcagttcttccaggacttggacgacgaggaaagctggatagaggaaaagttgattagagtcagctcacaggactatggaagagacctgcagggtgtccaaaacctgttgaaaaaacacaagcgtttagaaggagagttggtggcccatgagcccgccatccagaatgtgctggatatggccgagaagctgaaggacaaggccgctgtcggtcaggaggaaattcaattacgtctggcccagtttgtcgagcactgggaaaagttgaaggagctggcaaaggcgcggggattgaaactggaagagtccctcgagtacctacagtttatgcagaatgcggaagaggaggaggcatggattaatgagaagaacgcccttgcagttcggggagattgcggagatacattggcagccactcaatctctgttgatgaagcatgaagcattggagaacgactttgcagtgcacgagacaagagtccagaacgtttgcgcccaaggagaggatattctgaacaaggaggaatctcaaaacaaagagatctcctctaaaatagaagccctgaatgagaaaaccccgtcactggccaaagccatcgcagcttggaagctgcagttggaggacgactatgccttccaagagtttaactggaaggctgacgtggtagaagcatggattgccgacaaagagactagtttgaagaccaacggtaatggtgccgacctgggtgatttcctaactttgctggccaaacaagacactcttgatgcttcactgcaatcctttcagcaagagcgattgccagagatcactgatcttaaagacaaactaattagtgcccagcacaatcagtcaaaagccatagaagaaaggtatgctgccctgttgaagcgctgggaacagctgttggaggcctctgctgtgcatcgacagaaactactcgaaaagcagctaccacttcagaaggcagaggacctattcgtggagttcgcccacaaggcctcggcccttaataattggtgtgagaagatggaagagaatctgagtgagcccgtccactgtgtctcgctgaacgaaattcgccagctgcagaaggaccatgaagatttccttgctagcctggcccgggcccaggcggattttaagtgcctgctggaactagatcaacagatcaaagcactgggcgtgcctagctctccatacacctggctgaccgtggaggtcctagagcgcacgtggaaacacctgagtgacattatagaagagcgagaacaggagctgcaaaaggaggaggctagacaggtcaaaaacttcgaaatgtgccaggagtttgaacagaacgcttccacattcctccagtggattctggaaaccagagcctacttccttgatggatctctccttaaagagaccgggacattggaatcacagctagaagctaataagaggaagcagaaggagatccaggccatgaagcgacaactgacaaagattgtggatctgggcgacaatctggaggatgcactcatactggacataaagtattctacgattgggctggcccagcaatgggaccagttgtaccagctgggcttaaggatgcaacacaacctggagcagcaaatccaggccaaggatatcaagggggtgtctgaagaaacgttaaaggaattcagcacaatctataagcatttcgacgaaaacttgacagggcgactgactcataaggagtttcgctcatgcctcagaggcctcaactattacctgcctatggttgaggaagacgagcacgagcctaagtttgagaagttcttagatgcggttgaccccggccgaaagggatacgttagtctggaagactatacggcctttcttatcgataaggaatccgagaatatcaagagcagcgacgaaatagaaaatgccttccaagcactcgcggaagggaaatcctacatcacaaaggaggatatgaagcaggctcttacgcccgaacaggtgtcgttctgtgcaactcacatgcagcagtacatggaccccaggggaagatcccatctgagtggttacgactatgttggttttacgaattcatactttggcaattag

SEQ ID NO: 206686 - DNA, 7260 bp, synthetic construct
  misc_feature 1..7260: note = Description of Artificial Sequence: Synthetic coding sequence
  source 1..7260: mol_type = other DNA
atggagcagttccccaaggagaccgtggtggagagcagcggccccaaagtccttgagaccgccgaggagattcaagagagacgtcaggaggtgctgacgcgatatcaatcttttaaggagagagtcgctgaaagggggcagaagcttgaagattcgtaccacctccaggtctttaaaagagacgccgatgacctcggtaaatggattatggaaaaggtcaacatcttgaccgataagtcctacgaagacccaactaacattcagggtaagtaccaaaaacatcagtctcttgaagctgaggtgcagacaaaatcgcgcctgatgagtgagcttgagaagactagggaagagaggttcaccatggggcacagcgcacacgaagaaacgaaggcacatattgaggagcttcgccatttatgggaccttctgctcgagttgacacttgagaagggtgaccagctgttgcgggcactgaagtttcagcagtacgtacaagaatgtgccgatatccttgaatggattggcgacaaggaagcaatagccacgtctgttgagttaggcgaggactgggagcgtactgaggtattgcataagaaattcgaagactttcaagttgagctcgtggccaaggaggggcgggtagttgaggtgaatcagtacgcaaatgaatgcgcggaagaaaaccatcccgacctccctctcatacagagcaagcaaaatgaagtcaatgcagcttgggagcgcctccgtggcctggctctgcagcgtcagaaagccttatccaatgccgctaacttgcagcgattcaaaagggatgtgacagaagccattcagtggattaaggaaaaagagcccgtgctgacatcggaggattacggaaaagaccttgtcgcctccgaggggctgttccattctcacaagggcctggagcgcaacttggcggtcatgagtgacaaagtgaaggagttatgcgcgaaggcagagaaactgacactgtcccatccaagcgacgcgccccagatccaggaaatgaaagaggacctcgtgtctagttgggagcatatcagagctctggcgacatccagatacgaaaaactgcaggcgacttattggtaccacaggttctcctcagactttgatgagctttccggctggatgaatgaaaagaccgcagccattaacgccgacgaactgccaaccgatgtagctggcggtgaggtgctgctcgacaggcatcagcagcacaagcacgaaatagatagttatgacgacagatttcagtccgccgacgaaactggccaggatctggtgaatgctaaccacgaagccagtgatgaggttcgggagaaaatggagattctggataacaactggacagcccttttggaactgtgggatgagaggcacaggcagtacgagcagtgcctcgatttccatctattctatcgcgattccgagcaggttgatagctggatgagcaggcaagaggcattcctggagaacgaggatctcggcaactctttgggatctgctgaagccctgctccagaagcacgaggacttcgaggaagccttcactgcccaagaggaaaaaattataactgttgacaaaactgctactaaactgatcggcgacgaccattacgactctgaaaatatcaaagccattcgggatgggctgctggcaagaagagatgctctgcgtgaaaaggccgctactaggcgacgtctgctgaaggagagtctgctgctgcagaagttgtacgaggactctgacgacctgaaaaactggattaacaaaaaaaaaaagcttgctgacgacgaggactataaggacatccagaaccttaagtccagagttcaaaagcagcaagtttttgaaaaggaactggccgtcaacaagacgcagttagagaatattcaaaaaacaggccaggagatgatcgaaggcgggcactacgcttctgataacgtgactaccaggttgagtgaagtggcttcactctgggaggagctgttggaggcgactaagcagaagggcacgcagttgcatgaggccaaccaacagttgcagttcgagaacaacgcagaagatttacagcgttggctcgaggacgtggaatggcaagtgacgtccgaggactatggcaaagggctggccgaagtgcagaatcggctcaggaaacacgggctgctggagtcagcagtcgccgccaggcaagatcaagtggacattctcacagacctggccgcctactttgaagagatcggccatcctgactccaaggacattcgggcacgacaggaaagtctggtctgtcgattcgaagccctcaaggaacccctcgcgacccggaagaagaaattactggatcttctgcatctgcaactgatctgccgagatactgaggatgaagaggcttggattcaggagacggagccttcagcaacgtccacttacctgggaaaggacttgatagccagcaaaaagttgcttaacagacaccgcgtgattctggaaaacatcgcatctcacgaaccgagaattcaggagattaccgaacgcggcaacaagatggtcgaggaaggccatttcgccgcagaagacgttgcgtcacgtgtgaaatcactcaaccagaacatggagtcactgcgcgcaagagcagcacgcaggcagaatgacctcgaggccaacgtgcagttccagcagtacctagccgacctgcacgaggctgaaacctggatcagggaaaaggagcccattgtcgacaacactaactatggggccgatgaagaagctgccggggccctgttgaaaaagcatgaggccttccttttagatctcaatagttttggggactcgatgaaagctcttcgcaatcaggctaacgcctgccagcagcaacaggcagcaccggtggaaggtgttgccggggaacagcgagtgatggctctgtacgatttccaagcccggagccctcgggaggtaactatgaaaaaaggagacgtccttaccttgctgtcctccatcaataaagactggtggaaagtggaggccgccgaccaccaaggtatcgtgcccgccgtctatgtgagacgcctcgcccacgatgagttcccaatgctgcctcaacgcagaagggaagagcctgggaatattacacagcgccaggagcaaatcgagaaccagtatcgatccctactggacagagccgaggagagacggaggaggcttttacagcggtataatgaatttctgctagcctacgaagccggagatatgctcgagtggattcaggagaaaaaagccgagaacaccggtgttgagcttgacgacgtctgggagctacagaagaagttcgacgaatttcaaaaggacctgaatacgaacgaaccgaggttaagagacattaacaaggtcgccgatgatctgctctttgaaggtctcctgactcctgaaggcgcacagattcgacaagagctgaactctcgatggggatcattgcagaggctggcagacgaacagcgccagctcctgggctccgcccacgccgttgaagtgtttcaccgagaggcagacgacaccaaggagcaaatagagaaaaagtgccaagctctgtcagcggccgatcctggtagcgaccttttttcggtacaagcacttcagcggcggcatgaggggtttgaacgagatctcgtgcccctaggcgacaaggtgacgattctcggggaaacggctgagagactaagcgaaagtcacccggacgctactgaggatttacagaggcagaagatggaactaaacgaggcgtgggaagacctccaaggacgtactaaggatagaaaggaatcactcaatgaggcgcagaagttctacttattcctttccaaggccagggatctgcagaattggatttccagtattggcggaatggtgtcctcccaggaattggctgaggatctgacaggcatagagatcctactggaacggcaccaagagcatcgtgccgacatggaagcggaggcacccacttttcaagctctggaagatttctcagctgagctcatcgattccggacaccatgctagtcccgagatcgaaaaaaagcttcaggccgtgaaacttgagcgcgatgaccttgagaaggcttgggaaaagcgaaaaaagatcctggatcaatgcctggaactgcaaatgtttcagggtaattgcgaccaggtggaaagctggatggtcgccagagaaaattcacttcggagtgatgacaagtcctctctggatagtctggaagccttaatgaaaaagagagacgacttggataaagctattacagcccaggaaggaaagattacagatctggaacacttcgctgagagcctcatagcggacgagcactacgcgaaagaggaaattgctacgagactccagcgtgtgctggatcggtggaaagctctgaaggcacagcttattgacgagagaaccaagttgggagattatgcaaacctgaagcagttctatagagatttggaggagctagaggagtggattagcgagatgttaccaacagcatgcgacgagagctacaaggacgccacaaatatacagcgcaagtacttgaagcatcagaccttcgctcacgaagtggacgggcgctcagagcaggtacacggagtcattaacttgggcaactcactaatcgaatgtagtgcatgcgatgggaatgaggaagcgatgaaggagcaactggaacagctgaaagagcactgggaccacttgctcgaaaggacaaatgataaaggaaaaaaactcaacgaggcgtcaaggcagcagcggtttaatacttccattcgcgatttcgagttctggttatctgaagcagagactttactggctatgaaagaccaggccagagacctcgcctccgctggcaacctgcttaagaaacatcagcttttagaacgggaaatgttggcacgggaggacgcgctcaaagaccttaacacactggccgaagacctgctgtcctctggaacctttaatgtggaccagatagtaaagaaaaaagacaatgtcaacaaacggtttttaaacgtccaggaactcgcagccgctcaccatgaaaaactcaaagaggcctacgccttgtttcagttcttccaggacctcgacgatgaggagagctggattgaagaaaaattaatcagagtatcatctcaggattacggtcgagacttacagggcgtccagaatctgttaaagaagcataagcgcctcgagggagaacttgtggctcatgagcccgctatacagaacgtgctggacatggcagagaagctcaaggacaaggcagccgtgggccaggaggaaattcagctccgactagctcagttcgtggagcattgggagaagttgaaagaactggcaaaggcgcgcgggttgaagctcgaggaatcattggagtacctccagttcatgcagaacgcagaggaggaagaagcatggatcaatgaaaaaaacgccctcgcagtccgaggagactgcggagataccctggctgccacccagagtctgctgatgaagcacgaggctctggagaatgacttcgcagtccatgagacaagagttcagaatgtgtgtgcccaaggtgaggacattctcaacaaggtgctacaagaggaaagtcagaacaaagagatttcaagcaaaattgaggcgctgaatgaaaagactccgagccttgccaaagcaatcgccgcttggaagttgcagctggaagacgattacgccttccaagagttcaactggaaagctgacgtcgtggaagcatggattgctgataaagagacctccctcaagactaatgggaatggcgctgatctaggtgattttctgacattgctagctaaacaagatacgttggatgctagcctgcaaagctttcagcaggaaaggcttccagagattactgatttaaaggacaagttgatctcggcacaacacaatcagagcaaggcaatcgaagaacggtatgcagctctcttaaaaaggtgggagcagttgctggaagcctccgctgtgcacagacagaagctgttggagaagcaactgccgctccagaaagccgaagatctgtttgtagaattcgcacataaagccagtgcgcttaataactggtgtgaaaagatggaagagaatctctccgagcctgtgcattgtgtttccctcaatgagatcaggcagttgcaaaaggatcatgaagattttctcgcctctctggctcgcgcccaggctgatttcaagtgtctgttagagttagaccagcaaatcaaagcgctgggtgtgccttcctctccttacacatggctcacagtcgaggtgctggagaggacatggaagcacttgtcggacatcatagaagagagagaacaggagctccagaaagaagaggcaagacaggtgaaaaacttcgaaatgtgccaggagtttgaacaaaatgccagtactttccttcagtggatcttggagacacgcgcttatttcctggacggtagtctactcaaagagacaggaactctggaatctcagctcgaagctaacaaacggaaacagaaagagattcaggcgatgaagcggcagctgactaagatagtcgacttgggagataaccttgaggacgcacttatcttggatatcaagtatagtaccatcggcctcgcacagcaatgggatcaactgtaccagctaggactgagaatgcaacataacttagagcagcagatccaggctaaggacataaaaggggtgtcagaagagaccctcaaggagtttagtacaatctataagcattttgatgagaacctcacaggccgtttaacccataaagagttcagaagttgtctacgaggccttaattactatctgcctatggtcgaagaggacgaacacgaacctaagttcgagaagttcctcgacgctgtcgacccaggccggaagggatacgtctcactggaggattacaccgccttcctgatagataaggaatcagagaatatcaagagtagcgatgaaatagagaatgccttccaggcactcgcagagggcaagagctatatcaccaaagaagatatgaaacaggctcttaccccagagcaggtgtccttctgtgcaacgcacatgcagcagtacatggatcctagagggagatcccacttgtctggttatgactacgtgggtttcacaaattcctactttggaaactag

SEQ ID NO: 206687 - DNA, 7434 bp, synthetic construct
  misc_feature 1..7434: note = Description of Artificial Sequence: Synthetic coding sequence
  source 1..7434: mol_type = other DNA
atggaccccagcggcgtgaaggtgctggagaccgccgaggacatccaggagagacgccagcaggtcttggatcggtaccatcgtttcaaagaattatcaacattgcgacggcagaagcttgaagactcttaccgttttcagttcttccagcgggatgccgaggagctcgaaaagtggatccaggagaagttgcaaatagcctcagatgagaattacaaggacccaaccaacttgcaggggaagctgcaaaaacaccaggccttcgaagcagaggttcaggcaaactccggtgccattgtgaaactggacgaaaccggcaacctcatgattagtgagggacatttcgcttccgagactatccgaactagacttatggagttacataggcagtgggaactgctactggaaaagatgcgcgaaaagggaattaaactgctgcaggctcagaagttagtgcagtacctacgagaatgtgaggatgtgatggactggatcaatgataaagaagctattgtgacctcagaggagctggggcaagacttagagcatgtggaagttctacagaaaaagtttgaagagttccagactgatatggccgctcacgaagagcgcgtgaacgaggtgaaccagtttgctgccaagctcattcaggagcagcatccagaagaggagctgataaagacaaagcaggacgaagtaaacgcagcttggcagcgcctaaagggtctcgctttacagagacagggcaaactcttcggcgccgcagaggtacaacggttcaaccgcgatgtcgacgagactatttcttggattaaagaaaaagagcaactgatggcttctgacgattttggccgggatttagcctctgtacaagcgctactcagaaagcacgaggggctcgagagagacctggccgcactggaggataaggtcaaggctctctgcgctgaggcagaccggttgcagcagagtcaccctctcagtgctacccagatccaagtcaagagggaggaactgattactaattgggagcagatccgaaccctggccgccgagaggcacgccaggttgaatgatagctacagactccagaggttcctggcggatttccgcgacttgacctcgtgggtcaccgagatgaaagcgctgattaatgccgacgaattagcttccgatgtagcaggcgcggaagcactgctggatagacaccaggagcataaaggcgagatcgacgcccatgaagattcatttaaaagcgcggacgaatcaggccaagcattgctcgccgcagggcattacgcaagtgacgaggtccgagagaagctcaccgtgcttagcgaggaacgggctgccctgttggagctgtgggagttgcgacgccagcaatatgaacagtgcatggacctccagctgttctatagagatacagagcaggtggataattggatgtctaagcaggaggcctttttgttgaatgaggacctgggcgatagtttagatagtgtggaggccttactgaagaagcatgaagattttgaaaaatccctctccgctcaagaggagaagatcacagcccttgacgaattcgccaccaaactgattcagaacaaccactatgctatggaggatgtagctaccagaagggacgccttactgagcaggaggaatgctcttcacgagagagctatgagaaggcgagcacagctggctgattcttttcacttacagcagttctttagagactctgacgagttgaaatcttgggtcaacgagaagatgaaaaccgccactgacgaggcgtacaaggatccaagtaatctgcaaggcaaggtgcagaaacatcaggcgttcgaagcggaattgagtgctaatcaatcgagaattgacgcattggagaaggccggacagaagctgatcgatgtcaaccattacgcaaaggacgaggttgctgcgcggatgaatgaagtgatcagcctttggaaaaaactactagaggctaccgagcttaaaggaataaaactaagggaagcaaatcagcaacagcagtttaaccgcaacgtggaagacatcgagctgtggctgtacgaagtggagggtcatcttgccagtgacgactatggcaaggatctgactaatgttcagaatttgcagaaaaagcatgctctgctggaagccgacgtggcagcccaccaggaccgcatcgatggaattaccattcaggcccggcagttccaggatgctggacattttgatgccgagaatataaagaaaaagcaggaggcactggtcgcgagatatgaagctctgaaagagcccatggtggctcgcaaacaaaagctggcggatagcctccggctgcaacagctcttccgagatgtggaggatgaggagacatggattcgagaaaaagaaccaatcgccgcttctacaaatcgtggcaaagatttaattggggtgcagaacctgctaaaaaagcaccaagctcttcaggccgaaattgcaggccatgagcccagaatcaaggcagtaactcagaaaggaaacgccatggtcgaggagggccactttgcggctgaggacgtcaaagctaaattgcacgagctcaatcagaagtgggaggcactgaaagctaaagcttctcagaggcgacaggatctcgaggactcactacaggctcagcagtacttcgcggacgctaacgaagccgaatcttggatgagggaaaaagaacctattgtgggctccacagattacggaaaggacgaagattccgccgaggccctgttaaagaaacacgaggccctcatgagtgacctgtctgcctacggatccagcatccaagcacttcgagaacaagctcaatcctgtaggcagcaagtggcacccaccgacgatgaaaccggaaaggaattggttcttgcactctacgactatcaggaaaagagccccagagaggtgactatgaagaagggcgatattctgactttgcttaacagtacaaacaaagactggtggaaggtggaagtgaacgatagacagggctttgtgccggcagcatatgtcaagaaactggatcccgcccagtccgctagcagagagaatttgctggaggaacaggggagcatagcacttaggcaggagcaaatcgacaatcagacgcgtatcactaaggaggctggcagcgtgtcactgagaatgaaacaagtggaggagctgtaccatagtttgcttgagctgggtgaaaagcgaaagggcatgctcgaaaagtcctgcaaaaagttcatgctgttccgagaggccaacgaactgcagcagtggattaatgagaaagaggccgccttgacttctgaggaggtgggtgcggacctcgagcaggtggaggtgctgcaaaaaaagttcgacgattttcaaaaggatctgaaagccaatgagtccaggcttaaagacattaataaagttgccgaggatctggagtccgaaggcttaatggcagaagaggtgcaggccgtgcagcagcaggaagtgtatggcatgatgccccgtgatgagactgattccaaaacagcctcgccatggaaatcggctcgtcttatggttcatactgtagcaactttcaactccataaaagaactcaatgaaaggtggagatccctgcagcagctggcggaggagaggagtcagctcttgggtagcgctcatgaagtccagaggtttcaccgggatgcagatgaaacaaaggagtggatagaggagaaaaaccaggcccttaatactgacaattatggacacgatttagctagtgtccaggccctacagcggaagcacgagggatttgagcgcgaccttgcagcgttaggcgataaggtaaatagtcttggagaaactgctgaacggcttattcaatctcaccccgaatctgcagaagatctgcaggagaagtgtacagaactgaatcaggcctggtcgtcacttggcaaacgcgcagaccagagaaaggctaaattaggcgactcacatgatcttcaaaggtttctgtctgacttccgtgacctgatgtcctggataaacggcatcagaggactcgtgagctcagatgagttagcaaaagacgtcacaggggccgaggcactcctagaacgccatcaagaacatcgcactgaaattgacgcacgcgcaggaaccttccaggctttcgagcagtttggtcagcagctgctcgcccacggacactatgcctcccccgaaataaagcagaaattggacattctggatcaggagcgcgccgatttggaaaaggcttgggttcagaggagaatgatgctggaccagtgtctggaactgcagctgttccatagagactgcgagcaagccgagaattggatggccgccagggaggccttcctcaacacagaagataaaggagactctttagacagcgtcgaggccctaattaagaagcacgaggattttgacaaagccatcaacgttcaggaagagaagatagccgctctgcaggccttcgccgatcagctgatagccgcaggacactatgccaaaggcgatataagtagtcgccgcaacgaagtcttggatagatggcggcgtctgaaggcccagatgattgagaaaaggagtaagctgggggagtcgcagacattacaacagttctcccgtgatgtcgacgaaattgaagcctggatcagcgagaaactacagactgccagcgacgagtcttacaaagatccgacaaatatccaggtaagcctaatgctgtcaaaacatcagaaacatcaagcattcgaggctgagctacacgctaatgccgatcgtatcaggggagttatcgatatgggcaactcactcatagagcggggtgcttgtgccgggagcgaggatgccgtcaaagcccggctcgccgctctagccgaccaatggcagtttcttgtgcagaagtctgccgaaaagagtcagaaactgaaagaggcaaataaacagcagaattttaatacaggcatcaaggacttcgatttttggctttctgaagtcgaggcactactggcgagtgaggactacgggaaagacctcgcctctgtgaataacctgcttaaaaagcaccagttgttggaggcagacatttcagctcatgaggaccgcctgaaggacttaaactctcaagccgattctctgatgacctcatcggccttcgatacaagtcaggtcaaggataaacgagataccatcaatgggcggttccagaaaattaagtcaatggcggcatccaggagagcaaagctgaatgagtcccatcgcctgcatcagtttttcagagatatggacgacgaggaatcctggattaaagagaaaaagctgctggtgggtagtgaagactacggaagggacctcaccggtgtgcagaacctgcgcaagaaacacaaacgactcgaggccgagctcgcagcccatgagcccgcaatccaaggggtgctggataccggcaagaagttaagcgacgataataccattgggaaagaagagatccagcagagattagcccagttcgtagaacattggaaagaactcaagcaactggcagctgcgcgggggcaaagattagaggaaagcctggagtatcagcagttcgtggccaacgtcgaggaggaggaggcctggataaatgagaaaatgacccttgtggcttctgaggattacggagatacactcgctgccatccaggggcttctcaaaaagcacgaagcattcgagaccgactttacagtgcacaaagatcgggtaaatgacgtatgcaccaacggccaggacctgattaaaaagaacaatcaccacgaagagaacatttcaagcaagatgaaaggcctgaacggaaaagtgagtgacctcgagaaggctgcagcacagagaaaggccaaactagatgaaaattccgcctttctgcaattcaattggaaagctgacgtggtcgaatcatggatcggggaaaaagaaaactccctgaagactgatgattacgggcgcgacctgagttctgtccagactttgttaactaagcaagagacgtttgatgccggcctgcaggcttttcaacaagaaggaattgccaacatcaccgccctgaaggatcagctgctagctgccaagcacgtgcagtccaaagctattgaggccagacacgccagcctgatgaaacgatggagccaactgctcgcaaatagcgccgccagaaaaaagaaacttcttgaagcccagtcccactttcgcaaagtggaggacctattccttacatttgccaagaaggcatcggcttttaattcctggttcgaaaatgcagaagaagacctgacagaccccgtcagatgcaactccctggaagagattaaagctctgcgggaggcccatgatgcctttcgttcttccctgtcttcagcccaggccgatttcaatcagctggcagagctcgaccggcaaatcaaatcttttagagttgcttctaatccttatacttggttcacgatggaggccctggaggagacttggcggaacctgcagaagatcattaaggaacgggagctggaactacaaaaagagcagcggcgccaggaggaaaacgacaagttgcggcaggaattcgcccagcacgccaatgcattccatcaatggatccaagaaacccgctgtcaacccgcaggagcaagttgtatggtcgaggaatcaggaacgctcgagtcccagctcgaggcaaccaagagaaaacaccaggagatccgagccatgcgtagtcaactaaagaaaatcgaggacctcggcgccgcaatggaggaagcactgatcctggataataaatacacggagcactctacagtcggcctcgcccagcagtgggaccaactcgatcagctcgggatgaggatgcaacataatctggaacagcagattcaggcccgcaacacaaccggcgtgactgaagaagcattgaaggagttttctatgatgtttaaacattttgataaggacaagtcaggtagactcaaccatcaagagttcaaatcttgtttgagaagcctcggctatgatctcccgatggtggaggagggtgaaccagacccggagttcgaggcgatcctggacaccgttgatcccaatcgtgatggtcatgtgagtctgcaggagtatatggcttttatgatctcccgagagactgagaatgtaaaaagctctgaagaaatcgagagtgcttttcgagcactgtcatctgagggcaaaccatatgtcaccaaagaggaactgtatcagaacctaacccgcgagcaggcagattactgtgtaagccacatgaagccatacgttgatggtaaaggaagggagctgcccacggctttcgattatgttgagttcacgcgctcattgttcgtcaactag
